United States Patent Application Publication US 2022/0102000 A1 - sequence listing, part 20

SEQ ID NO: 4049 - DNA, 24400 bp, Unknown
  16S sequences of unknown bacteria
atggacaaattgagcgtccgagagtacgaagacccttttaagggtggcaagtaatacgaacgccccttaaggggctgcaaaagtgacaaaggcaatgggcttgaacttttgcaaaaagtgaaagccagcgccttgagacgctggccggtaatcattgggcttttagcccttgtgcaaaccacccgtttgacgggtggttatgattgtgcgagccggggcgctcactgcatgttggcaaagcgctcgacggcctttgtgaagttggcgatggtcttgtccgcgtcgccgtgctcgatgccgtcgcggacgcagtgctggatgtgcccctccagcacgacctggcccacgcggtgcagggcggacttggccgcgttgatctgggagaggatgtcctcacagggcacgtcctcgtccaccatgcggtcgatggcctggacctggccgatgatcttcttgaggcggcggtgcaggttttccgcgtccatacattgcttcactgtgcatacctcccccaggcgtttggctctattatccgccgcggcaggcggtttgtcaagccggggcgcgggaagcgcgtcagacctcgaaggggttgggcaggccgtgctcggcgttgtagcagcccagaagcgaattgcggaccatatcgctgacggactggtcggtgtaatacgccttgtgagaggtcaggatcacgttgttgaacccgcgcagcagggggatgaagcggttgtggatgacggtgttcttccaatcgtggtggtagaggccgacctcatcctcgaccacgtccaggccggcggcgccgaccttgccgctctccagcgcgtcgagcagggcgttggtgtcgacgagggggccgcgcgccgtgttgatgaggacgacgccgtccttcatcttggcgaaggcctcgcggtccagcaggtggaagttctcgtcggtcaggggcatgtgcagggtgagcatgtcgctctggcgcaggatcgtgtccaggtccacgtaggtggcgtactgcttgacctcgtcgttctcgtagaggtcgtaggcgaggacgcggctgccaaagccgtgcaggtcccggatcacggtgcggccgatcttgcccgtgcccaggaccccgacggtgaggttcgccatctccatgccctggatgccggggagggtgaagtcgttcatctcgttgcggcggaggatctggcgcatgcgccggatgctcatgagcatgagcatgagggtgtagtccgcgacgcagttggaggaatagggcgcgttgctgatgcggatgcccagctcctttgcgcgcttgacgtccacgtggtccacgccgatgaggcggttggagatcatcttgacgcccaggcgcgcgaactcctcgaccagcgccgcgtccacgcgcgtgagcaggatgctgatgtacggatacccggcagccaggtgcgcgttttcgagggtggggtcttcctcggtataccccagctctatgcccagctctttgcaatacttctcaaaatagggggcctcgtcaaacttgcggtaggaataggcaaataccttcatctttcgtcacctctggcagaatcttcccctagtataccacgcaaatgttaagagtaaacggcgcggcgaaatccttcgccgcgccgatgcgcatcgtggaacgggccctcagaggaagagcgtgcagcccatctgccggaactcctcgatcttcttctccaggtcctgccttgtgacctcaaacatctgcgcgaggcagtcgatgcagaggtattttgtggccccgcggttgatgagcttgcgggtcaggcccacgtcgtcgcggccgaggggccggccgcagctctcgcacgtcagcaccggaccagccggcagcggaagagccggcagtcgtgcgcggggatgacgggattatagaagtcgcgcttgacgccgatgtcctcgcccgtgagcacgtccgtcatggcaaagccgtatccggaggcgtagggcaggccgcagtcggcgaagatacaggggatctccgagtcctgcgtggagaggttgtagtagcctaggatgaactcgccgtccgagaggtgcttgagcagcgtgagcgacgtctcgggctggcggctccaggggtgctcgccctcgggcgggttggggttggtgacggtcacgccgtcgagctggacgacgtagggcgggcgcgcctcctcgtcctggtcgatggcgatcagctgcgggttgcgcaggaggtccgcgcagaagtcgttcatgctgcgcaggtcgccgcccatcatcaggggcgcggagagcatgcaccagagcgtgaactgcacgcggtactccgcgtccgtgcagaccttgccgatgcccacgttcccctggccgtacatgccgacggtgagcatgtcgatgtcgttaaagcagtagtttccgctgtcgcagaagttgggcagctgggactttgcgatgttggtgaaggagacgaagttgtccaggatgtccccggtggagcggtacatgtgcgcgccgatggagcgcatccagtgccagggctcctgctggccccagttgcaggcggagaagaggatctcgcggccggtggccttgagcgccatgctcatggtctggtagcgcatcttgcagtcgccgtttgcggggaaattgcagaagtcgtacttgaggaaatccacgccccactcggcaaaggtggccgcgtccacgaactcgtggtcaaagctcgcggggtagccggcgcaggtgcgaacccccgcgcaggagtacatgccgaacttgaggcccttgctgtggacgtagtcggccacggccttcatgccgtgggggaacttttcggggtcggggacgaggcggccgtccgcgccgcgctcgcgcagggaccagcagtcgtcgatgacgaggtattcataccctgcgtcgcggtagcccttttcgaccatggcgtccgccatctcgcgcacgagcgcgtcggagatgtttgcgccgaacgtattccaggaattccagcccatgggtgcggttcttgcgatcatggttgcactccctctcttgtgatgcattgcagggatagtgtagcacaaattctccctccgcgccagcgggcggagaaaaaatcttgcaaatcgggggcaagaacggtatagttataccgtactgttttttctcgcgcgggccgcgggcgccgcggtactttgagcacaaggagcgaaattcggcatggagaacacacacttccttcccccgcactacaggccgaagctggacctgtaccacacgcagcttgccatcaagcaggccaaggacgacttcgaggacgagcttgccgcgctcctccacctctcgcgcgtttccgcgcccctgttcgtggacaaggcgacgggcctgaacgacgacctcaacggcgtggagaggccggtcgagttcgacatcaaggagcagccgggcatcgccgtgcaggtggtgcagtccctggccaagtggaagcgctacgcgctgggccgctatggataccccgtgggccagggcctctacacggacatgaacgccatccgccgggacgagatcaccgacaacttccactccatctacgtcgaccagtgggattgggaaaaggtcatccgccgcgaggaccgcaacccggagttcctgaaggacacggtgcgctccatccaccgcgcgctctacaacacgctcaaaaagctccgcgcctccttcccggagatcgaggtcgagctccccgaggaggtcgccttcatcgatacaacggagctggaggcgcgctatcccgacctctcccctgccgcgcgcgaggaggcctttgtgcgcgagcacggcgcggccttcttcctgggcatcggctggccgctgaagtccggcctgccgcacgacggccgcgcgccggactacgacgactggtccctcaacggcgacctggtctactaccacaaggcgctggacacgcgcctggagatctcctccatgggcatccgcgtggacgcggagtccatgctcgcccagctctcggccgccgggcagatggagcgcgcctccctgcccttccacagcgcgctcatcgacggccggctgccgctgaccatcggcggcggcatcggccagagccgcctgtgcatgctgctgctgggcaaggcgcacatcggcgaggtgcagtgcgcgctctggccggcggacgtggtggagcgcttttcggtcgcgggcgtgccgcttctctaaaaaaggggggatctccatgcactttgtgaaaatgcacggtctggggaacgactacatctatgtagacgagtttctctaccccggtccgcgggacatcgccgcggccgcgccgcgcgcgagcgaccggcacacgggcatcggcggggacgggctggtcctcatccagccgaccgacgcggccgactgccggatgcgcatgttcaacgcggacggttccgaggggcgcatgtgcggcaacgcgatccgctgcatcgcctactacatgctcgtgcgccatccggagcgctgcaagggggacgcggtgcggatcgagacgctctccggcctgcgcgcagtgacggcgcagcgggacgcgcaggggcgcatcctctccctgcgcgcggacatggacgagccgggcttctccgcggagagcatccccgtgctctccgacgcgccgcaggacgtggacgtccccttccgcggcggcacgaaaaagggcgtctgcgtgtgcatgggcagcccgcacgtggtcctcttcgtggacgaggacccgatggagctggacctgccggccgtcgggcccgcggtggagtgctgcgccctcttccccaaccgcgtgaacgtggaattcgtgcgcgtgctcgcggacgggagtttgcagatgcgcgtctgggagcgcggcacgggcgagaccatggcctgcggcacgggcgcctgcgcctcggcggtggcggcgatgtacaccgggcgcattgccgcgcgggaggcgacggtccgcctgcggggcggcgacctgttcatcgagtggaacgcgcagaacaaccgcgtgtacatgacggggccggccgccatcgcctttgagggcgactggctggaggacggcgagctctaaagcgcgcaaagagcgcctgccgaggttcggcaggcgctcttttttgttctcacgcttcctcgcggggcgggacgggcttctccaggaggagctcgtcaaaggtctggccgtcggggcctgcgacgccgcgccggaagcccgcgctgccgtagccgtgccggtcaaagacgtggcgggcgaccaggtcctccttgcggacggcgatctccaggcgcgcaacgccgttttcccaggcccagtcgtccgccatgcgcagtagcaggccgccgatgccgcgccgctcgtgcgaggggcgcacgccgcaggtcacgcgggccgcgtccggggcggtgcgcacgaggagcagggcgccggcgagcgccccttcctccagcgcgccaaaggctgcgccctgcgcgagcgccgcggagagcgtttcgccgaggacctgctgcgcaggggcaaaggccatcgccgcgcccaggtccgtaagctgcgggccgtcctgcgcggtcaggggctgaaagatcatgaaactgcctccttttttctcccaatgcagaaaagggagagcgcggagcactctccctctgtttttctggttggggccgattccttacaccacgccctgggcgatcatggcgtcggcgaccttcttgaagcccgcgatgttggcgcccgcgacgaagttgccctcgacgccgaaggccttggcggtctcgctggcgttgcggtagatgccgaccatgatgccttccagcttcttgtcgacctcgtcgaaggtccagctcaggcgctgggagttctggctcatctccagggcggaggtggccacgccgccggcgttggaagccttgcccggcgcgtagaggatgccgctgccctggaagacctcgatggcctcgggcgtagagggcatgttcgcgccctcggcgacggccttgcagccattggcaacgagggtcttggcgtcctcgccgtccagctcgttctgggtggcgcagggcagggcgatgtcgcaggggatggaccagacgcgcttgccttccatgtactgggcgccggccttcttggcgcagtagtccttgacgcggccgcgctgcacttccttgatctccttcatgagcgcaaggtcgatgccgtcgggatcgtagacggagccgttggagtcggacatggagatgaccttcgcgcccagctgcatggccttctccgccgcgtagatggcgacgttgccggagccggagatgacgaccttcttgcccgcaaagtccatgcccttttcggcgagcatctcgcgggtgaagtagatgaggccgtagccggtggcctcggtgcgggccagggagccgccgtaggtcaggcccttgccggtgagcacgccctcgtacttgccggtgatgcgcttatactggccgtagaggtagccgatctcgcgggcgcccacgccgatatcgccggcgggcacgtccacgtccgcgccgatgtggcggtagagctcggtcatgaagctctggcagaaggccatgacctcgcggtcggacttgcccttggggtcaaagtcgctgccgcccttgccgccgccgatgggaaggccggtcaggctgttcttgaacacctgctcaaagcccaggaacttgatgacgcccaggttcaccgaggggtgcaggcgcaggccgcccttgtaggggccgatggcggagttgaactgcacgcggaagccgcggttgacctggacctggcccttgtcgtccacccagggcacgcggaacatcaccacgcgctccggctcgacgaggcgctcgagcaggccgttcttctggtaagcggggttggcgtccaccgcaaggcgcagggagtccagcacctcgcgcaccgcctgatggaatacggcctcgcccgggttgcgggcgatgacggtttcgagaacggaatctacgtaattcatgtaaccttccctttcctgtgcgagcggatggcgacccccgctcttgatcgtactgtattattataatgaccgcggaagcgatttgcaagaatttttttgctaagtttcatgcaatttcgcgcgcaggtggaaagaagcggcggttccccgcgtttttgcgcagggagccgccgccggttatgcagacttatgcaaggccgatgaataaagctgcgcgggatcaggcgatctcgtcctgctcgagcaggcgcacgcccttgtcgcgcagaaggttccccgcgcgctcgggctggtcgacgcggaagatgatgatggcgtcgttgcccacgcggcgcacgaaggaatacaggtactccacggagatgtcgttgtcgcgcaggagctggagcaccccggcgagcccgccgggcacgtccggcacggccacggccaggacctcggtcaggtttgcggtgtagcccttgtcgcgcacgaccttgagcgtcttctcgttgtcggagacgatggcgcgcaggattccgaagttcgtcgtgtcggcgatggacagggcgatcaggtccacgccattttccccgaggagctgggtaaagtccgtaaggcttccatggcggttctcgataaagacagagatctgctggataaacatggatgcggcctcctttccgtcgatgggggtaaggggaacaagcgctttagagcagcttgcgcttgtcgatcgtgtgctgggtcttgccctggctgcgctcgatggagttgggcggcatcaggcgcaggttcacgcccaggcccaggacctgctcgatggcgcgtttgacgcgatcctgcagggcctcgatcttgcggacctcgtcggagacgagctccggcagcagctcgacctggacctcgagcgtgtccaggttgtgcacgcggtccacgatgagcaggtagcgcggcgcgatgcccgggatgccggtgatggcgctctcgacctgggaggggaagacgttgacgccgcggatgatgagcatgtcgtccgtgcggccgtgcaggcggcggatgcgccggtgggtgcggccgcacttgcagggctccgggatgatggaggtcaggtcgtgggtgcggaagcggatggtgggcatgccctccttgccgatggtggtgatcgtcaattcgcccatctcgccgtcgggcaggggctcgccggtggcggggtcgatgatctcggggatgaagtagtcctcccacatgtgcaggccctcgcggccctccaggcactccatggcgacgcccggcccggcgctctcggtaagtccgtagatgtcaagggccttgatgtgaaggagcttttcgatctcgttgcgcatgccctccgtccagggctcggcgccgaagaggccgacgcgcagcttgaagttggacaggtccatcttctggtcgcggatggtctcgcccatcatcagggcgtaggagggggtgcaggccacggcgtcgcagccaaggtcctgcatgagcatgagctggcgcttggtgttgccggcggaggtggggacgacggtggcgccgatcttctccacgccgtagtggagcccaaggccgccggtaaacaaaccgtagccgtaggagacctggacggtatcctgccgcgtgatgccggcgcagccaaggcagcgggcgacgcactcggcccacatctcaacgtcaccccgagtgtagccggcgacgatgggcttgccggtggtgccggaggaggcgtggatgcggacgatctcggatcttggcgcggcgaatgtgccgtcggggtagttgtcgcgcaggtcgcgcttgtccatgaagggcaggagtttaaggtccgaaagactctggatgtcctcgggctttacgccctgtttctgcatgcgctcgcggtagaaggcgacgttggtgtacatgcgctggacggtcttttgcaggcgctcgagctgaatgcgctccagcgactcgcggtcgatggtttccatggggcgattccagtacatcggcataacctcccaatatggtttcgcaaaattgcgcgcaattttgcgagggacatcccgggcgccgcgcgctgcgcgcacaacgcccgggataccggaagcagttccttcggaactgctcctcgcggcgtacacgccgccgctgcggaatggacatgagggggctgcggccccctcaaactcccccggggaacgttctggggtggcgtcttgtgctccctggagggtatgctccccggaggggagcgctcaggcgttgtagccgctttcgaaggcgaggaggttgctttcgaggaagcgggcggggacgcaggcgcgcagggcgtcgagccagagctccttgtcaaagtgcaggcggcgggccagggcgcccaggagcacggtgttgacggcgcgggcgttgccggccttttcggccatgggcagggcggagagcgccacgacgtccgcgcgcgcccggagcgtttccaggatgttttccgggtacttggccgcgccgatgatcacggggagcggcaggatgtgctgggtgttgacgacgagggttccgccgtccttgaggtacggcaggtcccgcagggcctccagctcctcgaaggcgagcacatagtccgcgcccttctgctcgatcatgggggaatagaccttctcccccatgcgcacataggtgatgaccgagccgccgcgctggctcatgccgtggacctcggagaccttgacgtcgtgcccgaggaaaagggccatgtggcccaggatgcggctggccagcagcgttccctggccgcccacgccgcagatgacgatgttcaggtccttgatcttctccgccatattacctctcgcctcctttgatcgcgccgaagttgcacatctccttgcacaggccgcagccggtacacagcgacgcgtcgatggacaccgagccgtcctcggccttgacaagcgccgggcagccgatgcgcaggcacatgccgcagcggcggcagacctcggcgtcaatcgtgcagggctcgcccttcttcttgatgagcagggcgcaggggcggcgcgcgatgacgaccgaggggccgtccttcccgcactcctcgcgcaggacctgctcaaagagcttcatgtcaaagggatcgaccacgcgcaccgagggcacgccgatggcctggcagagcttgaccacgtccagctgcggggcgatctcgccgcgcacgttctggccggtggtggggttgggctggtggccggtcatgccggtggtggagttgtccacgatgatgacggtggagttgccctggttgtagaccacgtccacaaggccggtgatgccggagtggacgaaggtcgagtcgccgatgacggcgacggtgtgcttggcaaagtcgcggccgcgcgccttctccaggcccagggccatgccgatggaggcgcccatgcacacgacggaatccacggcgttcagcggcggcatggcgcccagcgtgtagcagccgatgtccgcggcaaccgtgaggttcatcttcttgaggacgtagaacaccgcgcggtgcgggcagccggggcagagcaccggcgggcgctgggggatgtccggggtctccatggggccggcgtcctcctccccgccgaagaggcggccgactttgcgcacgaagagctcgccctgcaggccggttttgtccttgccggagcagggaatgcccatggccttgatggcgtcctcgaaatagggctccagctcctcgaccaccaggagctgctccaccttggcggcaaaggcgcggatctgcttttccggcagcgggtagaccatgccgagcttgagaaccgaggcgtttggcagcgcctccttcacatactggtaggcagagccggagcagacgacgccgatttttgtgtccgccatctcctcgcgggcaaggccgaggctgtcgatctcctccaggaggcgcttttcgcgcgcctccacggcgacatggcggcccttggcgtagccgggcatcatgacgaacttgcgggcgtccttctcgtaggggggcagggcgatctcctcgcgctcgccttcctcgacgagggagcgggcgtgggccacgcgcgtgaccaggcgcaggaagaccggcgtgtcgtacttctcggagatctcaaaggcgcggcgggtgaactccaggcactcggcgctgtcggaaggctcgagcatgggcacatgggcgctgcgggcgtagaagcggctgtcctgctcgttctgggaggagtgcatgccggggtcgtcggcggcgacgatgacaaggccgccgcgcacgccggtgtaggcggcggtaaagagcgggtcggcggcgacgttgacgccgacgtgcttcatgcagcacagggcgcgcgccccgcccatggaggcgccgatggcgacctcgagggcgaccttttcgttgggggcccactcgcagtagacctcctccttggagaagttggccatgttttcggtgatctcggtggagggcgttcccgggtaggcgacggacacgcgcacgccggcctcgtaggcgccccgggcaacggcctcgttgcccagcatgagttttttcatctcgtatctcctgtatctcacaaaatgtgcgttagcgaaggtcggtgacgcgcttggccttgccctcaaagcgcttgagcgtattgggcgagacgagcgtgaccttggcgtcgatctgcaggacgaccttgagccggtcgtgaatcctgcgggtgagggcctcgagctcgccgtaggagttgagcagcgccgcgtccacgagctcgaccttgacctcgatctggtccatgtagcccttcttggtgacgacgatctcgtagtgcgggccgatgccctccatgccgatgagcacgccctcgatctgggaggggaagacgttgacgccgcggatgatgagcatgtcgtccgtgcggccggcgatcttctgcatgcgggtggtggtgcggccgcacttgcaggggccgggcaggagccgcgtgatgtcgtgggtgcggtagcgcaggagcggcagggcctgcttcatcaggggcgtgaccacgagctcgccccactcgccctccggcacgggttcgccggtggcggggtcgacgacctcgcagtagaagtagtcctcgttgatgtgcatgccgcacttttccgtgcagtcgccggaaacgccggggccgatgagctcgctcatgccgtagttctcggtggcgacgatgccccagcggcgctcaagctcggagcgcatctcctctgtcgagccttcggcgccgaagaggccgacgcgcaggtggatcttgtccatcatgcccatgcgctcggcgacctcggccatgtaaagggcgtaggagggcgtggcgacaaggaccgtggagccaaagtccgccatgagctgaatctggcgctcggtattgcccgaggagatcgggacgaccgcggcgccgagcttggccaggccaaagtgcagccccagcgcgccggtgaacaggccgtacccaaaggagatctgcgcgatgtcctcgcgcgttgcgccgccggcggcgcaaaggcgcgccacgcacgtggcccacatgtcgatgtcctgctcggtatagcccacgaccgtgggctgcccggtcgtgccggaggaggcgtggatgcgcacgatgtccttcatcggcacggcgaacaggccgtacgggtagttcgcgcggaagtcctccttggtggtgaagggcaggcggcgcacgtcgtccagggagcggatgtcctccgggcgcaccttcaaggcgtccaggcgctcgcggtacaggggcacgcgctcgtagacgtagcgcacggtctgctgaagccgttggagctgcagggcgcgcatctcctcgcgtcccatcgtttcgatctcgggttgaaatatcatggctctttcctcttttctgcttttctaccgttctgccgtggttctgcccgcgcgctgcagttggcgcgcgggcagttggggaagatagactttattatactaaaccgctgcgcgtttgaaaagacccgcggcggcatttcccgtcattttccgctgccggcctcccccgccgccgccaggcgctggcgctgggcctcgtacaggcagatcgaggtcgcgcaggcgaggttcagcgaggaggcggcgccgaagatcgggatgcgggccagcacgtcgcaggcctccttgcaggcgcgcgagaggcccaccgtctcgttccccatcatcaggagcgtcgggcggctcaagtccaccgcgtccaggctcaccgtgccgtgcgcgctcgtgccgacccactgcatgtccgagtagcgctcgcgcagggggagcaggtcctgcacgccctccaggcgcacgaccggcagggtgaagagcgtgccgatcgtcgcgcgcacgcaggcggggtcgtagacgtccgcgctgtggccgaccatcaggagcgcgtcggcgcccatggcgtccgccgagcggatgatggagcccaggttccccgggttctgcgtgcggtcggtcaacagcagcaggccgctgcgcagggcgatgtccgagagggcgaaattccggatgctgcacagcagcaggatctccgacgtctcctcccggtccgagagctcggagagcagcgcctcgggcaggacgtagtgcgcaaggcgcggccggcgcaggatctcctgcgcccagggcgagagccggcgctcccgcgcgtagaccacgccgcgcgcctcccagccgggggtttgcagcgcaaggttgatgccctttacgctttcgacgacgaaaaagccctggcggtgccgcttgttgcggttgcgcatggcggcctccaggagctgaaaggtatcgttgcgcgaatggatctcgatgcgttcggccatactgatttcggtcctttctccgcgtgcgatggaatggacgtggattttctgattttcagtatagcacaacgcgcggcgcagcacaacttttgccggaaaccgggctgcaaaaagccttgataaattttcaaaacaatattgacaattttttgtcacttctatataatgtccatggacgccgggaagcggagacgcccccccccgcgcccgcccagatatgcaccggcacagaacgacagaaaggaatgaaaatcctatggcacgtttcactctcccccgcgacctgtactacggcaagggcgccatggaagaactccgtcaggccctccagggctacaagaagggcttcatcgtcgtcggcagccactccatgcagaagaacggcttcctcaagaagctggaggacatcctgcaggaggcgggccttgcgacccaggtctttgaaggcgtggagcccgatccctcggtggagaccgtcatgcgcggcgcgcaggccatgcgcgactttgcgcccgacgtgatcctctccatcggcggcggctcgcccatggacgcggccaaggccatgtgggtgttctacgagcatccggaaaagaccttcgacgacatcaaggaccccttcaccatcccgcgtctgcgtcagaaggcgatctttgtggcgattccctcgacctcgggcacggcctcggaggtgacggccttctccgtcatcacggactacaagacgctggtcaagtacccgctggcggacttcaacatcacgccggacatcgcgatcctggacgaggacatcccgctgaccatgcccaagaccctgaccgcgcacaccggcatggacgccctgacccacgcgacggaggcctatgtcgcgggcctgcactccgacttctccgacccgctggcgctcaaggcgatccagatgatcttcgactacctgcccgcctcctacgacggggacgcggcggcgcgcggcaagatgcacgtggcccagtgccttgcgggcatggccttctccaacgcgctgctgggcattgcccactccctggcgcacaaggtcggcgcgcagtacgagatcccgcacggctgctgcaacgcgatcctgctgcccaacgtcgttcgctacaacgccaaggcctgcgccgcgcgctacgcggacattgcgcgcgcgctgaacctgcccggcacgaccgatgaggagctcgtcgccgcctacgtcgcggccgtggaggagctcaaccgccgcctggacatcgcccccaccttccgcgagcacggcgtgagcgaggagaagttcgagagcacgctcgacttcgtcgccacccaggccttcggcgatccctgcacgggctccaacccccgtcagaccagccccgaggacctcaagaagatcctgcgctgctgctacgagggcaagaaggtcgacttctaatcccgccttttctgcaaaaagggagcccgcgcgaggcgttttgccccgcgcgggctcctcttttttatctgccctgcgcgtgcgcgcggaaggccgcgacgaccgcggaaaccgtctcctccaggttctggccggcgcagtccagcacgatgtccgcattgcgctcgtagtggggaatgcgctcgtcgtagagcgtgcgcaggctctcgcccgggcccatggcgatgccgcgggtggcgatgttgcgcagccggcgctcgatctccgcatagggcaggcgcaggtagaccgaaacgcccgtcctgcgcaggtgcgcgatggcgcggtcctccagcgcgacggagccgccggtggccaggaccgtgccctcgcacgcgatgccgaggatgacctcctcctccaggcggaggaagccctcagtgcccagctcgtccacgaggctctgcaggagcctgccgctgcgcgactgcagcacaaggtccgtgtccaggaagggcatgcccagcgccttggcacacagcacgcccaccgtgctcttgccgcagcccggcatcccgatgagaattaggtttttcatctgccgcactccttctctgggaaaagctttgtcccccgaattatacgccgcggcgcggcgcgaagaaagcgcgggcgtgtaaaatgcgctttaggtgcgaaagagcgcgaagtcgcgcagggccttggcgcagtcctccagcggggcgcgggaggtgttgagcgccgggcgcagctgggcgaccgcggcgttgtaggcgcgcatggcgtcgaggaagtcctcgtgcgcgctgctgcgccaggcgggccgcgcgcgcaggcgggcgacgaggtcctcctcgtccgcatagaggccgagcacgtgcaccgccgggaaaaaggccgccatggggttttgcaggaagtcctgcggcatgccgcccaggaagagcattgcgggcttgccaccctgggaggcgttgagcgccgtctgcatccacatggtgaagaaggcgccgttgccctggccggcaaactcctgccgccagagcaggtccccgtccaggggcaggaactccgtttccggccgctgcaggcgcagggccagcgtggacttgcccgtgcccgaggccccgagcacgacgaacaggggcagggccaggtattcgtgctcgccgccgcactcctcgcagcggacgacgccgcgccggccgagaaagcgaacggtcttctttgtctgatacagcccgcagtgcgggcaaacggatagaaacatggcgcacctccgaggatgtttctttgcgcggttggggattcccaggagagttctgcgcgcggggcgcggtttcctgcaaaaaatgcgcggaacccctttacaggatcttaaaaatccggtatactctttgccgtagcatggcgcgccccgatgcggcgggcgcggtttccgcctgcgggcgggctttccccacggaagaatggaagaacggaagggtggtcaacgcatgaagtgggtctttttgtctctgtacctggcggcgatcgtagtcatcgccgtgatttcctcgcgcaaaatcaagagtctggacgactatcatctgggcggcagaaggatggggccgtggctgtctgcgttcgcatacggcacgacctatttttcggccgtcatttttgtcggctacgcgggcaagctcggctggagtttcggcacggcctcgacctggatcggcatcggcaacgcgctgatcggctcggcgctggcctggatggtcctgggcaaccgcacgcgcgtgatgacgcagcgcctgggcgccacgaccatgccggagttcttcgaaaagcgctttgagagccggccgctgaagatcgcggtggcgctggtgatcttcgtgttcctggtcccctactcggcctcggtctaccaggggctggggtacctgtttgaggcgacgttcggcctgccgtttgagctgtgcatggtgatccttgcggcctttacgctgatcgcggtgttcctgggcggatacctgggctcggcgctgacggacgtggtgcagggcgtgatcatgatcgtgggcatcattctgatgatgttcttcctctttggcaagatgggcggcgtgggtgcagcgctggaccagctcgcctccatcgacgagagcctggtctcccccttgggcgcggacccgaagaacctgctctggatggtgtgcctgacctcctttggcgtctggggcctgccgcagatggtgcacaagttctacgccatcaaggacgcgcggtcggtgcgcatcggcgcggtggtctcgaccgccttcgccctgctcatcggcgggtgcgcgtacttctccggcgcgttttcgcgcgtggtgctgggcatcagcgacccggcgcaggtcggcggcgtggacatgctggtgccggagatgctctttgcctccatgccggactggatgctgggcctgatcctggtgctggtgctctcggcctcgatgtcgacgctgcagtcgctggtcatggtctcctcgtctgcgatctccatcgacctggtcaagggcgtgttccgcccggagatgagcgaccgcgcggtcaagaacctgatgcgcgggctctgcgcggcgtttgtggtgctctcgctcgtggtcgcgctgtcgcaggtggcggagatcgtgacgctgatgagcatgtcctgggggacggtcgcgggctgcatcctcgggccctacctgttcggcgtgctgacgaagcggacgaacaagatcggcgcggcgtgcggctttggcgcggggctcctcgtatcggttgtgctgacggcggcgctgggcacggcgcagtcgcccttcatcgggtgcatggcgatgctggcctcggtggtggtgacgcccgcggcctcgctcctcgccccgcggcaggaggaggcgctgctcaaccgcgcgttcgcgcgcggcagcgcggcaaagtgagcgagcgcctgaggcggggttccttccgcagcgcaaccgaaaaacggcggaaaacgacggtttttccgccgttttcttctggaaatccgctttacaggacatgcagaatctgatatactaaagataatatgaatttctaaagggggaattcctgtgcctacagaccctatatgggggcaactgattcttcaagtcgtgctcatcgcgatcaacgccttcttcgctgcgtcggagtttgcgctggtcagcctcgatgagaacaagctgcgcgcccaagcggaggagggcgacaaattcgcggtgcggatgctcaagatgatctcctcgcccaacggattcctgtccgccatccagatcgccatcacgctcgccggcttcctgaactcggcattcgccgccgacggcttttccgagccgctgatgaattggctgagccagttcgggttcttcgcctcgatgaatccgtctgtcctcaataccgtctgtgtcgtcatcatcacgctgatcctgtcctacttctccctggtctttggcgagctggtgcccaagcgcgtcgccatgcagaagaccgaggccgtggcccgcgccgtcagcggcgtgatcttcggctttgccaccatcacccggcccatcgtatggctgctgtcggtgtcgaccaacggcgtgctgcgcctgctgcgcatcgaccccaacgcccagactgaggaaatcaccgaggaagacatccgcatgcgcgcggacatcgccgaggaaaagggcgccatcaccgaggccgagggcgaaatgatcgacaacgtcttcgagttcaacaaccacacggcctttgacgtcatgacccaccggacggacgtcgtggccctgccggttgacgcgaccgacgacgagatcctgcgcgtgatccgcgaatcgggcctgtcgcgcatcccggtctacgaaaagaccatcgacgacgtggtcggcatcctgcgcacgcgcgaatacctgctctaccgcgccatggacgaatacaagcccctgcgcaccatcctgcacacgcccaacttcgttcccgagaccgtgcgcacggacgtgctcttccgctccatgcagcagaagaagaaccacatcgccatcgtcgtggacgaatacggcggcgtgagcggcctggtgtccatggaagacctgctggaggaaatcgtcggcaacatctacgacgaatacgatccccaggtcgagcaggccgtgaccaaggttggcgacaacctctggcgcgtgtccggcatctgcgagctcagcgtcctctccgaggcgctggacatcgcccttcccctggacgaggactacgacacgctcagcggtctggtcttctcccagctctcctccatcccgcaggacggctcccatccggagctggacgtggccggcctgcacatctacgtcgaggagatcagcgaccaccgcgtcgaatgggcgcaggtgagcaagatctatcccgaggaagaggacgaatcggatgccggggcagaaaaatccgcttcctaaaccttccggcgcaacaaacgggcgccgcgccttccccgcagaacggggagggcgcggcgccttttttattgcaatgggctagtccaattcctccagcgtcaaccggtaggagggcaggcattcctcgaggaaggcgcgcacctccggcatgtcgtagcggtcgtggatcttttgcaggatctggtcggccaccttctcgaactcggagttgccggccttgacctcctcgatgcagtggatgtaggcggcgatggtgtccgcggccttgacgcgccgccactccgggtccgcctccggggtgacgagcatgggctccagcgccggacgcaggtcctccggcacgagcgcgctgagctttttggcggagagctcctcgatgtggccgaaggaggcgcggatctcggggctgaagtacttgatgggcgtggcgatgtccccggtgatgacctccggcgcctcgtggaaggtcgccagcgccgccgcgcggtcgggatttgccccgccgccaaagcgcgcgttgcggtaggcggccagcgcgtaggcgatcatggacacctgcagggaatgctgggccacgtcctcctcaaaggaattgcggcgcatgttccaccgccggatgtgcttgagccgcgccatgtaggcgaaaaagtggtagtgcatgggctctcctcctctatgtttccccgtggaagggctctttttccattgtgccacggcaagtggcgggctgtcaaccgcttttccccccgcacgccgcgtgcccgcggccaaacctttacgcaaatgtgaaaaatgtggtatactagggagaaacaagggggatacagactatgacggaatcctatgaccgggccatgaaccaggccatgacctacctcggcgcgcgggcgcggtccgccaagcagatggcggactacctcgaaaagaaggggcacgacgagcgcaccatcgcccaggtcatggaaaagctcacggaataccgcttcatcgacgacgagtcctatgcgcggcgctttgtggaggcgcacgcgggcgcggacggcgcctacctcctgcggcgcaagatggtccagcggggcctgacgggcgaggccatcgaccgcgcgctggaggaggtccccttctccgctcaggtcgaggcggcgcgcgccctgatcgaaaagaagctgcgcggcgacgaccgcccggacgccctgcgccgcgccgtacaggccgccatgcgccgcggctttccctatgacgcggtgcgcgaggcggcacaaaaccttcaggaggatgtagaatgggaagagtagccggtccctatgttccggatgaaaacgaccgcgagctgctgcggatgctgcacggcgggggcgagatctcgggggaagagatcagcgagcgcctgcacatgacgcgcgcggcggtctggaagcgcgtgcagcgcctgcgctccctggggtattcgatcgaatccgcgccgcggcggggctattggctcgccggggacgtgctgcggccggacgacatcctcgcccagctgcacacgcgctggctgggccgcaccctcgtctgccaggacgtggtggactccacgttccacctggcgcgggacctggaggccgcgggcgcgccggacggcgcggtcgccgtcgccgggcagcagacggccgggcgcggccgcctgaaccgcacctgggcctccccgccggacgcggggctgtacttcaacatcctgctgcggccaaagctgccgccggtgcaggccgtgcgcctgacgcccgcggtggcggtgggcgtgtgcgagggcctgcgcggcatgggctttgacgcgcgcatcaagtggccgaacgacatcgtcatcggcgcgcgcaaggtctgcggcatgctgctggagatgggcggggacatggagcgcctgcgcttcgtctcggcggggatcggcatcaacgtctcccagagcgcggaggacttccccgaggagctgcgggaccgcgccacctcccttgcgcaggagacggaccgccgcctctcgcgcacggaggtgctgtgcgtggtcctggagagcgcggagcgcgccatcgacctgtgctacgcggactacggcgcgctgctggaaaactaccgcgcgcgctcggcgacgctgggggcgcgcgtgcgcgccacgagcgcgaccggggaggcgagcatcacgggcgtcgccacagacatcaacgaaaacggcgagctcatcgtgcaggacgacgcgggcgcgccccacgtgctccgggccggggacgtctccatccgcgggatgatgggctatgtgtaagggggaaagtcagatgaaaaagggaaatctctgcgacgtggcgggcctgctcgtgggccacgcgcaggacgaggcggcccgcacgggctgcacggtgctcttcgcgccgggcggatttgtcgcgggcgtggacgtgcgcggcgcggcgccgggcacgcgggagacggatctgctccaaagcgaggccatgatgccccgcgtcaacgccatcgtgctcagcggcggctcggcctacggtctggacgcttgctcgggcgtcatgcgcgcgctggaggcgcgcggcgagggcttccagacgcctgaggcgcgcgtgcccatcgtctgcggcgcggtgctctacgaccttgcggtcggcagcgcgcaggtgcggccggacgcggccatgggcgagcgcgcgctccttgcggccacggcggacccggtctttgggcgcgtgggcgcgggcacgggcgcgacggtcggcaagctcgtgcccggcgcgcaggcgcggcgcagcggcatcggctcggcgtccgtctccctgcccggcgggggcacggtcgcggcgatggtcgcggtcaacgcctgcggcgacatctacgacccggagaccggggcctgcgtggcctgcggcgcggtcgaaggccggccggtgcgcgcgcgggacgccctgcagctgcgccagggccttgccgggcagaacacgaccatcggcgtcgtggcgacggacgtgcgcctgacaaagaccgaatgcaaccgcctggcgaccgtggcgcacgacgggtacgccctggccatccgcccgacgcacacggtctcggacggggacacgctctttgccgtgtccctcggcgagaaagaatgcggcgcgatggagctgcaggccggcgcggtggaggcggtctggcgcgcgatcctggacgcggtacggcgcggatcggagggagaagcatgttaaagggcttgggctgcgacctggtcgaggtgcggcgcgtggcgcggggcatggagaacccgcgcttcctggagcgggtctttaccgagggcgagcgcgaagccatcgcgcacaagggcgcgagcgcggccgcggggctctgggccgccaaggaagcggtcagcaaggccctgggcacgggctttgtgggctttgccctgcgcgacatcgagatcctgacggacgaggacggcgcgccgcacgcctatctgcgcgggggcgcgcaggcgcgcctggcggcgctgggcgcgctgtcgatctgggtgagcatctcgcacgacggcgggtttgccatggccgtggccgcggcggaataggcgcggcaggcgacataaggagggaaacgatcatgcgggtgctcacaccggagagaatgcgggaaatcgagcggcgcgccatcgagggctacggcatcgacgggctgctgctcatggagcgcgcggcgcttgcgcttgcggaggaggttctctcctcccgcgcgggcgcggggcggccgctccgcgcgctgctcgtctgcgggtccggaaacaacggcggggacgcctacgcctgcgcgcgcatgctgcacttaaagggcgcgcaggtctttctgctccccctctgccccgtggagaagctgccgcccgacgcgcgcaagaacgcgcagatctgccaggcgctcgggattcccgtggtggggctggaggcgctggagcgcgactacgacgcggtggtggacggggtgttcgggacggggctctcccgcgcgccggcgggcgcgtttgcgcaggccatcgcggggatcaaccgcgcgggcgcgcgcggcgcgcgcatcgtgagcgtggacatcccctccggcatcgacggcgcgacgggccagcccctgggcgaggcggtgcgggcggagacgaccgtgaccttccagtgggccaagcgtggccacttcctctaccccggggcctcgtgcgccggccgcctggtcgttgcggacatcggcatcccgaacccggcacagggattcctgcccgaggatgcggaggtgctggacgccgggggcgtgcgcgcgcttctcccccgccgcgcgcgcgacgcgcacaagaacgacttcggccacgcgctgctcgtcgcggggagccggggcatggcgggcgcggcggtgctggcggccacggcctgcatgcgcgcgggcgcggggctgctcacggtgctggcgccggagcgctcggtgctgccgcaggtgcaaagcgcggtcccggtggccatgtgcctgccccttgcggaggcggcggacggcgcgcttgcggacgatgcggcggccctgtccgccgcgcttccgggaaagagcgccgtggg

SEQ ID NO: 4050 - DNA, 12682 bp, Unknown
  16S sequences of unknown bacteria
gaaaaggtgcggtatgcgccggctgttgggaaatataaggtttatatcatagacgaggtgcacatgctgagtacaggagcgtttaacgcgctgctgaaaacgttggaggagcctccggcccatgcggtatttatcttggccacaaccgagacgcataagctgcccgctacgattctatccagatgccaacgctttgattttaagcggctgccggagtcgctacttgtacagcaaatggaaaaggtgctgtcggaggaaggcatacaggcggatcgtcaggcgttggcgcttattgcaagccaagcgcaaggcggtatgagggatgcgttgagcctgctggaccagtgcgcaggcatgtccggaggagaaatcaccctggaaaaagcgcagcaagtcttaggcgcagcgggcagtgatcaggtagaacgtatggcacaaagcattgcggatcgtcaggtaaggcagacgcttgcgcagctgcaacaaatttacgacaatggagcggatctttcggtatttgtacgggaaatgatcgactattatcgggagcgcatgatagaatgtgcagagcaggcagaagggcagtgggcgatggaagcgatgctgttgctggcgcaggcagagacggatatgaagctgtctcctcggcctaaaacacagctggaggctgcgctggtaaagctttgcgtgcctaaaatgagccaaggcgaggtgcagctgttaaagcgcattgaggccctggaaaaagcggtgcagcatggacagcagatgccagcgatccgtcggtcatcgcctatggtagaaacaatgcaggccgaagagcaggccccaccttgggaagaagtgccacctccggaagaggatctgccgccttgggaacagctggcgccgccctccctgccaaaagagccggcccccaaaaaacaaaaggaaacaccggaaaaatctgccccagcgccatcgcgggtagaggatttgttggatacgatttttgccatcttttccaaaagacagccgggagctgcttactttttaaagcgcgctgaaaaggcatgggaagatggttcgcagctctggctgcaatttgatcccatcaatgaaaatctggtgcaggcgctccgccaatttcagcaggatctggaacagtcggcagagcaggcactgggacacaaagtagaaatacaattcaaactcaacaccccagaacaagaaaccaagccggatatacaggatgtattgaaaaaagcacaacaagcatttggcttggaaattgaaatagaagaatagaaaagaggaaaacaaaatggcaagaggcggaatgggcaatatacagcagctgatgcagcaagcacagcgtatgcagcagcaaatggcgcaaaagcaggccgagctcgcagaaaaaactgtgacggcgcagagtggtggcggtatggtaacggcgacggtaaacggtgcgcatgaactgttggagctttccatcgatccggatgtgatcgatccggaggataaagaaatgctggaagatatggtcgtggctgcggtaaaccaggccatgcagcaggcagaggagatggcgcagcaggagctgggtaagctgacaggcggtatgaatatcccagggctgcgttaacatgagctacgttatagaatcactatcgctgctgacagaacagctggcaaagctgcccggtatcggcggaaagaccgctcagcggctggcctatcatatcctgaccatgccaaaggccaaagcaaaggagctagcggccagcattttgactgcaacggagcatgccaggttttgcagtgtatgcggcaacctaaccgatcaggatccatgcagcatttgcacagatgccacaagggacggctcggtgctttgtgtcgtgcgggatgccagggatgtcatggccatggagcgtggacgtgtatttcgtggcaaataccatgtgttgggtggcgcgctttcgcccatggatggtattggcccggatcagctgcgcatcaaagagctgttggcgcgcttagaaggtgtagacgaagtggtgatcgccaccaacccggatgtagagggggaggcaacggctgtatatctgtggcgtttgctaagccctatggggattcgggtttccaggatcgcacatggcgttccggtaggcggagacttggaatacaccgacgatgtgactttgcagaaggccatggagggccggcgaatcatggaataaaaaagccctgctttgtcagggctttctcttctataaaggatgagcggcaaactctgcaaatgactgatagataagctgataccctctttcattggggtggatgccgtcttggcacaaaagctgttgataacagcgcttatccagaaaggcagagcgaatatccaccaaggggcagtgggtttgataggaaagcttcaatacactttcggaatacagttcctgatatcggtaaatcatctgtatatcgcccagccaggataggataggcgcacggtctaggcggcccttttcagtaaaccatgcaaaataccgctcagcatcgatgggaggcagcgtaatgagtatggggaggacatcccgggcccgtaagtcctcgatcatctgctgaaagacagctgtaaacttacatagcggggtatgcggatggtgctcctgtttgggagccaaggccacctcctgccagccgtgatcgcagtcgttgccgccatattccagcaaagctatgctgtgggggcgtagtttttgtagattggcctgcaagatacgatatcctttttcaatggtagagccaaacttagcatggtttagcacatgaaaggggtactgttgttgaaacttttccatccattgaggggcagtaaatcgataacgctgtgtttttggatccaacagcgtggctttcataatagaagtaccaaagatatgcacatcagtcatagaacaagccctctttgccttatatttagtttataaaactatattatcttatataaataaacatttcaagcaatgaatgtataaatattgtgaagctttttttaccatgttatactattgccaaaaggaggacggatttatgcagtcagaacataaccttgggtttacagacattgcgcaatatcattgccttcgatgggcggagctgccggatttggccctgtatatggatcaagtgcttaccattttggaaaagcagctttgtctgattgcgtgcgggccggaggataagaacctgaccagcacgatgatcaacaactatgtaaaacataaggtgattccggcaccgataaagaaaaaatatgaaaaagagcatctggcaaatttgacaatggtctgcattgcaaagcaagtacttagcctttctgaaatacaagccatgatggagaaattgagagcagcagagaatatagaaacactgtatgatagattttgctgcattttggaaaaaaagctgaggcagacctttggaaaccaagtgatgctggaagaatcaaaggaagagacccccaatatgcttgaggcattggcgggcgcttttgccaacaagctgtatctgcaaatgctgctgatggagcagactacggaaaaggggaaaaaggctgaatgatgcatttggccttttttcttgtacaagagaaggcttcttggtagacaagggccatagcagatgcaagcgcacacgcattgcgcaaagaatggagagttttgtggatttgtgcctgtgcgtataaagaggacctttttggatatacttggaaaaaacgaaaaggaggccctcgtatgctaggtagcaagcaaaagatgatagaaaaagaggatgccgcatatctggaaaaagccttagcggcatggaaggatgcccagaactatttcgacaatgtctcggatccggatttaatagagtttgcaatctacgagatgaaagcggcgcagcataggtatgaatatatgataaagtgtgccaaacgcggggagatcagatcatggcaagagcatccaattctaatgcagaccatcccactgagcgatcccatgatggaggagaccaagcgcttggataggctagccatccgccacatgatgcagcaaaagcaacggctttcggaggagccagctgacataatcggacaaaaataaacatatagtaggaacaaaaaggaaaggcgtgtggctgcatggaggtttccgtttctactgtggtggcattttttgcggcgctttgcattatttttctgttgggaaagattttgggaaagccggcacgctggattggccggctgctgctcaatggtatcattggcggcgttgtgctgtatcttgtcaatctctttggagggctgatcggccttcatgctgcgctgaatccttttacggccttgatcgccggcaccctgggtattccaggggttgccctggtgttggtgctacccttgctgttaacataatgaaaactttcttgcaattaccaatttgctgtggtatagtatgtagaaataacgaaggggagtaactcgccatatcggttttgctgttcgtcaactcggccttcagcccgggcagcaatcagcttttgagagtaagacctttgttcctactaggagcaaaggtttttttgcgcctaaaaaagcaaacataggaggcagtagaaggtatggaactatggcacacaaagactgtagagcaaacgagagatgctttgcagagcacagaacagggcctttcggcggaacaggtgcggagcgccacgcagaaacatgggctcaatgaattgaggcataaaaagcccaagagcgtgggtaagttgtttttggagcagatgacggatgtaatgatcttggtactgctcgcggctgcggccatttctgcttttttgggagaagtgattgattccgccgtcattttgtttatcgtgatactcaacgctgtcattggcgtgatccagcagaaaaaagcggaaaaatctctcaatgcgctaaaggaattgtctgcccccgtggcaaaggtaattcgtgacgggaaggaaatcagcgtgccggcaaaagagcttgtgccgggcgatttggtattgatggaggccggcgacgttgtgccggcagatgttcggttggtaatgacggcgaactttaaggtacaggaggcagccttaacgggcgaatctttgccggtggataaggatgcaactgcgattctggaggaaaaagcaccgttgggcgatcgcatcaatatggcgttctcctccagcgtagtgacctacggccgtggttccgggatcgttgtagagacagggatgaataccgaagtaggccggattgcagatatgctgatgagcgagaaaacaaggccgacgccattgcaaatgaagctggcaaagctgggtaaggtgctcgccatggcggccattggcatttgtattgtcatctttggggtaggcctgctgtatggcaagggcatgctggatatgttctttacggcggtttctttggctgtagcggctattccggaagggttgccggccatttctaccattgtgctggccatgagcgtacagcgcatggtaaagcgcaacgccatcatccgtacgctgccctctgtggaggcgctgggaagcgcaacggtcatctgttcggataagacggggaccttgacgcagaataagatgaccgtcacacacttatatgtagagggaaaaacggcgccgatggcagagcgaaatacgctggacgcagagggtgtgcagctgctgaatcgcattgcggcgctttgcaacgatgcgcgctttacgcaaaaggatggtggagctatagccgttggagacccgacagaaattgcgttgatggagggcgcccaagttgtaggcgtagaaaagcaggcggaagaagagaaaacgccgcgtgttgcagaacgtgcatttgattccgatcgaaagctgatgagtacagtgcatgaactggcaccgaatcagtgggtttcctatacaaaaggtgcgccagatgtgctgttgagccgttgcaccatgatatgggaaaacgggcaggctgtgccgatgacggaggataaacggcagcagatattgcaagcaaacgatgagatggcagagcaggctttgcgcgttttggcaatggcatataagcctatcgaggcactccccacccaggaggatgaactggaggccctagagcaggagttggtcttcgtgggtatgacgggcatgatagacccgccgcgcgaggaagcgaaaaaagcagtagaaacctgtcgtcaagcagggatccaggcggttatgatcacaggagaccacaagacgacagctgtggccattgcaaagagcctgggcattttgacagagggcaaagaagctctgacagggcaagagctggatcagctcagcgacgaagaactggaacagcgggtggaaaacattgcggtatacgcccgtatttcgccggaacataaggtgcgcatcgtaaaagcttggcaatctaagggacacattgccgccatgacaggggatggcgtcaatgatgcgccggcgttgaaaaatgcggatattggctgtgccatgggcatcgtaggcaccgaggtagccaaagaggcggcagacattattttgacggacgataactttgcaacggtggtatccgctgtggaggaaggccgccggatctatgataatattttcaaaagcattgcattcttgctttccagcaacatcggagaaatccttacactgttcattgcaacaatgcttggctgggaggaaccgctgctgccggtgcatctgttatgggtcaatctagtgacagacagcctaccggccttggggctaggggtagacccggcggaaaaggatatcatgcagccgcgtaaaaacatgaaggataagttatttagcggcggaatgatttatcgtatctgctaccaggggattatgatcgggttgctatcgttgacagcgttctgcatcggtatggaatcgggcagcatcgatgtagcgcgcaccatggcgtttgcagtgctggcgctgagccagctggtgcatgctttcaatgtgcgcagcgtcaagcatagcgtattctccaacgcagtagggctgaacagcaagttcattctggctacgctcgcttctttggcaattatgttgtgcgtactgctgatcccgccgttccacggcctgtttagcacggcaatcttaaacggtacacagtggctgtgggttgctgggttgtcgttcgcgccgctggtgatcgtagagctattcaaactcctgcatatcaacggcagcaaataaaaatataaaaaggctggcattgccagccttttttgtatgatcatttattcgtatagctccaacggtagcaaatcaggatcaaagaaaaaggtaaaacgtcgcccggtataagggtcaatacggatgggttctgttttgacgttatgaagggataaatattgaatacaatcctcaagacatgctacatgaaaggccagatggcggaggcctctagcctcgggataggatgggcgggaagggctatccggtttatagaacagctccaattcgcagccgtctagcctaagatctagctttatatctttgctgtctttccggtggttttctcgtagaatttcaaagcccaaaatatcgacataaaagtgcttagctttttgataatcagagacaatcaaggcgacgtggtgtatggcagaaaacataaatatcactcctgactcataagtaccaaatgagcgatgcgctttgcaacctgctcgggagaaaggtttgtggtatccaagacctgactttttgtctgtgcatataacggtagataggaaagacttcgggcaatgctgtctgcctcccgaagcccagctgaaatatctttttgcagccttttttccagagccttttcctcacaaagaagggcaaaacgatgcaccttagcatgggaaagatccaaaaaagggagaattttttgaaaaattttgtcatcctggagcacccaattgaagactaaataggaaatgttcttattatggagatatgaattcaacagatagatcatatgtttaagagccatttccttgttttcttcatgaggacaaaaagggaatatctgccagcaccaatccccttccagcaatgcactgggctgaagtaggtggcaaacatggcggctgacagtggatttgccaacgcccataggaccgtgaagaattaggaaatttttcattagagagtacctcatatccactttgtttttgtcttgtttttctctattgtgaaacaaaacaaaaacaaatgcaaatgccaaacatcaaaggcgcctttctgatttgtgctacggggcacaaacatatgaccaaacgaaaaaaattgtgcatttataaacgatggttgactttgtttttcattcttcgttatagtgcagtcatcaagtgttttgacacctttataggaggcgtacgacgcaatgaaaaaaattggtatcttgacaggcggaggagactgccctggcctaaacgccgtaatccgtggcgtggtggaacgttgtgccatgcaggatgtaaaggtttttggctatcatgaaggatggcgcggcgtaatagaacaggatggacactggatggacaccgcagaggtggagagcattcagggactgggcggcacgattctcagaaccagccggaccaacgtgatgaagatggaaaacggaccggcgcttgtccggcgtagcatggaaagtcttgggttggaatgtatcgtggccatcggcggagacgataccctaggcgtggccaaccaattggtagaactggggctgccaatgattggtgtacccaagaccatcgacaacgacctaaactgtaccgactatacctttggctttgatacggcggcaaacatggcaatgcgtgcgatggatgacctatgtaccacggcttccagccattcccgtgttatggtggtggagatcatggggcgcaataccggctggattgcagtgcagagcgccattgcggccaatgtgaatgtctgcgtgattcctgaatttccgttgtcgctagaggaaatatgccggcgtgtaaaaaaacgctacgacgaaggaaagcattacagcattgtggcgctggcagaggcaacgaggatcaaggggctggatgaagacctggaacgtttggaaaaggattcatttggcaactacaaatatccggaacgcaacattgggcagcggctggcggaggccattgaagaaaaaacggggctggaaacccggcatatcgtgctggggcatctacagagatccggcgcgcctaccttgtttgacagggtgttggggacacgtctgggtgtgaaggcagcggatcttgctatggcgcatgattatggaaagatggtaggcttggcgggaaccaccgtggtggcagtttcgctcaaagaagcggtcaatatgcgcaaggaagtggatgcagaactgtacgaaatcgccgaaatgtgttgcagataggaaaaataaggggtatcatgaacgtagtcattcccacctagggaatggctacgttgttgttttttggcagatcggaggaggcaagattgagaaacatcaagcatatggtcggtgttctgttgtctgtggtttgcttagtggtgttgtcgggttgcggcgggcaggcagaggagcctgtgcccacggtagcaccggcgccttcggcagcggccggagagaatccgcttaacaatgcgatcatagactatatgaaccagagggattacagcatagcaaaggcgaatgaaatcatggagacctatcagccggaggaagggcaaacggattataccaacctcatcagttcgctattcaccccaaattttcgagcggatgatgagcttgtagatttgctgcaatctatggtacaatcggaaaagacagaaacaggctttcatatgacctctgaaaatgggggcagcggtgatctggtgttggaaaacggcgtatacaaatacgcctttcaggaacagatggccgaaagcgacgatactgttacaacgatttcacattctgctaccctgcttgaagacggcagccaaatggatgttaagacagaaagcatccagcagggcggcgttcctgttttagaaaactggctgcaggttaaaaagcaagacggcttgtatcaagtgcaacaattttataccgatgatggcggcagcacgcatcagctgattcaaatgagattccgacaggaagagctttcctatgcggtatatgaaaacgtagaggaaaagccaaatagcatctttgaatccgacggatttttctccgacggctttgtgaccagtgttacgctcaaagatggcagggtcacggtcatgaacgatgggaaggaattggtattcggcgcataagtttgtccttagccgcaaaaggcggagcaatattttggagaggtgaatcgtttcatgagaagcaaggaaattgcaattgttggggccgggaagatcgggcgtggatatctttcggatctgttttcgcgggcaggctatcatttgatttttatcaatggttcgccagtaaccatcgataagctcaacgagcagggttactatacgctatttaccgcaaaagcggatggattggacaaacgaaggatcgaaggctttgaggcatacagctccaagcgcgattttgacgtctgtgtagagcgcctgcaaaaagtagatctgattgcagtggcattgtacccgggcgcatatccctcagtagcggatctgttggccaaaaccattgccaagagaatggagaccggattggaagaaccgttgaatgttatgtttttcgtgaacatggtatttacggcaaggacattcaaaaaattgctgcgcgaacggctggatgaccagcagtgggcctattgcgaaaagcatgtgggcctgatagaggcgctgacacaccgcggcggctacaacccgacggaggagatgctcgcagaagatccgctgtgcatctctacaggagagggagaggtgctcccggttggcgattgttttgtaggagaaaagccggatatgccgtatatgcagtttgtagatcgcattgaagggcgtatggtgaaaaagatttggtgcggcaatatgaggcactgcaccacggcatgtatcggcaaggcccgcggtgcgaagtatacatttgagtgtgccaacgaccaatacgtaagaaaatgcgcagactatgcgacggtagaagcaaaatttgggattgccaaggagtttgggtttacccaagcagagattgacgagggtgttggcctaaactgggattccatgaaaaatcccaatgtaaaggatgatgtggatcgcgtttgtgcagaccctattcgtaaactagggcatgacgagcgctttattgggcccgccctgctgtgcctaaaatacggcatggttccatactttttgtccagaggcgctgcgtatttgttgatgtatgtcaacgaaaatgatgccagcgcagaagagattcaagcgtatcgcaaagaaaacggagacgaaaagaccattttgaagtattgtggattggatcggagcatcaaggatgaggatgtgctgtttcagatgatcctaggccagatgaaagagctggaggatcatgactggcaggaagcaaaaccttggcaaaaagtagattgagcaaagaaaaagagcaagcgatgcttgctctttttttgtagaaaggcaaatgttgcattcctacaagtggggtgcgatgtacagaggttactgtacgttatcgcggctttgtttgttctgctgtttgacttcagcggaatcgaacgaagaagagctctgggaatgctgagcgctctgcttgttcaactgctgtgtcttttgcatcttgtttttctttgccatgatttatcacctcgacattagtatggaatttttcaaggttcctatgctggcaaatgattacaagaaaaagaggcgcatttagcacctcttttttggaaaaaattacattttttcaggcaaaactttattgagaatgacgccaagaattgcacagatggcaatgttgctgatggtgaaggattctgtaatctgaatgccgcccgatagcccaagcccgctgaccagcataacggcaacgatcattagattgcggctgtgggtaaaatcgagttgcgcttctaccagcgttcgcatgccgacagcggaaatcataccaaacagaatgatggatacgcctcccatgactggaccgggaatggaggaaaggaacgtttggaatacgcccaaaaagctcatgagcatcgcaaaaacagcagcaatccgtaaagtcgtgggattgtagtttttggttacagccaatacgcccgtattttcgctgtaggtggtgttggccgggccgcctaagcatcccgctgccatggtggccagcccgtcgccaagcagtgtacggtgaagaccgggatctttcataaagtttttgccaacgacagcgccattggtggtgatatcgccgatatgctccataaatgtgacgagcgttgtaggcgcgatgattagaatggcgctcaaatcaaattttggcaggaaaaagttgggcgcactgatgcccagactaccggtagagaacactgagaaatccacctgccccatgatggcagcaacgagatagccc

SEQ ID NO: 4051 - DNA, 13295 bp, Unknown
  16S sequences of unknown bacteria
tttggctgccatggctgttagaagactctcgccagcggcaaagcttcatgacatgcctgaatgccgaaagccgttcatggcttcgtctcatcgacgcggagattgcaatggaacgagacaaccagcgccagtgcgaggccatccttgatcgatttggcacggcagaagagaagtctgcagagctgcgctttctcatctgctcactgtccatccgctatcatttcagtcaaggctgccgcaaggaactgatcgtgtttcctgaagatctgaaacgagagatcatcctgcgggatgaccagctcactacgatgatgcatactttcttgctggaacgtgcgatctggcgcaatgatcagatccagctggctgatacttacatcaaagatggtctgagcaatcatccctatgccagactttgccaggtgacgatgctgtatcggctggatcgctgcgagaaagcattgctgcagcttggcagcatcatgaaagaatatgcttatcatgactatatcgtctcacagctcagatacctctgtgcattgtgcctgtacgcaatgcgtcaggagacacgggcattgaagcttttggctgcatcgctggctttcaatggcccataccgcttttgcacttccttttgtttctttgaaaccaggaccagggaactgatggagatctatatccgttttctgaacaaagatatcggcggacataagaaaaagtatcgcaaagcaaccgatcttattcatgatgaaactgcggaatatcgcgattacatccagatgattgccgaccgcgccagagcctatgatgagctggaggtcaaggagcctggtctgttgacaccaaaagagatccggatcctgggtcatatcgaagcgggtctgaccaatctgcagatcgcgcatcagctgaacatcgggatgcctaccgtcaaatcacacatcagcagcatctttgccaagcttggcgtacgcaatcgtgcctcagccatcagcgaagccaggaagatcggatatctgagatagagataaattcttatgaagaaaaagcaaactagacttgaccagcgctctgttcgtttttatcatataagatatgggaataaatacagaacagacaaagacaactcagatcccggaagtgacaagacgccgcatcgtcgatatccacacgtatcttccggtgctcatcgatatcatcaaaagcggcaaggatgtcagtgtcacggtcaccggcagctccatggccccttttctcgcgcatctgcgtgattccatcatcgtatcgccgccgccccggcagtttcaccgcggcgatatggtcttctttcagcgccaggacagcagctatgtcatgcatcgcatccatcatctcaaggaaggaaagctgtatctggtcggtgataaccagaccgagatcgaagggccgatcgatccagaacaagtattcgggatcgtgcgcaaggtcatccgcaatggcaagctcttgcaaaaaggcgatttctggtgggatttttttgaaaaagcatggatccgcatcgttccattgcggtcggcagctgtaaaagcggtgtcgatcgtgtataagcttcgcaaccggcaaaagcgttgaatataaaaaaacagacctgaagatctgcttcgtttgatgaagagatctcaggtctgcttttgcttatttggtgatctggaaggaacgagtgatcggagctgccagatagtcgccgcccagggtgactacggtgactacataacgtcccggttcagtcggcgctgtcgtcgtgctggaatacagcttccatttgctggtgaagccggtatagagataatgcacattgctctggtcgatatcgctgttgccatttgaggtcagcgttacgccaaagtcaaagctctttgcttcctctgcggtcagcttgccatttgggatctcctgattccagttcagctttacgccctctgctctcatcttgaccagcagcgcgccgatgcctacgcctgtctcatagttcgggctgtccgtgatggcagcgacggtatagagaccggcatggttcggtgtgccgaatgaaatgcgtactgaatcaatgatggaaggcagcttgttgatgatctcgaggatctgtccgatgctgccggtgtcgatattcagcttatctaacagatccaggagctcctgggtgctgaagatctcacgcagctgacctacagtaacgccttcgttcagcagttcagtgaagctctgtcccacgattgctttcacgatcggatcgatcactttcaataagtcattatctgtgaacttatccggcagatccagataaaggctcgtcgtcacgttgctcgtgatgccggcatataccgtgtagatatcgaatttatcctgcggatccgtggtgatgaaatctgccggcagggcctcgtcggcatagatgttcgtggaatgaacagagaccttgaccttggccttattgacgcttactgtcgtttctgctgtttcgcttggccgatattcactgttgccattgaaggtgatgcggatctgctgctctccggcacccatctgcggataagaaagcggcgtgatcgttccgccttcgatcggcgcccatgccttgcctaattctcccagcgaaccagtagaagcagtggcatagtaagtgaaggtgaaatcatctgcggacagggtttcctttgccggcagcgtagaattttcccagtcgatcacattgtccaggatcgcctgcctcatgactgcaggatcgacattgtaagtgaaggaagcaccttcattgaccgcgatggaagaagcgatacgatcatcagtcatttctgcttcaatgatcgtgctccatccgctgtactctctgttgccatcccaactcagcttgatctcctgtttgcccacttcgaaacgctttgtcagcgcatctgtattgttcagatccttgaagttatcgaagagatcactgccagtgaagttggcgttgtactgcacatgaagttcatcccggatgtccggctgcgcggaagcgatcactgcatcgatgatggcctgttcggttgccttgtaatcgatgttcttctcatccgcataaaccatgccgatcgtatacggcgcttcattcagcgtgatttccggttgcggacgatcctgaatgactacctctgcctctatctgactcgctgaatattcacgatctccgttaaaggagatgcggatctgctgcgtgccggcagagatggccggatagtttaccgttacccccaaaatgctctcgcttccgcctttcaacggcatccatgcttttgttgctcctgttaaagaatcagatgcatagtattcgatcgtgacatcagaaacgctcagctgcggggtgctgctcttgatcactgcgcgatagatgacatcttccaatgtttcaaaatcaagagacatgtcttcattgtagatcaatcgagcttcgtacggagcctcattgagaacaaattcagcctgtggacgatccttgatggtcaatgttgcttcaacacttgtttcaaagtaagcgtcattgccggcataagtgatcttgatctgctgcgtgccggcagagatggccggataagttaatacgttttttccgccttccagcggcatccatgcttttgttgctcctgttaaagaatcagatgcatagtattcgatcgtaacatcagaaacgctcagctgcggcgatgtttccttgaccatgctctggaagatcgcttcacgaagcgcgtcatagtcgacgctcatgtcctcgttgtagatcaggtttactgggctgatctcctcattcaggatgatggaactgcttcctttcgcgcttttggataacgtgaccgctgcatcagatccggcgaggcgtacttgatagctgccatcgctgttgtcagccaatgcgggatgcgtatacgtcgtcgttacaaatacgactttcttttcgctggtgaacccgttgatcgatccccaggcatcgttgctgagaagtccattttttcctgtacaatagtactcccactccaggctttgcgggtcaacttcctctttgttgaccaccagtgcgtcaaataagatctgcttgaccgttgcttcgtcgctttcggatggaatgatcgctgttccattctgcagctgtacatcgacagctgcagtttccgttgccggttcagcagcgaaaacggtcgtcggaatgctgcttgtaaacagcatggtcgctgccagcacggcggctgtcagcctgcgaaaaaatgttttcatgtgaaaacctggcagatcgcacattctgccatgcccctttctttttcaatgaaatggatgtgtaagacccatgtcttgctgtgcgccgcaaaacgaattcattataatatgtcaaacgcttctagggaagaggggaaaaagcagtttgttacagagtgttgacagttcatgccgtatgcatgaaaatttctgaatgggacatactgcagatgaactcgttcttggaaaaaacaagatgaacgtggtacagtataactacatatgagaagctggagatgatgcaccttgaaaagagtgataaaaatgatatcgatcatccttctgctgctgctcttgctttgtgtgatcagcatctggtgttcttaccatgtgctcagtcttacgacttttactttgagcagtgaaaaagtaaatacgccgatgcgggccgtcctgatctctgatcagcatgatcatatctttcgtgatgataatgaggaattgatcgagcgcatcctcgaactggaaccagatgtggtgttcatggatggagatatgctgaatgcggacagcgatgacatcagctggctgctttctgagatcgagcggttgtctgccaaagttccggtctactatgcgctgggcaatcatgaactggcttatatggccgcacatccggatctgatcacacagctggaagaagccggcgcgatcgtgctggatgaacaatatgtggatgtcgagatcgcggggaatgcggtgcgcatcggcggattctatgattatgcgttttcccggaccgacgccaagacgacagcggatacgatggatgcacaggatcatgcgtttctcagtgatttctgcgacacatcgaggctgaagatcatgctgtcgcatcggccggacagctttgtcttttccgatgcctctgcaatttggcagatcgactatgtcttatgcggacacaatcatggcggacaagtgcggctgccttttcttggcggtgtatttgggggagaccagggttattttccaccctatgaggatggcttgcactcctttgctgccatggacatgatcattacgagaggattgagctctaatccaaagatcttgccgcgatttaacaatctgcctgagatcgtcgtgctcgactttgtctcttgagacgaaaatgtgaggaaagcttgatattcgttccgcaatggtgtaaacttatattgtcatgctttcaaaaggtggctgcggataagcgcgaacggagagttatcgaagcggtcataacgagctgcactcgaaatgcagtagtcctcacgggcacgtgggttcgaatcccacactctccgccagaaaacacaatgctcacaggctgcttcgtctgtgagttttttctttagcaagggggaaatcaaatggaacagaaacaggcggcaatatttaatgatctgagcggattcgggcgctgttccatcagtgtcatcttgccgatcctttccgccatggggcatcagggcgtagcgatcccgacagccgtgctttccatgcacacggaatttccgcactatcatatgatcgacctcagtgatcagctgccggcttatttggaaagctatcgcaaagaaggactgcgttttgacgcgctgtgcaccgggtttctcagcaacccgacgcaagcacagattgcccgctcatgtctgcagctgctcaaggaagatgctcttgtcctcatcgatccggtgctgggagacggcggccgtccttatccgaccatcaccaaagagatcatcacacagatgcgttcattggccagcgaggcaggcgtgctgctgcctaatttgacggaactttgcttgttgtgcggcagaccttatccggacgcttttccctcacgcgattttctgctttcctgctgcgaggaactatgtgctgccggaaccagaaacgtggtcgtgagcggccttgaattggacgggcgctgctgcagcttcatctacgcggagggaaaagcagatgaggtgtggaacgaaaaagtcggtgaaggccgtcctggcagcggtgatgtctttgccgcggtgatcgccggaagcctgctgcgccatgaaacgctgcaccagagcgtggagcgagccgctcgctttgtggaagcagccatgcgggagaccctgcaggaacaagccccgcatgcctggggcctgtgctttgaagggctgctcagcgagctcatgcctacagccagataatttactatgattttacatcatgctgatggaagaatggcgcgaggtatgctattctgaacgaaaggggagactgtactatgatttacgctgtcattgatctgggatcgaatacgatccgcatgaatgtctatcgcctgcgaaacggtaagtttcgcctgctgttttctaaaaaggccacggccggaatcgtttcttatgtgaaagacggccggctgaaccgtgaggggatctgtgagatctgcagcacgctggaatcattcaagaaagtgctcgaacatttgcagatcgagcaatgttccgtgtttgcgaccgcatcgctgcgcaatatcgacaatacggaagaagtcatcacgcaggtcaaaaagaagaccggaatgaagatctgtctgatcagcggagaagaggaaggacggctcagctttcgcggtgctgcgatccagctttccgcggaagacgggcttttcatcgatatcggcggcggcagcacagagctggtgagatttgcggagggaaaagcacagagctcgtgttcgctgccgatcggttcgctgaacttgtataaccgcttcgtgcatgacatcatccccacggcccaggagcgcaaagaaatcagtttgtatgtggaaggagccttgctgagcagcgaggtcaagcctgaaggaaagctgctggcggcagccggaggaacggcgcgcgccgtggaaaagctgcttctgcgcagcggcgcgctggagcggaaaggagaggcgatcagcctttcccagctcgaacagcttcagcagcagctgctgtcaggcagcgatgccgcccacatgatcctgcggtgcaagcctgaccgcatccataccctgatcccgggctttctcatcctgaaaggggtcatgcagcatttcggctgtgagcagctgaaggtctgccgcaacggcatccgggaaggctatctgatggagatcacaggcgtaatgcctcagtgagagaaggaggaagaaccatggcacacagctacgaatatacgcagaaccgcgagctgtcctggctgaaattcaacgaacgcgtgctggaggaagcggctgaccgcgatgtgccgctgctggagcggctgaagttcatctcgatctttaccagcaacctcgatgagttttacatggtccgctgcggcagcctgtatgacttgtctatcctggatgaagagcatattgacaataaatccgggatgaacgcgcagcagcagctgcaagccatctatcgggagacgaagaagctgtatctgctccgcgattccatctataagaatgtgcgcaatgagctcaagccgctgatccaccgggtgcgcttttcccatctttcccgagaggaagaaaagcgggtgcgcgcttatttcctgaaccgggtgctgccgatcctttcgccgcagatcatcgatatccatcatcctttcccgcatatggccaacaagaagctgtatgtgatgatccggctgtccgcgaagaagaaggagctctacgggctcgttccgatcccggatacgctgccgcgcacctttacggtgtccaagggagactccctgcggctcatcctgctggaggatatcgtcgccgcctatgttaaagagctgttcactggctatgaggtgcagatgaccatggtcgtttcggtcacgcgcaacgcggacatcaacctggatgccggcgtgaatgatgaggatgaggattaccgccagcagatgaagaagatcctgaaaaagcgccgccgtctcgcgccgatccgcctggaggtgtatcgggaggcggaccgcaagttcgtcgcttatctgtgtgagcatctgcagctgaaggaggaacaggtcttcgtttcccgcacgccgctggatctgtcttatgtctttgcgctgtccaagcataaggaccgcctggctgctctgctgtatccgccgtttcagccgcagccatcccgtgatctctccatggagcggcccatcatggatcagctgctgaaacaggatgcgctgctgttctatccgtatgaatcgatcgatccgttcctgcgcctgctcaaggaagcggcccgtgatccggatgtgacatcgatccgcatcacggtgtaccggctggctcgcaactccaagatcatccgccatctggtggaggccgccgacaatggcaaagatgtgaccgtgctcatggagctgcgcgcgcgttttgacgaacagaacaatatcgagtatgccgaactgctggagaacagcggatgcaatgtgctgtatggcatcgagaattacaaggtgcactccaagctctgcctgatcactcgctccgtggggaatgaggtccagtattttacgcagatcggcaccggaaactacaatgagaagacgagcgcgcagtatacggattacagctatatgaccgcgcggaagagcatcgggcaggatgcggtcaatttcttccagaacatggccatcggcaatcggcaggggaattaccgcgaattgctcgtctctccgtattcgctcaaggcgcgcatccttgagctgatcgacgcggagatcgaccgcgcagcggagaatgtgccggcccggatcttcatgaagatgaattccatgaccgaccgggacatcatcgaccggctgcagaaggccagcgcggccggcgtgcaggtccgcctgatcatccgcgggatctgctgcctgcttccaggcgtgccgggacaaacggagcacatcgaagtgcacagcatcgtcggccgctatctggaacatgcccgtgtctattgcttcggctatgatccgcactgccgcttatacatcgccagcgcagacatgatgacccgcaacacggaaaagcgggtggaggtcggctgtccgatctatgacccgaagcagaaggcgcgcatcttgcatgacatggagctgatgtggcgcgataacgtcaaggcgagaaatatggacagatccggatgttatgaaatcatcgacaatggcctgccgccgctggatgcgcaggtcgagctgatgaaagaggcagaggcgcatgcgcaggagctgaaggaaacaccgaagcaggaccgccacacgtggctgatgcagtttcgccaccgccgccacggccgcaaataagcgcgatatgcagaataaaaaacatgcgatacgccgaaagcgtatcgcatgttttatttctcttgctgctttagcagctttctgagcagcggtgtggccgctgcggcgatcaggatgcctgccgcagcctggaagatattgcccacgatgccgcccagtccgacgatccaggaggcgttgagcagggaatcggtgacataatatccgccgatcatgatcaatgcgccgatgatataggccgggaaacgcagccgtgcatttcggcggacgagcagggcgatgaggccgccctctatgcccttgatgatcagggtggcgatggcatacgtgccgtatccgccggtcagatcagccagcgcgctgcccaatccgccgaccaagaaggccgtgaacggatgcaggaaaccagcaaacaacaagatgaagccatctcccaggttcaggtatccgccgatcgagttaggcagcttgatgaacatggtcgtgatatacaccaatgcgatgcccagcgccgcaagcaccatttctcttgttccataatttttcatatgcactcctcgctttcatatgtgcattatagcggatgactgtatcgaataaaatgcacagaaacagaataaaaaaaggggacagttgtgctatactgggagaggtgagacaatgaagaaatatgagatcatctgtgcgcgcatccgcagcgagatcctggatgggacgcgccgccagggagaaaagctgcccagcatccgcgcatgcgtggagcagttccacttatccaagacgaccgtcgagcatgcctttgcccagctgcagctggaaggatacatcacggcgcgcgcccagaaagggtattatgtcgcgatgagcgagcaaaaccgccgcctgcatgaggagctgctgcgcttttccgcgcatccccggcctgcgcttcgctacgatctgcgctctcagtccgtgcttccggaagagagcgagctggtcatctggcggcagtatctgaagaaggcgatgaatgacgcagatatcggctcctatggcgatgcccagggggaaagcgtgctgcgcgcgtctttggcccgctatgccagcgaacgcggcatatgggcatcccgggaacaaatcgtgatcggcgcaagcgtgcaatcgctgctctatcagctgtgcgggctgctggagcatgggcaaagcgccgcgttgcagcagggcgcctaccggcaggcacagcgcgtatttgaggattacggcatgaaggtgcggcccatcagcgcgcctttgtccagccgttcgttgccggatgcagatgtgatctacctgtatcctcctgcgcttctggatgcccgctcattttcccgcgcgcatcaggaagcactgatgcgcgagatccaggcacgcggcgtcctgctgatcgaggatgatcacaacggggagctgtcctatctgcgccctggcgccaccgcgatgggcagcttcagcgaggagctgtccagcgtctatctgggctcgttttcccgcatcctgctgccggcgctgcgcatcagctacatgatccttccccgcgcgctggccgcgcgttaccgcgcgagggatgactatgggcccggcgcatccaagctggaacagatcgcctttgcttcttatatcgcggacggtcatctgcaccgccggatcacgcggctcaagcgccggtaccgccgccggcatgacacgctcatgcgatttgcacaagaggcggggtgggagctgacgcgcctggaagaatcgacgatccgctatcattttcagctgccctatgtctgcacgctaaatactggcgatctgatgcaggagggcatagccgtcgacgcgctgcagggcgcatcgctcacgctgtcattttcagcgacggcagatctggaagaagcgcttcaccatctcagtgagacgctgcaggaaaggagggcgtgaaatgagacaaaagaaagcatgcatgtgctggagcatggcagctctggcgatcatggcgctgatcttctttttctcctcagatacagccagcgcttcggatgccaagagcggcgtattcgtcgatctgcttttgccctttgcggcatggctcgacgcagatatgctcagctttctcatccgcaagggcgcgcatttttccatctatgcgctgctgggcatctgtgtgtacatggcgctgtttcatgcggggaaggcaaaggcggcagccgcctggatcatctgcgcgctgtatgcgtgcagcgatgagctgcatcagatgatggtcatgggcaggagcgcgcagctcagcgatgtcgcgctggacagcctcggcgcattgtgcggcatcctgttctgcctgtggatcatcgcctggaagagaaagcgggatcgaagagcatgagaaaaggccggctaaggggggagccggccttttctctattattaaggggatagaaaattgtatgaatatcattaggggaatgaatttcatacacgcaaggaatacttccttgcacgcttatagtatatgaaatctctatagcgaaacaatgtttaaaataagggaaaatatgtgaaagagcgaacgctttgtaaacggatacaaaaaagaacacccgaaggtgttctcgatcgatcaggcattgctctgtacggcgtggtcgatcagcgcataatcctgcgcgatgttcaaggcgtgcccgctgatgcgctcgaaatcggtgagcagctgggagaacatcatgctgatctcgctggagatgttcttttccttcatgcgctgcatctgacggcggcgcaggttcacgctgacttcctcgctttgcttgcgcagcgtttcctgattgttcaggtcacgcagggcagccagcatctcttcgcacatgctgcgcatcgactggatcgtgctcttctcttcgtcgttgagacggccctgcagatgctcgcgtccataatattccatcttgaccgcatagtcgctgatgcgttcgatatccatgatctggtgataataggcgcctaaggcaacgctggtctcattgctgatctccatgctcatcgccttggtgatataatctgcgatctctttgttgagcgtgtctacggtctcttcgcgcttgatgatctcttcgccgatcttgcggtcatatttcagcagctgttcaaagccctgctccacattgcgctgcgccagctcgatcatatgcgcgatctcctcgtccacctgctgcagtgaaatagcagattttccgatggccttggtgtaagaggggagcggcttgaggaactgcagaacttctgatttcggctcatccttcagcggcagcaccttctgcgcgaaggcagccaggtaggtgccaaacggcagcagcagcagcgtggtgacgacgttgaacagcgtatgcatgttggcgatctgcgctgccggattgcctggtgtccatgaagagaccagatcggtcagggaaagcgatgtgttggcggtcaggatgcagacggtcgtgaagatcgccgtaccgatcaggttgaatgtcaggtggatgatcgtcgtctgcttggcctcacgcccggtgccgatgctggcgagcacggcggtgatgcaagtgccgatgttctggccgaacagcacatagaccgcgccgtcaagcccgatcagcccgctggtcgccagggcctgcaggatgccgaccgacgcg

SEQ ID NO: 4052 - DNA, 13802 bp, Unknown
  16S sequences of unknown bacteria
gttatcggcgtcgtcgccgtacagataatgcgcggcgacgacgccgataacgggcgcgatcacctcgaaatatccccacgcgaacagcccgacgaaagcaagagcgccgatcagcgcgcccaaaaccgcgccgagaaatcctcttccgtaacggtcgggagaacttttttcttctttttccgcttcctttacgagttgcaaattcgcgttaaaacacgcttcgtgcacgtaaaaacaatgaccgccgtcggaaacgagcgttttttccgtcatctttgcgccgcagtacgggcacgtatctccgcccgccacgtttttggatttcaggaaatccgccaccgtcttgaatatcttttcgatctgttcgtaaaccgaaaaatacagcgcgggaaacaaaatgacgccgacgcccagaacgtcgaaacccgtcagtttcaaatcgtcctttttctttttgagaaaggatctgatctgctccgccgccgcggcggtgtgcgcggaaatacaaagcacgtactgcggattggcgaatcggttgatatacagccccgtctggtatccgaaaagttgtccgtaacagccgtttttgcgcagggtaagggcgtttttttcggcaaacgcccgcaatttttcgttcatcttacagttcccgcaactgcgcttcgatcttggctttcatctcgatgaatttttccagtttcgcgcgctccgcctccacgagatttttcggcgccttgtccataaatccgcggttatgcagtttgccgtccgcgcggccgatctcgccgacgacgcgttcgagttcgccctgcaatctggcgcgttccttttcgaggtccaccatatctccgagcgcgatatacacggtgcacagttccgtcacctgcgaaaccgtcttttcgccgatgcacgcgccgttgtcgcagaacacgatctcgctcgcgcccgcaagtttcaatatactcgtcgtgttggcgttaacgtaggctttgttggaagtcgaaacgaacaattttacctttttcgccgcgggacagcccacggacgccttcatgttccgcacgacgcggatgacttccatcacccgctcgaaagccttcgcctcctttttataagcgagtttggaattgtaacggggaaattccgaaaccatgatactgcccgaaacgttgggcaggttttggtaaatttcctcggtgatatacgggatatagggatgcaacagtttgagcgcgttttccagaacgaaacacaatacgccgagcgttgcgctctttttcgcctcgtcgtcgccgtagagggcgctcttgcaaagttcgatataccagtcgcagaaatcgctccacataaagtcgtataagatgccggcggcaatgcccagttcgaatttctgcaagttgagcgtcacttctttgacgcacgattccaaccgcgaaacgatccatttgtcggcggcggaaagtttcacgtcttgaatatcgggaatagttctgccctccgcgttcatgatgacgaaacgcgaagcgttccatatcttgttcatgaaattgcggctcgcctcgactttggaacggctgtaacgggtatcgttgccgggcgacacgccgttgatgagcgaaaagcgcagcgagtcggcgccgtattcgtcgatgaccagcagcgggtcgatgccgttgccgagcgatttggacatcttgcgcccctgttcgtcgcgcacgatgccgtgcatcagaacgtcgcggaacggcacttttttcatgtgttccagacccgagaaaatcattctcgccacccagaaaaagatgatgtcgtagccgcaggacagcacgtccgtcggataaaaatatttgaggtcttcactcttgtcgggatagcccagcgtggaaaaaggccacagcgccgaggagaaccaggtgtcaagaacgtcctcgtcctgttttaaatcatgccctttacagtgcgggcagcagtcgggatcggtcttggaaacgacggtctcgccgcagtcttggcagtaccatacgggaatgcggtggccccaccacaattgacgggaaatgcaccagtccttgatgccctccatccagttattataaactttcgtgaaccgttcgggcgtgaatttgatcttgttgcgcgccacggcgtcgagagcgggctttgcgagcggctccattttcacgaaccactgtttggaaacgatgggttccaccgtgctcttgcagcggtagcagtgcccgacgttatgcgcgtgcggctcgatctttaccagagcgccgcacgctttgagatcttccacgatcttttcacgcgcgataaagcggtcgagtccctcgtatttgcccgcggcggcgttcatagtgccgtcgtcgttcatcacgcggatcacttccagatcgtggcgcagccccacttcgaagtcgttcggatcgtgcgcgggcgtgatcttcaccgcgccgctgccgaattccatatccacgtaatcgtccgcaacgacggggatctctcttcccacgaggggaagaacgagcgtcttgcccactaaatcttcataccgcttgtccgcgggattgacggccaccgccgtatcgcccagcatggtttcgggacgcgtggtcgccacagtgatggacctgttttcgcccttcacgggatatttgagatgccagaaaaaggactcgtcctcggtgtattcgacttccgcgtcggaaagcgccgtcttgcagcccgggcaccagttgatgatgcggtcgccgcggtagatgagccccttttcatagaggttcacgaacacttcgcgcacggcgcgcgagcagttgtcgtccatggtaaaagcgagacgcgaccagtcgcaggaaacgcccatttttttgagttgttcgacaatgcggccgccgtactgttctttccagccccaggcgcgctctaaaaatccctcgcggcccacgtcgtttttcgtcagcccctcttttttcatctgctccacgatcttcacttccgtggcgatggacgcgtggtcgcagccgggaagatacagcgccgaatagccctgcatgcgcttgaagcggatcagaatgtcgatgatcgtgttgtcgagcgcgtgccccagatgcagttgccccgtaatgttgggaggcgggatcacgatggtaaaagggatcttcgaagggtccgcctccgccctgaaatagttgtttttctcccactcttcgtacaaccgcgcctcgaaatctttggggttgtaagtcttttgcatttccatatcgaaccgtccctttactttatttgctccgttctttgaccaacgaacggcgtaatcgcccagtttgttctattatagtaaatcgctcgcataaagtcaaacgtttactttttccccttttaaattttttgcgtcggctgtcaaaattgcacacgcgcgcataccatgtaatattgaaagtttttgacttgaaaccaattttaaggagaactacgattgaaaaaactacttacggcaattttatgttttatgatggtcattcttcccctctcggcgtgtgcgaataacgacgacggactgaaaaaggtgcgcgtgaacgaagtgacgcattcgattttttatgcgcccatgtacgcggcggactcgctcggttattttaaagaggaaggcatcaaaatcgaactcaccaacggcggcggcgcggacgcggtcatgtccgcggtcctttcgggcagcgcggacatcggattctgcggtcccgaggcggcgctttacgtgctcatcggcggcagcaacaacgtgcccaccgttttcggccaactcaccaagcgcgacggttcgttcctcgtttcccgcaaagacgagaaggcgaccttcaaatggtctgatctcgaaggcaaagaaattctggcaggcagaaagggcggcgttcccgccatgacgttcgaatacgtgctcaacgccaacgaactttacgacggtcagaacgtgaaaatgaattacgacgtcgccttcaacctgatgacgagcgctttcgaggcgggcacggcggattactgcaccatgttcgaacccgtcgccagcgaatacgaaaaggcgggcaagggctacgtggtcgcctccgtgggagaagcctcgggcgaagtcccctacacctgctatatcgcgaaagagagttatatcgaaaagaacaccgacacggtgaaaggattcctccgcgcgatcatgaaaggcatcaaatatatcaacgagaccgcaagcaacgaggctgcgaaatatctgaccgcctatttcgacggcacggacgaggcggctatcgcgacctccctggacagttacaaaaagatcgattcctggcagaaagacatgacgatgacgacagacagttttgaccgtttgcaggatatcatcgaaaacgcgggagaactttcaaaacgcgcggaattttccgaactcgtgaacaccgaatattccacggcaatatacaaagaagtttacggactctgacgactatcttatacgcccgcaaaaaaagagactttgcatatttcgcgcgggcggcaccatgccgcccgcgcccattttacagaggttattatgaacgaaaatacaaaagcaattttggagtttcagggtgtcaccatgaactaccatactccgcagggagaaacgctggccgcgcaagatctctcgttttccatttatccgggcgagtttatcgccgtcatcggtccctcgggctgcggcaagaccaccgttttgtcgctggcggccaatttattgaagccttcgggaggcgagatctacattcacggcaaaaaggcggacggccgctataacaatttcggctatatgctgcaaaaagacgagttgttcccctggcgcaccatcgaaaagaacatcacgctccctttggagatccgaaaggccgacacggcggaaaaccgcgaacgcgccctctcgctcgccgtcaagtacgggctgggcgattttttgaaacactatcccgatcagttatcgggcggcatgcgccagcgcgcggcgctcatccgcacgctcgcctcggcgcccgaactgctccttctcgacgagccgttttcggcgctcgactaccagacccgcctgtccgtctgcaacgacgtgtattccatcatcaaaggcgaaaaaaagacggctatcctcgtcacgcacgacatcagcgaggcgatctcgctcgccgaccgcatcatcgttttaagcaagcggcccgccacggtgctcttcgtgcacgacatcgattttaaggggatcgcgcccttaaagcggcgcgaatccccgcagttttccgtctggttcgaaaaactttggaaggagttgaacgtatgaaaaacgaaacttattcccgcgaacatctgctctatctcagaggccgccgccgctcccgcatcgccgtctggtgcgcgcgcgtcgggcttttggtcatctttctctcggtatgggaactcatcgcggcttttcaactcgtcgatcccttcatcatcagttcgccgtcgcgcatctggaaagccatcgtcgatctgtaccggaacggcacgcttttctatcacatcggcacgacgctctgggaaacgcttctgggctttgccgtggcggttgtggcgggcacgatcatcgccctgcttctatggtggagcgacaccgtgcgcaaggttttagagccgtacatcgtggttctgaactctctgccgaagatcgcgctcgggcccgtcatcatcgtgtggttcggcacgggtgcgaaagccatcgtattcatgaccattctcgtcggcatcatcgtcgtcattctgaatatgctggcgggatttctggcgaccgacaaaaacaagatgcttcttttgcgctcgatgggcgctaccaaatttcagatattgcggaaactcgtcattccctccgcgctgcccgcgttcatcagcatgctgaaaatcagcgtcggcatggcgtggatcggctcgatcatgggcgaatatatcgtttccaaagcggggctcggatacctcatcgtgtacggcggccaggtcttcaaactagacctcgtgatggcggcgacgttcattctgtgcatactcgccgcggccatgtactttatggtcgtactgctggaaaagatcgtcatcaagcgcacgtattgatctcgtttacaacgcgttttttgaaacgcgaagatatagatgcgggcacgcaaggtcttaccttgcgtgcccgttccttttcgccctgcgcggtgatgcgaggcgctcgcggtctttgaaaagccgcactgccagaaagacgccgaataccagcccgaacgcgcccagcgcgggataaatggtttctataatgcctttgagccctacgcgcgcgagcaggatcgcgcccaggcacagaaatacgcgcagcaactctcttttcttctgatgctccgtggcggcgtgcagcggataataggaagaaaacagcgtcgtgacgatgccgcacaggctcacgagggaaaacacctttccgagcaccgctccgcgcttacccacgacgtataaaagaggcatatccgcgcccagcgcgttggcgccctcgcgacagatgacgccgagaataagcgcggcgcaaaaggcgatgcaaaaggacgccgtcaaagatacggggagcggcggcgcgctctttcccagatcgcacacgacgggcgcggcgagaaaggcgttcatgcccacatacagcagcgtgtacagcaagccgcgcgaattgtccgccatggtaaagtcgtattctccccccttctcggtaaaggcgaaggcgacgacaaagacgaggatcacgggcacgagcacgaaattcaccttgccgatgccgccgatgcccttgcggcagatgaaaaacacggcggcaagcacggcggcggagaggacgggcacgctcttcgggatgccgaacgcttcgaaaaacacgctgtctatccccgcgagcatggtcgcgcatatgacgaaacaacacaaaccgaacaccgcgtgcacggcgggcgcgaatttttgaaagagcgcggatagcacgccgtcgaatccgccgtactttttcccgcaggcgagcaagagggcgaagtaagcgaaaaaaagcacgcctgcggcgtaaacatagggcagatagttggacgtaggaaaaaatcggacaagttcgccgcccgaaataaaccccgcgcctaccaccgagccgatgatgataaaggcggcttgcagccagccgaaaatatacgacgatctttttcccatacaataatgtatgccgcacgtcgccgaactttgcgcctttttgtccggaattgttgacaaatcgggcgcggtgatttaaaataaagaaaagccgcttaaaagcgcggcaattcaggaggtaaaaaaattgtttaagaaaaccgaaaaattcttcgatatcatcggcgagatcctcgccgtcgtgatggttctcgtctacgcgctgctcatcctcaacgcgaatttcgagttcatacccgagggaacgtttatgaacgttttagagatcatgcgtacatacggctcgctccttttggtgggcgtggtcgggctggaagccatgtccaagcgcaatttcattttccagatcatctttctcgcgctccttgcgctcatcgtcattttcctgttcttccccggcacctacgaaaacctgatcggcatcgtgaaaaagtaaatcaaaaaaagaccgttctttcggaacggtctttttttaatccagtttcacgtcggcaagttctttcggcggcacggcctctgcggaaccttccaccattttacgcacgagcgcggtcgccttgcctatgggaatattggtgcccgcgcccgcgacgcagccgccgggacagcccattccctcgatcaggcagccgttctttttgcccattttggcaaggagcagcatcttcctgcattcttccagcccctcgcagtgctctattttgacttcggtttcgggataatattcgcggatacacttgtcgatggcgttggcaacgccgcccgccaccgcgtagccgcgccccgcgcccgtcgcgtcgttgagtttttcatcctcgtcgaaatgctcgaaatcgatgcctttcgcctcgaaaatggcggaaagttcctcgaacgtgatgacgaaatccacgtcgctgcgcaccgtgcggcgggaagcctccaactttttcgccgcgcaaggtcccacgaataccacgcgcgccgcggggtgttttttcttgatggtgcgcgccgtcgccaccatgggcgtcagggcattggaaattttgtccaccgtttcggggaaataacgctttgccagcatcgcccaggacggacagcacgaggtgagcataaagggctgctttccgctcgccacttcctccacgtaatggtgcgcctcggtgaccgcgcccatatccgcgccgagtgccacttcgaatacgtcccggaacccgagtttcaaaagcgcggctttgatccgcccgggcgtcgccttttctccgaactgtcccacgtatgcaggcgcgatctccaccatgatctcgtcgccacgtttcaaagcgcgtatcaactgaaagatctgcgatttatccgcgatcgcgccaaagggacaactgaccatgcacatgccgcaggatacgcacttgtcgttattgatcttggcgcggcccagatcgtcgctctcgatggctttcacgccgcacgcttccgcgcacgggcgcgtgtggtgggcgatggcgtcgtacgggcagacggccttgcaccgcccgcacttgatacacttggactgatcgatgaacgatcttccgtccacgatggaaaccgcgcccttggggcacacttccgtacagggatgcgccacgcaaccgcggcagttatccgtgaccttgtaaaggttgggcgcgcacgccgcgcacgcggagggaatgacctgcatcagaggcggttcgtaatacttgtccgcgatgtcgctttcccgcagtccgctcgtgatatgcacgggtacgtcctcggggcgcagcgacagccccatcgaaaggcgcacgcgttccgaacagatggcgcgctcgcgccagatgctttcgcggtagatcggtctgtcgcccggggtgatcttatagggaatggcctcgatcgcgtccttcacgtcgttttccgactcgaaagcgacgcgcgccacttcgacaaacacctgtcttctcagtttctttaagggtgtcaataatcctctttccatgattgcaccattttaccgcgcggaacgcgctttgtcaaacactcttgcgcgccctgcaagaaaaattcacgaatttttcagagccgcgcggataaagcccgcaaagagcgggtgcggcgcgttggggcgggatttgaattcgggatggaactgtacgcccacgtaaaagcgcttttcgggaagttctaccgcctccacgagttttccgtcgggcgaaacgcccgaaatacagagccctttttcctgcaattcttcgcggtactcgttgttgaattcgtagcggtgacggtgccgttcggaaatcaaagaagcgccgtacagattttcgaggagcgtaccgttttgtaccgcgcacggataagcgcccagacgcatggtaccgcccatcttcacgccgtgctggtcgggcatcagatcgatgacgggatgggaactgttttttgcgaattccgaagaggcggcgtccgcccagccgacgacgtttctcgcaaattcgatgacggcgatctgcatgccgaggcagatacccaaaaagggaatatccttttcgcgcgcgtacttcgccgcgacgagtttaccctcgacgccgcggttcccgaagccgccgggcaccaaaatgccgtccgcttcccgcaaaactttttccgcgttctcctcggtcagtttttccgtatccgtccagaggatctccacgcgcgcaccgttttcgaatcccgcgtgcgtgagcgcctccgcaacggaaagataggcgtcgtgcagccgcacgtatttgccgcagagcgcgatcttgaccgaacgcgcgcgcgaagccgcctgcccgagcatgcgatgccaatcgctaaggtcgggctcgcggtcggcaagccccaggatacggcagaccgtggaggcgagtttttctttttccagcatgacgggcgcttcgtacaaaagcggcagcgtgcggttttccaccacgcagtccctgccgacgttgcagaacatggcgatcttttcgcggatctcttcgggcagaggctcgtccacgcgcgcgacgatgacgtcgggacggatccccatcccctgcaactcgcgcacggaatgctgcgtgggcttggatttgaattcgcacgaacccgcgatatacggcacgagcgtcacgtggatgaaacagcagttttcccttccgatctccatggaaatctggcggatcgcctcgataaagggctggctctcgatgtcgcccgtggtgccgccgatctctgtgatcgccacgtccgcgccgctgtgcgcgcctacgttatagataaaggacttgatctcgttggtgatatgcggaatgacctgcaccgtctgtcccagatactcgccgtttctttccttgttcaaaacgttccagtacactttgcccgtcgtcaggttggaatatctgttcaggttttcgtcgatgaaccgctcgtaatgcccgaggtccagatcggtctccgctccgtcctcggtcacgaacacttctccgtgctgatacgggctcatggtgcccgggtcgatattgatatacgggtcgagtttctgcgccgtcactttgtaaccgcgcgccttcaagagccttcccaggctcgccgccgtgatgcccttccccagcccggaaacgacgccgcccgtcacaaatatatatttcgtcataaaaacgcccctacatttccacaaacgcgtcgcgctccgcgcctaccgacacgtagcggatcttacacgcgcattcctcttccagccgcgcgatataggcgagcgcctctttgggaagatcgccctttttgcggcaggcggaaatatcgcggttccagccctgcaccgtttcgaaaaccggctcgcaggaatcgagcaggtcggggaaaggaaactcggtcagttttttgccgtccaaccgataggcggtgcagatctccaattccttgaaccccgacaaaacgtcgagtttcgtgagcgcgatctcgtccgcgccctgcatgcggatcccgtagcgggaagcgaccgcgtcgaacgggcctacccttctcggccgacccgtcgcggcgccgtattcgccgcccgcctcgcgcagcgtatgcgccttttccccgaaatattcggcggtgaacggcccttcgcccacgcaggtggaatacgctttcataatgccgatcgtgcgatcgagtttcagattcggcacgcccgcgccgatgggcgcataagccgcgatggtattcgacgacgaggtatagggatagatgccgaaatcgatatctctaagcgcccccaactgcgcctcgaagaggatcttctttccctgtctgtgcgcctcgctcagatacagccccgtatccgtgatatagtcggaaagcggaagcccgaactgttcgaaatagtgcaggatctcttccacgctcgtcccttctgcgccgtacgcgccctgcaatgtgagatttttccagtccacgatatcgggaacgcgctttttcagccgatcccattctttgagttcgccaatgcggaaggcttttttgagatacttgtccgcgtacacgggcgcgatgccgcgctttgtcgagccgaattttttatcggcgaggcgctcttcttccagacagtcctgcgccacgttgtagggcatcgtgacgaccgcgcggtcgctgattttcagattttcgggagagattttcacgcccgcctcgcgcagtctgcgcatttcgcccgcaagatggcggatgtctacgaccatgcccggacccatcacgcacgccacgttttcgcgcaaaatgcccgaaggcagcagatttaaaataaactttccccgttcgttgatgacggtgtgccccgcattgttgccgccctgataacggcacaccacgtcgtaatcggaggacagcaagtccaccattcttccctttccctcgtcgccccagttgatgcccacgatcgatgttaacataaatactcctttggctgttttttcctttcttccctattataaacgccgcgcacgcactccgtcaagcgcgcaggcaaaagccgaaaccttgtaattttcaatagaaagtataagcaggaattattgcaaatatctttttgccgtgctataatatttttatcatgaataatgtcattctcggctcgttcgatctgtacgaactgttcgtctattttttcgtatattcctttatcggctggtgcagcgaagtcgtgttcgcggcggtcaaacacggaaaattcgtcaaccgcggctttttaaacgggcctttatgccccatctacggcgcgggcgcggtatgtattctcctcgcgctcaccccgctgcaaaagggtcggtcgtgggattttctcgccgtgttcgcgtgctcggcgcttttatgttccgcgctggaattttttacgggatttatcatggaaaaattctttcaccgcaaatggtgggattacggcgacaggcgcttcaacctgatgagttacgtgtgtctggaaatgacgcttttatggggctttgcgtgtcttctgctcatgtacgtactgcatcccgcgatcgcggcggtcttttcgcatatcccgtacaaggcgggattctggctcctgatggcggcgatcgccctgtttatcgtcgatctcttctttaccgtattgcaggtcacgagcctcggcaagaagatgcgcgaactggaaaacatcaacaaaaaactgcgcgcgggatcggatttcatcggcgaaaaactgtacggcatcacagccaagagcgaggcgcgcgtcgccgctttgaaacaaaagatcgaaaagagccgtctcgggaaggcttttccgaaactgatcaaagaacacaaaaaagacgaaaccaagaaacaatgaggaaacgggacgcaaaattttgcgtcccgtagttttttcccgtttaattgactttgcatcccagactgattaaaagcgcgctgtccacgtcgcgcatggttttggcggggagttcgccgatgcgctctttcaagcggcgcttatccaaggtgcggatctgttcgagcagaatgacggagtccttcgccaatccgtaattggcgcaaggaagttcgatgtgagtgggaagtttggctttgttgatcttgctcgtaacggccgccgctatgatcgtcggggagtacttgttgccaatatcgttttgcacgacgagcaccggccttacgccgccctgctcgctgccgactacgggacttagatcggcataatacagttctccccttttgatatccatttcgtacctctcaaaatttttttcgggtacttccccctcttttccattatatgtagaaatcacgcggaatgatttcgaggaaagttgcccgtactcgatttttgacaggaaacgcttattttatacgcgcgagcgattctaattttttgacggtcttagggatctcctgcaagaggtcggaagcgcacacgccgtattcgcccagtgtctgggaaagagaaattgcgctttcgcccaaaatgaacgacgcgcaggcgcacgcaaggagagtatcgtccgtgcgcgccgcgatcgccgccgtcaggcccgcgagcacgt

SEQ ID NO: 4053 - DNA, 3334 bp, Unknown
  16S sequences of unknown bacteria
tacacaagggaggcttgaatgtacaatgcctatgttttttctgatgtaggaaaatatgaagtcggttttttgcttggttttggtgcccttataaaaactcgaaaacaggttttagcttagccccggctcccttgtgtaaagggagctgtcagcgaagctgactgagggattgcaagtttccgaatatgcccctaatttatcacctgttgctgtttgagttgcttgttcggatatgtgcgctaaggaagatttatttcgtccttaattgttttggcgttaaagaatccctttttgttggtttcacttacatatttaacgtcgataacgccctgcccctgctcggaatcggcaaccttcatacagaattttagtttatattcaagcaaatcggcgctgccgagacttaacacaaaattttccttataaagcagtcttatgtccgacaaatcggtcatgtcgattaccgatatatcggtaattccgctgctttcggcggcgcttttaagcttttcaaggctttgctttgcttcatcggaaatgccgagctcatctcccgcttcggccgacgttatttcaagccccacaaccgtgggagacgatttttcgtcggtctgctcaagcaccttaaggctttccgaaagactgagaaagctttcgccgtatttcacgcaaagtgcgggcgtttcgctttccaccgtgattttcaccgatgacggtaaaattctctttacctcggccgactttacaaaaggaagctttttgcatattttcgacgagatttcatcgggagagagcgacagcatactttgccccgtatacacccccgccgcatcgattatttgctcggaggaataattgctctcccccgccgtctcgattttctgcaccttgaaaagcacggtatagcagagacacacggcaagtgtaataaatataagaatgagcaaaacataggtcagtatttttccgtttctcgcctttttcgccctttttttacggttttgctctctgccctcttcggaacgacgctgccgctgctgttcgggagaaagacgtcttttgttatcggtcatactgttcctttcctttgcttacttttatatcggcgccgagtttttcaaaattttcggcgaaattttcatatccgcgttttatgtattccacatggccgacggtggtcaccgaatcggcgcaaagacccgcaaccgcaagagccgcgccgccgcgaagatcggtggcctcgacatttgccccggtcagcctacccactccctcgacaacggccacccttccctcaactcggattttggctccgagtcttgtaagctcgccggcctgtctgaaacggttttcaaatatattttccacaaaaaccgttgttccctccgacacggcggccatggccataagggtcggctgagcgtcggtgggaaagccgggataaacgccggttctgacctcggagagagcaaaaggacggtttttaaattcacattcgattgccttgccgcttatctttatgtcgcctcccgcctgtttaaaaaacggaagagcggaataaaggtgggtcggctcgatactgtttattctgattttaccgccacaggcaccaacggcggacagatacgttgcggcggcgatgcggtcgggaatcaccctgtgctcgcagccgtgaagtctgcttacgccctcgatttccaccgtgctttcccccgcaccgtaaatttttgctctgcaggccgtcagaaaatttgcaaggtcggctatttcaggctctctcgcggcatttcttataaccgtttttccctcggcctttacggcggcaagcattatattttcggtggctccgacgctggggaaaggcaaatcgatttcacagcccttcatcggctttttcaaaaagcagtcgagacggccgtgactttcctcaatttcaagacccattttccgaagcgagcaaagatgaatatcgatgggacgcgggccgagctcgcagccgcccgggaaggaaagcaaagcgcacccgcattttgaaacgacggcgccgagaaaaattatcgacgagcgcatttctctcataagcctgtcgggcacctcgcggcacataaatcctccggcgtcaaccgaaagagagcttcccgcccgaatcaccttacagccgagatattcaagaattttcacggccgccgaaacatcggtaatgtcggggcaattatgtataatacagggactttcgcacagtatcgccgccgcgagaatgggcagcgcgctgttttttgccccctgaagctcaagctctccgaaaagacttttcccgccctttatgcgaatgcgttccatagcctccacctcttaaaacaaactgtaatacagtttattcggtaaaggccgtaaggttacggcattacattaaagcagcgcggttatggcctcataaatccgcttgttcgcgtcaagataggcgtctttcttggcggcatttcccattctctcggttttgtttctgtcctcaagaagttcaaaaacggttttataaagcaggtcgccggtaagctccttttcctcaataacaaccgctgcaccgcggtttttaagggtcattgcattgtgaaactgatgattttcggcaacattgggcgacggtatgagaatcgacgccttgccctgagcctcaatttcactgagcgtaatcgcccccgcgcggcttatgacaagatcggccgccgccatgcaaaggtccatgtcgtttatgtattcggtcacccttatctgcgggttgatagaaagatccaccccgcgcgatgttatatcatttataaatccgtcataggctcccctgcccgttccgtggaagtgataataattctgtcctcccgcatggcgcgccataagctcggccaccgccttgttgaccgtgtcggcgccgagacttccgccgaaggaaagtatcatggggcggttgtctatcccgagctttttgcgggccgagggcttatttgcctccaaaacggcggtgcgaacaggatttcccgtcacgacatattcccttttgggcaaaaatttctccgcctcgggcatggccagcattaccgtatccacatatttggaaagcagctttgtggtcacgccgggataggcgttttgctcatgggttgccgttttatatcccattttgtgtgccttgcgaagcaccggtccgcaggcaaatccgccggtccccacaaccacgtcggggttaagctctcttattatttttccggcctcaaagccggaagtaaacatccttttgaaggatttcacgttgtttttcaaattgtgcggcgtaagctttctt

SEQ ID NO: 4054 - DNA, 6601 bp, Unknown
  16S sequences of unknown bacteria
tgattatcaaagacaatatggcaaatatgtgtgcaaaagtaacttcgacctatatggaatttactcttgcatttggtccaaaaccggaattcagtttttcatttaagtatacgatgattgccgcgcagaaagcagaataaaacgcttgtggaaggaacaattgtttggtataatgaagcagtatgcgtaagaaagattatcgtaccgaatcaggaggcgtgttatgagcgtactgcaatctatttttcttggaatcgtacaggggatcacggagttcctgccggtgagcagctctggacacctcgcgattctggagaatatttttcacattgatacagacggcggcatgctgttcgacatcatgctgcatgtagggacactggctgccgtatttgtcgtctatcacaaagatatctggcgaatgatcgtggagacgttcaagatgatcggagatctgtttgcaaatcttcatatctatatgctgaaccgcattcataagacctcactgaaatatcgccgtgtggtacacaacaattaccgaaaatttgtcatgctcgtgctcgtatcaacgattccgaccggactgatcggtatcattggaaaggggcttgtctctgcagccggacagacgctcctgatccccgggatctgtcttctgatgaccggcgtgctgctgctcattgcggatacgaccagggaaggacataagcttccgcgccaggtgacatacaaaaacggtcttttgatcggagcggcacaggggctggcgacacttccgggactttcccgttccggtaccacgatcgccgtgtgcctgctgcttggaatggatcggagatttgcggtcaaatattctttcattttatcaattccggcggtactcggagcagcactccttgaggtaaaggatgtgatcgcagagccggtcaaagcatcacagattggtgtttatgcaatcggcatggtgtttgcagcagtggttggatacatatgcatcaagacaatgctgatcgtagtgaaaaataagaagtttaaatatttctcctattattgctttatcgtaggagccgttgcaattgcaggacatttcctgctgtagcagcaaaggaaattcagactgggaggcagagtatttgacagcaaaagcagtaaataaaaaaccagacggatcgaggaagcgcagcacgacatcctcttccgcaaatacgaaacggaaaacaacaggcagcagcagttccacacggagtgctgctgtatctgcgaaaaagaatgcttccggtacggcgacaaaggcagcgagaaaaccaaagcctgagaaggaaatggaacggcccatgataccggaagagcgtaccagcccgttgctgattcaggaggctgttctctgggggatcatcgcggttggtatttttctgtttatcagcaactttgggtttgggggttttcttggaggcgtgttgagtgacgtcggtttcgggattttcgggtggatggcatatctttttccggttctgctcgtctttttcacagcatttcttatgtcgaaccggggaagcgcgattgccggtgtaaagtttgtttccgcagtgatcctgtatctgactgtgtgcagttttttcggactggcacgcgcagaggaatatgaatggatgaaggtcggagctatctatgagcggagtgcagcttataaaaatggcggtggtgcggttggcggatttgtgtgccagcttttgactccggcgctcgggacagttggtacaggtgtatttctcgtgattctttctatcatctgcgtgatcctcataacacagcgctcgatcatgcggggaatgaaaaaccagagtaaaaaaatgtaccgttcagcaaaggagagttcagccagacggcgtgaggcttatgcgcgtgaacgcgagcagatggagcagcaggagctgacattggaacagatggatctttcaccggatccggcgcgggcagatgcctatgtgccatttgcagagaagccggaaaaacggagggggctgtttggcagaaaggctgagtcacgcacagtgatagaaacgaggcgaggctgtaccgaaagaagcccggaggtggcaaccatgcctgagcatgctcaggggccgaaggaaggaaaagagcaagtggcgagtcatcgtacgaagttggaagtgccggtcattttcccgtctacgccacagccgtccagacacagccgcaaggtggaaggcacggcgacggatatcaggatccggcgggatgcagatgagacggatacggtttatcaggagagcaggcagccgacagcaaaaccggaggtgggacttcatatcgagggtctggaaaagagccggagagaagtaagctccgatgtgatctttggaaaggcagagcttccgcagtcgaatcctgtgcaggaaaagacggcgcagtctgcattatatcgtgcggatatgagtgagctgcaatcggatgcatttgcagatgatttgtccacagatcaggaagatgcatggagaaacgaggaaactgctgttgcatcagaagcaaatctgtttcagaaagtgaaagaagagccggagacagagtatctcggaccggaagaagaaccggctgaggactctggaaggtctgtggagtcacgctcggattttggtatctttgcagaagagggaaagctggataacacctcatccggtcatatattccgcgaagagccaatcaaaaagcagatagaaaaccgtgtgcagaccgaaagcggccgcatgacgtcaaagtctgtaaatgccggagcgccgtcgcctgatagccaggatacgccgcaggaatcatcggcaaaacgtaatccgcgttcttcaaagcaggagattcaggccggaattgcggatgtcgaggcggaggctgcggaggccgcagaggccgtaaagcgggaatatgtctatccgccgctttcgctgctgaagcatggatcgacacggaccggggcgagccaggagcaggaggtgcgccgtaccgcggcaaagctgcagcagaccttagacagcttcggcgttcatgcgaaagtgacaaatgtaagctgcgggccgagcgtgacccgctatgagctgatgccggagcagggcgtgaaggtcaagcagatcgtggcgctctccgatgatatcaagctgaatctggctgcagcagacatccggattgaagcaccaattcccggcaaatctgcggtcggtattgaagtcccgaatggtgagaacagcaccgttatgctgcgggatttgctggagacagatgaatttgaaaagcacaagtccaatctggcgtttgccgtcggaaaagatatcggcggaaagaccgttgtggcagatatcgcaaagatgccgcaccttctgatcgcgggagcgaccggatccggaaaatccgtctgcatcaatacgctgattatgagcattctctataaggcaaagccggaggatgtcaagctgatcatgatcgacccgaaggtcgtagaactgagcgtttacaatggtattccacatctgttcattccggtcgtcaccgacccgaaaaaagcggccggtgcgctgaactgggcagtcgcggaaatgaccgaccgctataacaaatttgccgaatacggcgtgcgcgatctgaagggctacaaccagaaggtcgaggctgccggtatgggagacgatccgtcagcaccgaagaagctgccacagatcgtgatcattgtcgacgagctggcagatctgatgatggtcgcccctggtgaggtagaggattccatctgtcgcctggctcagctggcgagagcagcggggctgcatctgattattgcgacgcagcgtccgtctgttaatgttatcaccggactgattaaggcaaatatgccgtcgcgtattgcattttccgtctcttccggcattgattcccgtacgatcattgatatgtacggagcggagaagctgctcggaaagggtgatatgctgttctacccacagggctatcaaaagcctgcgcgtgtacaaggtgcatttgtgtccgatgaggaagtatctgatgtggttgatttcctcaaagaaaataatatggatggaggacacagtgcagcaatggaggcgcagctggcgaaggtacagcaggtcagcgaggcagcccgtgcaaatgaggaagtggatgcgctctttgcagaggcgggtaaatttatcatcgagaaggataaggcgtcgatcggcatgctgcagcgtgtgttcaaaatcggattcaaccgggcggcacggatcatggatcaactctcagatgctggagtcgttgggccggaagaggggacaaagccgcggaaaattctcatgtccgaagaagaatttgaaaattatctggagcagaactagtacatctaatttttgtatgctgtaccggaattcctgacgtattcgataaaaattgtcaaaagtttaacataatctgcattttttagcatttttttcattctgacattgaatttcttgcagtaatgtcttatactaagttgatgtaatttgcaggactttgcatgctctgtgcaggttcgtttacaaaacagcaggaaactgctgaaaaatatggaggtatcatatgtacaagattttggaagcagggaaacttgcgggcaatatctatcagatggtagtagaagctccgcgtgttgcgaagcattgcctgcctggacagtttgtcatcgtcaaagcagacgcagttggagagcggattccgctgacgatctgcgattatgacagagaagcaggaactatcacgattgtattcatgccgatcggagcatcgacagagaaatttgcaaagcttaaggccggagattctttccgtgattttgtaggaccgctcgggtgtccgtctgagctctgtgaagaggcaaacctggaagagacgagaaagaagaagattctgtttgtagcaggcggagtaggtacagctccggtatacccgcagatgaaatggctgcatgagcacggcattgacgcagatgtcatcgtcggtgcaaagaccaaggatctcgtaatccttgaggataagttcaaatctgtagcaggtaatctttacgtgaccacagatgacggctcctacggaagaagcggtatggttacaaaggttatcgaggatcttgtcactaaagaaggtaagacctatgatcattgcgtagcaatcggaccgatgatcatgatgaagttctgctgcctgaccacaaagaagttcaatatcccgacggttgtcagcatgaacccgatcatggtagacggtaccggtatgtgtggtgcctgtcgtgtcattgtaggcgatgaagtgaagtttgcctgcgtagacggaccggagttcgacggacataagatcgattttgacggagcaatgaagagacagactctgtataagacagaggaaggaaaggcgctgctgagactgcgtgagggcgatacccatcatggtggatgcggcaattgcggaggtgacaaataatggcagacgtattaaagaaggttccggtaagagagcaggatccgaaggtaagagcgacaaattttgacgaagtatgtcttggctataataaagaagaagcgatggcagaggctgagcgttgcctgcactgcaaaaatgcaaagtgtgttcagggctgtccggtaaacatcaatattccggatttcatcgcagaagtaaagactggcaattttgagggggcttacaaggttatctccgagtccagcgcacttccggcaatctgtggccgcgtatgtccgcaggagagtcagtgtgaaggtaaatgtatccgtggcattaagggcgaagcggtatccatcggtaagctggagcgttttgttgcggattgggctagagagaatggcatcaagccgccggcaccggcagcaaagaatggccataaggtagcagtcatcggttcaggcccgtccggactgacctgtgcaggagatctggcaaagcttggctatgatgtgacaattttcgaggcactgcatgagccgggcggagtacttgtgtatggtattccggagttccgtcttccgaagctggatgtcgtggcaaaggaagtagaaaatgtaaaatctctcggcgtaaagatcgagacaaatgttatcatcggcaagtctgtaaagattgatgagctgcttgatgaggagggcttcgaggctgtatttatcggttccggtgcaggtcttccgatgttcatgggtattccgggagagactgcaaagggtgtattctccgcgaatgagttcctgaccagaaacaacctcatgaaagcattccgtgatgattacgatactccgatcgtacacggcaagaaggtagctgttgtcggcggcggaaatgtggcaatggatgcagcgagaacagctcttcgtctcggcgctgaagtacatatcgtataccgccgtagtgaagcagagcttccggcacgtgcagaagaagtacatcatgcaaaggaagagggcatcatcttcgatctgctgaccaacccgaaggagattctggtagatgaaaacgatgcggttgcgggtatccgctgcatccgcatggagctcggggagccgga

SEQ ID NO: 4055 - DNA, 16170 bp, Unknown
  16S sequences of unknown bacteria
aagctgtagcgtgcggcgctgttgacgacgcgcccctgcccgaggtccgagacgagcaactgcgccgcgctcttgtgggcactgtccttgtacacgaccagcgtctcctcgtagacgaactgcgatgcgttgcccgaactgccgatcttccagccctgctgctcgagctccttcttgcagtcgttggcaacgcccgtgacgccgactccgttccagatgtcgaccgtcgcactcgacctgatgttcgcatagctcgcaagctccgcctggcttgccacgggggaaagccctgccgccgtcctcgtgatcatgctgttccacgagtctgtctcgacggtcgagtacgagccgcttcccgaactctgcgagcttaccggcgcctgcgattggtagatgcccgcatcggtgacaccctgcatcgcagagaacacggaggacatggtgctcgtatctgcatccgtgctcacgcaggtcgtgaaggtgcttgccaccgtggctatctgctcgttgctggaaccgcagatcttcttcgtgattgccgtcgtgagcgtcgtggtatcggcggcggcaggatcgatcccgagcggggcaaggccatcttccaaacgggcaagccccgcgttgttcatctcgaagtaatggctcgcctcgacactcgcgagcttttccgttgccaccgttattccgcgctcgccttgcaggtcaaacgcctcggcgatgctgcggtacccatagccgtcgagatagatacgcgtatcggaagggatccacaggaacgtgatgcacttgccgtccggattgacgtagacgagtgccaaagactcgagcttgccgcgtcctgcctcggctgacgaggcatccgtcttgacgagcacgccccaaaacgggctcgtcttggagtccgttgcggtaagcacgctcaagagctggtcttcgttcaacgtggacttgagcgcgttttttgccgtctgctggtacacgaacacgccgaccgctgtcgcgagcgccagcgagcagacgataagaacgacgatcttgatcagagcggaacgggagatgcgggtttttttgttgttggacgggtgaatgtacgaaccacggcgccttgacccgcccgcgggcctgctcgtcccaccgcggcgcgtgtttgccgtggacatggtgaggcccttcctgttgcgggggttgcccccgggaagcttcaccgacctcttgcccgcaccgctgatatcgagcccgccgccctttctcctaggtgacatgcatcttgcctttcgaacgaaagccggctagcccaccgcgtcgatggggacgcgcctgacgtctgccccaagcccgcgcagcttttcctcgtagctctcgtagcccctgtcgatgtggtagatgctgtcgaccacggtctgcccgtctgccacgagccccgccaggaccaacgcggcgccggcgcgcaggtcggtcgaattgaccggggcgcccgaaagtcgcggaacccctgagatgagcgcgtggtgcccgtcgatgcggatgtcggcgcccatgcgcctgagctcggcggcgaacatgaagcggttctcgaacacgttttcggtgatgatcgaatcgcccgaggcgagcgaggcgagcaccatgaactgcgcctgcagatccgtcgggaacccaggatgcggaagcgtctggatgtccaccgcgcggagctcggagctgcgctcgatggtgatggagtcgtcggtgctgatgagatcgcaccccatctgctgcagcttcttgagcgcgagcgcgaggtggtcggggcataccccctcgaccgtcacgggcccgccactcaaggcgcctgcgaccaggaacgtgcccgcctcgatgcggtcgcccaccgtcgtgtgctgggtcggatgcagctctttgacgccgttgacgatgatatttggagtgcccgcgccttggacgtcggctcccatcgcgttgaggaaattcgccaggtcgacgatttccggctcgcaggcggcgttgcggatggtcgtcgtgccctgagcgcacacggacgccatcgtgaggttttccgtcgcgccgacgctggggaaatcgagaaggacctctgcgcccctgaccccattgggagtcgtagcctcaatgtagccgtggtccatctcgaactcgacgccgagcgcctcgaggctcgagatgtgcatgtcgagctttcgcgagccgatctggcaaccaccgggcatcgcgacgtgcgcgcggccgaagcgcgtgatgagcggaccgagaatggaaatcgacgcgcgcatcttggcgacgagcgcatagggcgtctcgtacgagtcgatgctgctcgtgtcgatgaagatggtctggttggtgagcccgcgctccgggccgcgggtgacctttgcccccaaagtggtgaggacctcttccatgatctcgacgtcggagatcatgggaacgttgtctatccgagtctccccgactgccatgacgcttgcggccatgagcttgagcacggagttctttgcgccgccgatttgcacggtgcccgtaacgggcctgccgccgttgacgacgattacatcatgggaatccatataaccctctctcttgcattagggaaggagtttagcatggagacttgggcaaaatttgaagatgctgtgatggacatgaatccgtaagagtcagcgcttccgcgctctccgtgcgttcttcttggtaccgcctttggtaccaccctgctgcgcccacagcattctccaaatacgaaaaaaggcaaaacaagcgtttgacctggggttttgtttggcgcgcccggggggattcgaaccctcgaccgtcggattagaagtccggtgctctatccagctgagctacgagcgcgcttgtctgacgccgggccattttagcgcaagatgcaaacgctgacgaacgggaattactcctgcgctccctcgaggctctcgagtcctatgagcgcggcgcccaccgctccgacgatctcgggctcgtcgcagatgtagagggcctcgcccaaggcggcctcgacagcctcgacgacgcccaggttctttgcgacgccgcccgtcatcatgtagaccggttctggcttgacgcgacgcagaagcgagcacgccttgccggcgatcgcctcgtgcacgccatgcgcgatatcggccttgtccgtgtcgttggcgataagcgagatgacctcggactcggcgaacaccgtgcacatcgagcttatctcgacgtggcgctccgagcgctgcgagagcgggcccagttcttcgatcccgacctcgagcgtacgtgccatcgcctcgaggaagcgtcccgtccccgccgcgcacttgtcgttcatggcgaagtccgcgacctctccgttctcgtcgaggcggatcgccttggaatcctgtccgccaatgtcgagaatggtccgcacctcggggttgaagtaccacgcgcccttcccgtggcaggaaatctccgtgacgtcgagatcggcgaagtcgaccgacacgcgcccgtaccccgtcgagacgatgagagagacgtcctcgcgcgcgatgcccgcctcgtcaagcacctcttgaaccacgcgctccgcagagctcgtggcgcgtgcccctgtccggatgaccctgcttgccacaaggttgcgggattcgtcgagcaccgccgcgttggtcgaggtcgagccggaatcgattccgagtacgtacatcttctcaccttgcttcctattgacgggggcagcggcgctcgcgatgccccgcgccgtcttgagcgtctcggcgaacgcttcgacgcgtgtccgaatctggccgcttgactgcgctgtcgcgtcggtctcgatctttaagacggggatgtcgaaacgagaatggataaacgcgtactcgtacgagtagatatcgcagaatttcatcgtgtggtacacgatgccatcgacccgctttgcctgctgctcgagaaacgcgtcgcgcgttgcgatatcgtccatgcgcatacagggcaactgctcgagcagcgcccgcgcgtagcatgcgatgagggcatggtcgtcgagcgcctcgagctgctcgtaggacatgccgaccgtgcgctgcgcgccaaggcacgtgatgtcgaaggagacgtcgacgccgttgtcgttgaggatgcgggatatctcggcgctgtagcgcgcgcccacgaccccgacgcgcggcctctctgccgcacgctgccctgcgcccttctgccgcatcttgccggcatgctgagagacgaggaggtcgatgaggcaagacctgttgaactcgtgccccgagaactgccggtacctctgcaagaggtcctcgatgcggcgcgcgaacagcatgacgctcgcgtcgtcgaccttccgcggaaggtcgagctggtacacgaacttttcgggatagagcaccttgcaggtgtcgtgcaggcgtcggatcgaatcgcagcaggtggtgaacacgatgccttcatacccgcggctgtcgatatcctcgagaacggccttggcgtacgagcagacgttggggtgcatgtacgcgtccgcctcgttgaagctcgcgacatgcggctcgacccgcaccggatcggccgaaagcgcgcttagaagctcgactggagtgtacttgcagacatagccgatcatgcgcaggcctgcccttcgcctgtagcgtccagcagctcgagaaacgcctcgaagcgcgtctttacctgcccctcctggccgctgcggcggtcgatggcatcgccgtcgagggcgagcatgggcacgcccagttcggacatctggcgcttgagcagctggacccctccacaggattgcttgcagccccagtggcagaactcgacgacgccatcgcactcgtagtgctgcacgtagcacgataccgcgtcgatttttcgggagaaatccccgttgtagatgttgcagatcatttttcgcgcaagcgcgtgaagcggccggtcaacgtcgagctgctcgacgaagtcgaggttgaagtcgtcggcgactaccgtcagattctcgttgtagttgaggtattcgttgagcgtcggctgcgcatacggcacgatatgcacccagaacagccgcttgctcgtaccgagcggctgtgcgtctatctcggaatcgagcatcctgaagaactcgagcgcccattcgctgccgatgctcaggtgcgttgcgaacagcatgaacaggcgcatgatgagcgcctcggggtacgcatgcgtccggcgcttctcaagaaatgagaggtagtgcgccttggactcgttctcgcgtacgaggacctgcctgagttggtcttcgtcgaagcgtgtgcccgagagcccctcgagccacgagaccatctcgcgcagctgtgccacgacgtactcctcgccctcggggctccatacgtggggaatgtcgatgaggcgcgtcgggagaccttcgtgcttgcgcaggtacctgaaggtgttcgtgttgcagtcgcagattgtggacgtggtgatgccgcacagcggcttgggcacgagccccgcctcgcacgcgccgagaaacgtcttgtggtacgagcacatcgtgctcgcgaagccagccgtctcgcaggcgtcgatgaggcggtcttcgatccagaagcccgacaggtacgaggccaggcattccatggagatgcacttgatgtcgaagcactggaggatctcgacaggtgcgaatatgttggtccaggcgaactgctctggctttcccaggacatccgccacttccttcatcgccatgtggcgcaggtactgatgggccctcggggactgcgagtcgggaaagtgccccgtgcgaaacgactcggcgtgcaggccgagtcgtatcaacgcattcgcgcggtcggggttcttctcgagcgcctgccccacgtaggagccataggtgcgtgctacatccataggtgaagctgccggaaggcagcgttatttcccttctgctttgaggcgcttgacggcatcgaccgtctctcgcagggtctcgtcaagctctgtctcgagcgccttgagccgcgcgagatcgtcgagcaccgcattgtcgaccgtgccctggcttctgctgagcgagcggcgcagatgggtgtcgatgtcgacgaggcgcttcttcaggccgaccatgtcgagccccatgcgcgcgaggtactcggaggaacccgcctgcgtgctcttatcgtagagctgcaagatgaactggctgatagagagcccctgctccgtcgcgtcttcggcgatgcggtctttcacgctcggcgggcaggagatgttgagcctgccggtgtgatattcactttccttcttttttctcatggccttccccagccatcatgtgcacgacgtgctcgaactggtcatacactgcctcccagttctcttccgcagccttcttgctgcccgggaggttgaccacgagcgtcctgccacgctgcatgcaaattgccctgctgagcatagcacggcgggtcttcgacatggaataggcgcgcatggcctcggcaatgccgggcacttcgcgctcgcataccttgcgcgtggcctccggcgtcacgtctgcaagagagaggccgcttccgccgcaggtcaaaacgacatcgacgcccttgtcgcatgcggcgacgatggcatcggcgatctggtcgacatcgtctttgacgacgacgcggctcacgttggtccacccctgcccggcaatgagctcctcgaggcgtgcgcctgccgtgtcctgctcgatgccgcgcgtggtcgaacaggtgacgattgcgaatctgatgtccatgatggctactcccttgtccaaagaccggtcctgccgccttctttgcggaggaggtgaatgtcgcagatttccatgccgcggtctaccgccttgcacatgtcgtacacggtgagcagcgcgatggaaacgcccgtcagggcctccatctcgatgcccgtcttgccggtgaccccggtggtcatgacggcgtggatgccgacgcgcccgtcttcgcgctcgcccgtcctgacaggctcgagctcgcacttggacttggtgatgttgagcgggtggcacatcgggatcaggctgctcgtctgcttgcagcccatgattccggcgacgcgggcgcaagcgaggacgtcgccttttgcagccgttccctcgacgatcatgtcgagggtgtcttggtgcatgaaaatccacccctcggcaatcgcctggcgtttcgtgtcgtctttctcggacacgtcgaccatgcgcacagcgcctttctcgtccacgtggctcagcgtgccgggacgcgcgtcgggatgctcggagattccggcggaaaggccgccggggagtgtttcggacatagtgctctacccaccaatctggctcatgcggcgaacggtgccgcgctcttcgtgatgctcgtccggcttgatgccgatggcttccaagatatcacggacgaccgcatcgtccccgccgccttcgcgcaaggcgcgtttgacgtcgatttccctgtcgctgaacaggcagggccgaatctttccgtcggaggtgagacgcagcctgttgcacgaggcgcagaagtggttggacatggcgctgatgaagccgaccgtgcctttcgctcccgggaacttgtagtagaccgcgggaccaccgccaccgggctcgtcgcccttgatgaccggcataagcgcagagagcccctctgccttcgcacgggtgtcgatgatgttcctgagctcttctgatgagatgctgtcttgctcggtccatcccgcccccgtgccgccgctgctctcgcccacgggcatgtactcgatgaagcgcacgtgcagcgggcggtcgagcgagagcttggcgaacccgaggaagtcctggtcgaggctcctcaccgcaaccgcgttgatcttgactggatcgaagccgacctcgagcgccgcgtcgatggccttgaacacgtcttcgatcgagccgcggcgcgtgatataggtgaactgcacggggtcgagcgtgtcgagcgagatgttgacgcgcgagagccccgcgtccttgaggtcgcgtgccatctcgggcagcaagatgccgttcgtcgtaagcgagacgtcctcgatcccgggggtcgccgcaatgtcgcggaccaggtcgacgacgcccttgcgcacgagcggctcgccgcctgtcaggcgcaccttgcgcacgccctgctgggcagccaggcgcacgaagcgcgcgatctcttcgatgcgcagaatctggtcgtgcggctgccacggcacgcccttttcgggcatgcagtagatgcaccgcaaattacagcggtcggtgagcgagatgcgcaagtagtcgatcttgcgcccaaacttgtcttgcatgtgtgcctccccactgccgcgagagcgcgggcaaggttttcgctaggtatttcgggtacctgaataatatacgttccagtgattattcgcagcaacgattagtgtttagcacaaattattgcctagcacatgaaaccccacgcgaaatgcccgagacgccgaccgcgcggctagccccgcacgcgcgtcgggtcgatgcccgcgtagctgcagaagaagcgcgcaacgtccgcgaagtcttccaggccgaatactggcttgccctgggctgcaacctcggcgcaaagctcctcgttgtcggagatgagcgcgatgcgctcttcgggggagagcttggggcccttgcccgtcgccttgcggctgacctcgaccgccccttctgcctcgctgcggaagccctcgatgacgacgagctcggttgaactggggagccgctccatgagctcttcgcgcgtgggctcgtggtctggcgtgctcacgaagatcgcgtactgggcagacgacgataaaatgacgggattggcgcccgcccgctcgtacttccaggaatccttgccctcctggtcgactccaccgggcgcatgaccatggtgtttgatgacggcgactttgatgccggaatccgcgaggatcttgaccacctgcgtgacgaaggtggtctttcctgaattggaccatccagtgacggtgatgttcgggattgtgctcataattcccccgttacgtcgtaactgtcctatatgagttgccaaaatttgggtgttttaactataacagcagatcgggatggagaaacgtcaagagaagagaaaagcccctcgatgcgctcaaagcaaaaccgcatcgaggggccgcgaaccatatgctaggcgtcgagacgtttgagcaggtacgggatctccgtctcgaaatcgacgccgtaccagttgtggtcgggatgggacacggtctctttgatgcaggcgaccgtgtaatcggccgcgatggccagcgcctcgtcgagcggtttgccgttcatgagcgcgccaaccgccgtcgagctgaacacgtctccggtaccgtggaacttcgcgtccacgagctcattgaagtagctgaagtaggcatccgactcgacatcgtacccgtacacgccgcaggtgcccggctcgaggctcacgccggtgagcacggccttcttggcgccgagcccgacgagcccctgcaggaggtccttgatgtaggcctcgtcgtactcccccgcctctttgtattccttgccgagcatgaaggaggcctcggtgatgttcgggtcgatgatatcggccttcgagcacacgacgctgcccatggcgcgcgcgaactccggcgtgaagcccttatagagaaccccgttgtcggccattgccggatcgacgaacacgagcgtgtcgtccccggcatgctcgtcgaagaagcggctcacgagctcgagttgctcgaacgagccgaggtagcccgtgtagatggcgtcgaacgtgacgccgttgtccttccagcttttgctgatgggctcgatctggtcggtaagatcgtcgaaggtgaagctgtcgaaagccgtgtgcaccgagagcacggccgtggggacgatgccgcattcgacacccatcgcagaaatgatgggcagggcgacggtgagcgagcatttgcccacgcaggagatgtcttggatgctggcgatacgcttcatgagaagtgcctttccgacgatacaagaagagaggcgccagggcacctctcctccacagtttcctggagcggcggacgggactcgaacccgcaacaaccagcttggaaggctggggctctaccaattgaactaccgccgcaatgctgggcctatgatacctcaaagcccattaatatagtaggaaatagtatatacaattttcatgcgcacgtatcgtttacgagcatggtcggggagacaggattcgaacctgcgacatcctgctcccaaagcaggcgcgctaccaggctgcgccactccccgacgcgctgaagaagtatacctcattatcctcgggcgagtcgtgcgaatttgcgcggcgcagtttaccgagcacagcctaaggactcctcagggcaaccggagacccggcctcccttcgcggaaagccgggccccgaaagagcttgcgggataagtgcgagtcttactcgttcgtctcggacagctcgtcgatagcacccttgaagtcgcccttgatgaggatcgacgtggagatgatcgggatgactgccgggatgaccatgaacatgaaggtgatggacatcgacattgccgtgcttacctgagcagcaacgcaggcatccatgattgcgccgagagccagcgggccgagcgcgccgccaaagcggccgaacgcctggcaccaagagacgcctgtcgcgcggatctgcacaggataaacctcgggcatgagcggctgcaggccggtctggccgtagttgatgccgaagccgaagagaaccatgacgagcgcgatgagcgcatacgggacaccgccggtcgtgactgcaacgtagaagacgatggtggtcagaacgatcatgacaatcgtgatgacgaagccgccgacgatgttcttcttgcggccaaacttctcggcgccgataccggcgaggacgtcggtgatgatggcagcgccgttgttgagcgtcgcgagaccgtaggtgtagcctgccgtgaccatcatcttgggtagccacgcgttcatgcccatgacgatcatggtaccgcagaagtagccaatccagatggcgagcgtgcccttgatgtacttcttggaaaacagcgcgccaggaccgaccttctccggctttgcgggaaccaggaactgatcagccgtgaactgggacgtcgtattggtgttgccatacttggacttctcgagcttgcccaaggccctgctcacatcgtcgaaacggcccttgctcgcataccagtgtggcgtctcgggcatgacgaagtacaggacgaacgaccagatgatcggcagcgcgccgatgaagtagccgatgcgccagtggtcgaagtcgacgcctgctccgatgaacggcaagcttacgcccgcgcttgcaattgcagcatcgcgcgccgcctgccacgcatcatggccgccgttgaccatggccgcgttgatttccttcgcgactgcagcgtcgcttatggcgccgccgatgaggccggagataacccagccgcaaatcatgaacgccatgccgaagctgatgaagaacgagcggttcttggacggcatccactcagagaagctcgtggttaccatcgggattgtcgcgccgagacccgtacctgcagcgacgcggaagaacgcgaagaacatccagttctcggagaagtacagcggcaggttcaagacgccgtagatgagcgtcatgatggcgagcgccttcttgcgcccgaacgcgtcagcgatgggacctgccacgatgccgcctaagacgaggccgatcagcgaccaagacgacagggagcccgtgacaacagacgtcaggccccatgctgcctgcatcgaaggaaccgtataggacacgatcatgtagtcgtatccctcgaagatgttgcaaaagccgagaatcgcgaaaatgccccaagaaaacttcgtgagaccgatgtggtcaacatagctcgaaacggtaaatttcgagccgggaccgaaatctaaggatttttcctcactcatgtcccctcctctgaggctgatcctgtggggaatcagcctgcttttctgactttattgagtgcccgtcttcgggtttttcgtccatcctgcgaaacacccctgcatccgtacccggcggcgcgaccttgggaatgctgcctacgtcaaacaccttggtgaaacgtcgtccgcactttccgcagaaggagcagaatgcaccacagcttcctgccatgagacctctcctttagcagtcgagaggcgtgtgacacagtgttagctccatatcacacgcctcttcagtgactaaacccagatgggaactcggttgctggtctttacggaacgaagatggcggccttgttgcctttcgcggcgagctttgccgcgcattcctcgatcgtgccgaactcgaggcacttggcctggcagcactggacgcaggagggaaggagtcccgcctcgacgcggcttgcgcacaggtcgcacagttcgcccgggaccgcgatgtaatcccagtgccaagaaccgtctgcgtgctgacgcggcttgtcttccaacagcttcatgccgaaatcttcaatgggaagctcgagctcattgcggcaagcaatctcgcagctgtggcatccagagcagaattcgtagtcgatgtagagcgcattctgtgacatgtgagaacctccctttctacttagttgtttgccttgtactcgtcatacggagcgtcgaccgggcgccatgcctcgttgacgctgaactcttcgaggcggctcttctcgacgaagatgtcgtcgggctcgttcgggccaccctcgctgtcgaccttcttgatgtcgcagatcatgaccttgaaggtgttgccgaagccgaccttggcgttgacgctgttcggcatgagcatgttgacgttggacttccagttgccgtacaggttgggctcttcgccgtcctcttcggggtaccagaaaccgtgcatgcaatggacaacgcctggcttgatggtcggggtgaccttcgccttctggcggatgtggccatacggagacgtaatctcgacccagtcgccttcctcgatgcccttggccttcgcgtcttcggggttgatgtcgatctcggggaacgggctgatctggcgcagggacttgacctgcttgtgctcggagtggaagaactcctggcgacgcgcgccagaggtaaggatgaacgggaaggtctccatgagcttcggcgtggtcgcgggaccgaatgcaggttcttcgaagtacggcagggcgtcttcgccaaatgcgccgtacgagaaggaggagagctcgacgcggccggtgaaggtcgggaagccgggctgcccgtcggggcggagcttgccgagcttgtacttgtagtacggctcttcggacatggtgacgacgttgtcgcggagctccttccacggcagccagctgcggaagacgtggaagttgttgtagtcttcctcggtctcgaagcggttccagaattccggatacatcttcttgccgaccatcatcatgatctcgacgtcggacttgcactcgccaacctggacgcacttgttctctgcgccgtagaacgaggagttgaggccatagtgggtaacgacctggccgtcgtgctcgatcgtggaggcgacgggcaggaagacgtcgcagcaggccatgatcgtcgggttcatgaacaggtcgcacgcaaagttgaagtcgagctccttgagtgccctccaccaacgctgcggctctgcggcgattgcggtgccgaccgggttggacgagacgaactgcgccatatggatcttgtagggcttctcggtctcgagtgccttcaggaactcgtcgggctggacggtccagaggacctggccgacgcacgggtacttgtcgacgccgatgcgcttcttgtcccaggtctcctgcgtcatgatgccgtgcttcagggcgagcatcagcgtggagtcagtcgcatcgtcgaccttgtcggctgcgtcgattgcgccgccgtcgcggacgacgttgccctggtcatcgcccatgccgagcgtggttccgccaggtgcgtcgatgaagccggtgatggtcatcagggcgatcaggcacatgccgagctgcgggccgttcgtgttctcgtcgacggcgaggccccaagcaagcgagctcggctttgcattgccgtacaggcgagctgcacgccagatctgctcttcgggaacgccgcagatctctgctgcacgggaaggaggcatctccttgacgcgctcgcacaggtcctcgtagccaaacgtccacttctcgatgaactcgtggtcgacaaggtcttcggtggtgaggacgtacagccaggccattgccatggcggtatcggtgccagggcgcagctggatgacttcttctgcacgcgtgccgagccaggtgatacgcgggtcgatgcagatgatcttcgtgccgaactggcgcatcatctcgatgatggcgtggccgtacaggccgtcggggttggagcggagcggttctttgccccacaggacgacgacctcgggcgggacgaagttcgggttgtcgtagcgatcgtggaacttctgcgcatagtcgatttcgggatagccgccgccgatcatgaacgcggttgcggtcatacgcgggccgtagcaagaccagccagcctgtgcgtacacggaattgggcgtgccgaagacgaggtttgcccactgcgggtaccagttgttggcctcacggccagtgccgccgaagacgcagatggtctcggcgccgtacttctcggtgatttccttggcgtggtcggcaatgatgtccgtcgcctcgtcccaggagcactccacccacttgtccttgccgcggtcttcgcgagcacgcttcatcgggtggatgatgcggtcggggttgtagatgtactctttgagcgccaggcagcgcgggcacagcgagcctctggtaataggatgctcgggatcgccttcgaccttggtcaccttgccgtctttgacgtggacctggagaccgcatccaaccggatggcaccccggaggagaccaagcgcaggtcctgaagatagtctcatctccgacttgccttttccattcagtcatcttctctcccttcaactcttacctcttcttcacactgggacaccgcattcaccagcacgtggcatatgcggcaccccttgctcgcgttttattgtggagtggagataatcgggcgagaagagacatgaaaactgcgccgcgtcaaatgagatttgtcgaaaaattgttaccttgacctgcgcaaatagcatcaagccacaccacgggacatccgagccccgtcgatgtggcttgacactccagacactatgtacaccctgactgcagcgcaccagaagtgtttttgaattgagcggtcctgcgaatcagcaggctttcatctgctgagagacttcttctttcgtgatgccgtactcgtcaataaaatcaagaaacttgcggcgcttcttcgaatgccgcaatgacaccccaccgatgatgatcgccgcaatgagcgcgacgccttgtgcaagtggctggtcctcgatcacgccgaacctggccgcaaacgagtaggcggcgattgcggcgaagaagacacaggcgagcacgagcatgagcgtgaaatccttggaagcctcgcgcttgagctcgattgcctgacgcatgtgcttctttctgcggttaaccccagatccagacatcggcatcccccgctttcccacagcacacaggtcttgaacgcttgttgcactattgttttaccaagcaggcgccgcacggagaagagccccggtttttgcgagggcgcaaatgaaatttgacgccgccttgaactcgcgctccggggaatcccgcaggcagcctactccatattggtgaactgctctttgacatcgagcacgagccgcttgacgaggcccgcccgctttgactcggggtcgtagagagccacaaagcgccagtcgagcctcgaatcgaggaagggtatggggatgtgcggacaatttccgatacactctatcccgccgccgccgtcgaccgcctg

SEQ ID NO: 4056 - DNA, 4778 bp, Unknown
  16S sequences of unknown bacteria
agctccttttgcagttgtttcataaattcttggatggcccggccccggtgggagagggcgtttttcgtcgctgcgtccagctgggcaaacgtcttgccctgggacgggatgtaaaacagcgggtcgtagccaaagcccgcgtcgccgtgcagggcccgggtgatgacgccggggcacgtgccttcagcctcgatccgcctgccatccggcagggcgcagcacagggcgcagacgaagcgggcttcgtcggggacaccttgcagggcggcgagcagcttttcattgcggtcggcgtccgtcttgcaggccggcgcgccgtagcgggcggagtagacgccgggggccccgcccagggcatcgaccatcaggccggaatcgtcggcgatggcggcaaggccggtggcgtggaggacggcgtcggctttcaggcgggcgttttccgcaaaggtcgcccccgtctcgtcgacgtcgatttgaacgcccaggtcccgctggagcagcagctccacgccatagggcgcgaggaccgcctgcagctcccgctgcttatggacattctggcttgccaggacaaatttcatacctgcttctcccctccccgggctcacagcagcgcctggacaaagtcggcgctctggaagggcataagatcgtcgatctgctcgccgacgccgataagcttgacgggaatttgcagcgtgtccgccacggcaatgacaatgccgcccttggctgtgccgtccagcttcgtcaggacgatgccggtgacgtcggcgacctcgctgaattgcttggcttggagcaggccgttctggcccgtcgtcccgtctaggacgagaagcgtctcgcggctggcgtcgggcagctctcgggcgatgatcttggcgatcttctgcagctcgttcatcagattctgcttgttatgcagccgcccggcagtatcgcagaggatgacgtcgcaatggcgggccttggcggcgcagatggcgtcgtagacgacggaggccgggtcagccccctcgccctggcggatcagctcgacctgggcgcgcttggcccagatctccagctgctcggcggcggcggcgcggaaggtatcggcggcgcagaggaggaccttcttcccctgctgctgcagctggtgagccagcttgccgatcgtcgtcgtcttgccgacgccgttgacgccgatcatcagaatgatcgacggctgggtctcgaggttcaaatttaaattgccgacctccagcatccccgtcaaaatctcccggagggcggccttgacgtcctcggcggatttcaagcgctcggccttgacccgggcccggagggcgtcgacggccttgacggcggtgttcacccccaggtcgccgaggatcaggcattcttccagctcgtcgtaaaaatcgtcgttgatctccgagaaggagaagacgctgccgaggctcgaggccattgctttgcgggtcttcgtcaggcccgatttgattctgtcaaaaaatcccatgggtattcctcatttcttttccagtttcaggatctgctccatctggttcaggtccaggtggaggatcttggagacgccctgctcctgcatcgtcacgccgtagaggacgtccgccgcttccatggtgccgcggcggtgggtcacgacgatgaactgggtcttgttgcagaaggtgcgcagataattggcgaagcgctcgacgttgcgatcgtccagcgcggcgtcgatctcgtcgagcatgcagaacggcgtcgggcggaccttcagaatcgcgaaatacagggcgatggcgacgaaggctttttcgccgccggagagcagcgtgatcgtcttgagctgcttgccggggggctggacgttgatctcgatgccgcaggcaaggggctgggacggatcgtcaagagaaagcgacgccttgccgccgccgaacatctccgtgaaggtctggccaaaataggtgttgatcttggcaaactccgttgtgaagatttcggtcatctgggtcgtgatgtccttgatgacagcaaggaggtcgttcttcgcgtggacgacgtcgtcgcgctgctcagacaggtactggtaacgctcgttgacgcggtcaaattcttcgacggcgccgaggtttggcgtccccaattggccaagcttgcgtttgagctcggcgatgcggcgctgggcggcggccggcgattcgatctcggcaccggcgtccggcgcggtggagcgggtgagctggtaggtgtcccacagcttgtcgatgatctgcttctcctccagctctgccgagagctttttctgctccaggcgggcgcattcacgctccatatttaaaatgtccttgtttttctcctgggcgccgcgctcggccttcgtcttctgctcctccatggccttgcgggcttgcagttcggcctgcagggcctggcgggcggcggcgagggcttcttgatcggcggcgtgcttgccctccaagtcggcgcaggacgcgttttgggcttggagctgggcttggtattgggaaagcagcttctccttttcggcccggtcgccttggagctgggcttggagctgggtcagctgggcaatggcgtcgcgctgggtcgtcccctcggtatctaaggctgagatggcgagcttcaggcgtaaaatttcatcggaggtcttggcgctctcgtcgctggcggcggcctcgtcggccccggcttgggccaggtcggcggcaccggcggcaatctcctgagagagcgtgtccagctgggcgcgcagggcggcgcatttggcgtcgcaggcatcaaactgggtctgggcggcggcggcctcccgctgggcggaggccatggcggcggtgatggcgtccagcaggaccttgtgctgctgctgctcgccggtcaagcggaggacctcgtcctcctgctggcgaagctgcccgctggccgtctcgcattcaaaggcggcttcctccgcggcgcggatggcttcgcggagctggcggtctaaattctgctgattcgccgtcatctcctccaggcgctggcgcaggcgggaaagctcgttggcgcgggtcaggaagcccgcggaccgggcgacggagccgccggtcatggagccgccggcgttcatgacctggccgtccagcgtcacgagcttgaagcggtgatggaaacggttggcggcggcgatggcgctggtgaggtcccgcatcacgacgatgcggcccagcagatagcgcatgacgccggtaaagcgcgggtcataggtgatgaggtcggcggcgatgccgaggaagcccggggtctggtccagtccctgctcccgaaggaggctgccctgcatcgtatcgacaggcaaaaacgtcgcgcggccggaattttgccgctttaatagctgcatggcggccttggcgtctgcctgggtggcgacgagcatatgctgcatcccgccgccgagggcggtctcgatggcgacggtgtagtcatcctccgtgcgaatgagctgcgcgacggtgccgtagacattgtgcaaaacgccctggtcccgctggtgcatgacggtgcggacggcttcggagaagcccttgtaggcgcgctccatgtcctcatacaatttgacctgggcctggagtgtgctgcactggacgcgctgggcatcatactgctcctgcagctgctggcgcttggcctggcggctggtgcggcgcagctcgtagcccgtcagggcgtttttcgtgctaacgacggcggcgcggcccttttccagcgcatcggcgcaggcggtggcctgggcctgggcttgggccaggcggccggcggcagcggcgctgtcgcttgcctgctgggcgcgggtctcggagagctgctggcgctgggcctcggcagcgttatagtctgcttgcagcccggcttggcgggcctggcggtctgcctgggcgctgcgaagggtcaggttccgctgggccaggcccccggcggaggcgacggcggcggcatagctggcttcggtcttggccagggcctggcgctgggcgtctgcctgggcggccaggtccttcacatgctgctgacgctgggcgatctggctttcgattcccccggcgcgggcttcatgggcggaaatttcctccgcgatgcggtcgatattcgatgccgtattctccgcctggctgcgcaggacggaaatttgccccgccagctgctggagggccgattcctgggcgccgacgcctccagtgccaggtcccgctgctgcagcgcctgctgcagggactcggccttgcgatagagggcgtccagcgcgtcgtgctcctggcggaggatgaagttggcggaggtgaagtcctgctcggccttgcgggccgtggcggtcagcttgtccagctgctggagccagagggtgacctgcaggcccttgagctcgtcgcggtaggcgaggtatttttttgccttctccgcctgctggcgcaggggctcgacttggagctccagctccgtgatcttatcgccgatgcgcaggaggttctcatccgtcttggccaggcggtgctccgtctcctccttgcggtggcggtatttggagataccggcggcttcttcgaaaatttcgcggcggtcggcgcttttcagggagaggatctcgtcgatccggccctggctgatgttggagtagccctcccggccgaggccggtatccataaacagctcgttgatatcccgcaggcgggcggactgcttgttgatgtaaaattcgctctcaccggagcggtagtagcggcggg

SEQ ID NO: 4057 - DNA, 32759 bp, Unknown
  16S sequences of unknown bacteria
gcattttttgcagagcaaacgcttgcgtttgcggtaaaaatgcattcccgtcccggtcgctggccgttgaaggccgcgaagcggctagaggcgcgagcacacgcagtgcgcagcgccggaacactgggccgcctacggcggcacagtgcgaagacaagcggccgggtaatcctcgttgacaaaccaaaggtttgtcaacgatcagagccttttgggcgctgccgcgccgcataaaaggatgcgtacgaagaccgcgccgtggatcatcagcgttccctgtgtcaatacgtcgggccgtattcgatcacgccgccggaggcgcggtacgtgctgcggcacagcggctcgcgcgaaatctcattgccgtccgcgtcgagatagaccttgtaggcttcggcgcggtaaccggtgcgcgcgtcttccaccaccacttgctcgccgggcgccaggctggagttgggccgcatttccggctgatccggttccagcgtttcggtggtttttgcctcgatgatgatggagccgccgttttcaaacagcttgccataaatcgagatcaccacgcgcttgttttccgtgacctcggccacgatccagatgggatcctgcgaatcattgcggaatttgaggtcggtatccggccagttgaccgccgcgtccttgccgcgatccacatacgaaaccgggcgcgagtgcgggctgcgctccaccacggtcatatccgccttcaccgccgcgttgaacagcgtggtggaaacctggcaaatgccgccgcccacgtcttcctccaccaggccattgacaaacgcgggcgcggatttgtagcccttgtccgtggtgcgcttgcccagcacgccgttgaaagagaacgtttcgcccggatccagcttgaggccgttgatcgtgctacaggcgagcgcgatgtttgaaagccggttggaactggacgaggaagcgttggtggtcgcgctatcgatcaagccgtatttggcgctcagctccgccactgtggtggtcggctgcacgagggaaacctgcgcgctgacgctgccgccgccattggcaaaggcggagagcacctgcgatttcagcgcgtcggcgtccaccgcgtaacccgcctcgccctcggcgaaggtaaacgtgagcgtctgcgcgtcaaaccccgtgacatgcgcgtcagtcgcgcccgcgttgaccgtggcggccagctcgtctatgcgcgccccgactttcgcctcatccacgatggtgcgctccaccgccagatccgcgcccacgctggcgatgcgctggatctcctcatagcggctctcgatatcgccgccgcgccccagttcgaacgcctggcgcagcacctcttcataattgctcgcgtagccaaaatcgctggccgtgagggtatattgcgatccattgaggtccactgtcaccgtccgcccggcataggtgggctccacgttttgcgcccagtgctcgagcgcctgttccagcgtcgcgcccgccatggagatgccatccacataaatgccggagtaatacgtttggctctccaccttagcgcgcatatcccgatagcggccatacgcgccaatctgctggtaaacgaacagcccggcgaccgccagaaccaccagcgaaagcgcgatgaccggcgcggcccaccagcagtatttttcctttttgcgctttttcacgggcgctgtcctccccctgttgccatactgcgcccgaaccggcgctttcgcgcgctccggcgcgcgcgcagccgttcgcaccggcgcggcggcggatttcggcgcgctgcgcacagctcgcgcgtccgcacttgcgcgggcggaaggagggcgctttgccgcctgggcggcgctgcccgcgcttcgcgcgggcgtgcgggactttcccgcgttcgtggttccagtgtgcatgaatcgctcctattgcttttgttggtctttccgccccgttccgctctctccttcagtatgccgcggcgcgtcgttcaccattccgcgcgcggcgcgaattttgcggatttcgcgctcaaaaccttcttcgctgggcagataatacggcatgccagaagcttccagcggcgcgtatacttgtttgacgtaatgcccggggaaatcgtgcgcatacagatagccttcccccgcgttaagtttttcgtgccccttataatgcgtatcgcgcaggtggatgggcaccggctggaagccgcccttttgcgcatcctccgtagcgcggtcgatggccatcaccacagaattggatttggggctttcgcatacggcgatgatcgcctgcgaaatggacagccgcgcttccggcatgccgatggtttccagcgcctgtgccgccgccacggcctgcaacatggccatgggattggccaggcccacgtcctcgctggcgtgcgcgatcacgcggcgcacgatgatgcgcggatccatgcctgcgtaagtcatgcgggcgaaccaggccagcgccgcgtcgctatccgagccgcgcagcgatttgcaaaacgcgctgagcatatcgtacagcatggattcgtcaaagcgcaaaaccggcttctggatggattcctccgcgatggccagcgtaatgcgcgagaccccgtccgcgtccatgggcgtggtgagcacggccagttccagcgcgttcagcgccgcgcgcacgtctccattggccacggaggcgatgtgctccagcgcgtcctcctcaatggcgaccttctgccgcccatagccgcgctccggatcggcgatggccgcgcgcaccgcgcgcttcacctcgtccttcgtgagcgcctcaaagcggaacaggcggcagcgcgacacgatggccggcgtcatggcgatcatggggttttccgtggtggagccgataaaacggatggtgcccgcctcgatcgcgggcaggatggaatcggactgcgccttgctccagcggtggcactcgtccagcaaaagatacgttggccgcccatacatggaaaggcggctttccgccgccttgatgacctcgcgcacgtccgctacgccgctggtgacggcgttgagcttgacgaattcgctgcgcgtttggttcgcgatgatggaagcgagcgtggttttgcccgtgccgggcgggccccagaagatggaactggtaagccggtcggcctcgatggcgcggcgcaacagccgccccgggccgacgatggcctcctgcccgatgaattcctgcagcgtgcgggggcgcatgcggtcggccagcggcgcgagcttctggttctgcgaacggtcataggtgaaaagatccatacattcctcccgcgcgcggcggttacacgttgatttcgcccatgcccgccatggcctgcgcgctcgcgaggatgggatcgacttcctgaaggataaaggtttccgcctgctccggcgcgcggcccacataggcggaagcatccagcaattgggtgagttcctcgtgccccatggggaacgcgctatcgcccgcgatgcgctcgagcaaatcgttgtccagcccatcgcgcttcatgcgcgcggcggcctcctgcgaatgcacgcggatgtgctcgtgcagttcctgccggtcgccgcccaggcgcacgccctccatcaggatgttttccgtggccatgaagggcaggttctccgcgatgtgccgggcgatcatcttgggatacacgaccatgccgcccgcgatgttggcgtacagttcgagcaccgcgtccaccgaaaggaacgcttccggcaggctgaggcggcggttcgcgctatcgtccagcgtgcgctcgaaccactgggtgctggcggtcatcgccgcgtccatgggtaaaagcatggcgtggcgggccagcgcgcagatgcgctcgctgcgcatggggttgcgcttataggccatggccgaagagccgatctgcccggactcaaacggttcctccacttcgcgcatgttctgcaacagccgcagatcctgcgcgaatttgtacgcgctctgtgccacggcggaaaccgcgctgagcacgcggctatcgtacttgcgcggatacgtctgcccgctcaccggatacacgcgggaaaggcccatcttttccgcgatgcgcttttccagctcgtccaccttctggctatcgccatcgaacagggcgaggaagctcacctgcgtaccggttgcgcccttgttgcccagcaggcgcattgtattgaggcaatgatcgatgtcctccagatccatgagcagatcctgcatccacaggcaggcgcgcttgcccacggtcgtgagctgcgcgggctgcaggtgcgtgaagcccagcgtgggcaaggcgcggtgttcccaggcgaagccgcgcaggcgccgcagcacctccaccaccttttcgcgcacgagccgaagcgcgtcgcgcagcataaggatatccgcgttgtcggtcacatagcagctggtggcgcccagatggatgatgccgcgcgcgttcgggcacagatcgccataggccatcacatgcgccatcacatcgtgccgcacgcgcgcctcgtgccgctgcgcgtcctcatagttgatgtcgtatatgtgcgccttcatttcgtccacctgcgcctgggtgatgggcaggcccagttccatttcggattcggccagcgccacccacaacttgcgccaagtggaaaatttataatccggcgaaaagatacgctgcatttcccggctggcatagcgcgagcacaggggagattcataccggtctttcattgcaaagccctcctcagcggcggatcagcgcgtcgcgctgcgcgcccacggatacatacgaaatggggcagccaatttcgcgctcaatgcgctccacgtagtcgcgcgcttctttgggcagctcgctataggtgcgcgcgccggaaatatcgcacttccaaccgggcatggtttcatacaccggctcgcaggcgtccaactcgctggtgtaggggaaatcgcgcgtttccccatcacccttgcgataggccacgcacaacgggatctcatccagatatgaaagcacgtccagcttggtgagcacgatctccgtggccgcctgcagcttcgcgccatagcgcgtggccaccaggtcgatccaggccacgcggcgcggccggcccgtggccgccccgtattcctgcccggcctcgcgcagcgcgtcgcccgcttcgccaaacaactcgcccacgaacgggccctggcccacgcaggtggaatacgccttcaccacgcccaccgtcctgtccaccttcagcgccgggcaaccggagcccaccggcgcgtaggccgacagcggcgaggaagaggacgtgtagggatagatgccgtaatcgatatcgcgcatcgcgcccagttgcgcctcgaacagaatgttcttgcccgcggcgttggccgattccaacagggcaaacgcgtccacgatgtgcggccgcagcggcgcgccatattgctcgatccacgccagcgtttcttcatacgaaatgggcggctgatggtaggcattggcgaaaaccgcgttcttccattccaccagttgcttaaggtgctttttcagcgattcggggtgcagaaggtcgcccatctgaatcgctttcttcatatatttatccccgtacaccggggcgatgccgcgcttggtggaaccatagcccgccttgcccagccgctgctcttccagcgcgtcctgcagaggatggaagggcagcaccatgatcgcccggtcggaaattttgagattgtccggcgtgatggtcacgcccttctggcgcaggttcgcgatttccccatcgatgtgcttgagatcgatcaccgtgcccgcgcccagcaggttcactgtctcggggcggaagatgccggagggaatcaggttgagcttgctctcgccgaattcattgatcaccgtatgccccgcgttgttgccgccctggtagcgcaccaccacatcgtattgttccgccaggaaatcgaccatgcggccctttccctcgtcgccccagttcactccaacgattgcgcaagtcgccatcattccataccccatttccgttcgtgtgcgggaaaaaatcttcccccggttttgcgcgttatacgctgtttttcattataacatacgcgcggcccattttgcattaagatttcaaaatagatctgcggtaatttgccatatcaacccatttgccgcagcgccaggcgcaccagttcgtccgcccggtcggactggtccgccacgcgcgaaaccaaccgggccgcgtcgctcgccgtgtagcccagcgccatcagcgcctcaatggcctcgcccgccgcgtctcccgccgcctgcgcgggcatggcggccgcccctgcgccggtgagcatgccttcctccaccttatcgcgcagttccagcaccaagcgctgcgcggtctttttgccgatgccaggcacgcgcgtaagcgccgtggcgtcccccgcggccagcgcgatggaaagatcccgcaacgacagggcagaaagcacctgcatggccatcttggggcccacgccggataccgcgcgcagccgctcgaacatggcgcgctcctcgcgcgtggcaaagccaaacagctccatcgcgtcctcccgcacgctcaaaagcgcgtacaccttcatgcgctcgcccaccgcgggcgcggcggaaagcgtggtgttgctcacctgcagcaaatagcccacgccgccgcaatcgatcaccaggctacccgcctgtttctccgaaacgaccccatcgaaatgagaaaacatacagccatttctcctaattatacaattttgaacagcgcgcccgcgcgcatactgtgtgcgtgcgtgatcgccacggccagcgcgtccgccgcgtcgtcgggctttggggtttcccgcatgctcaaaatggcgcgcaccatggcctgcacctgcgttttatccgcccggcccgtgcccgtcaccgcctgtttcacctgcatgggcgtgtattcatagagttcctgcgtgtagcgcgcggcagccaccagcgccgcgccgcgcgcctcgcccacggcgatgcccgtcgttacattcttggcgaagaacagctcttcaaaagcgatttgatcgggcttgtaaatcgcgagaagctgctccacgcccgtgtgaatcgaaagcaatcgcgaaggcataggcgtctttgcctcggtcgtcagcgcgccatattgcaccaggcgatggcgggagccatccgtttcaatcacgccatagcccataatcgccagccccggatcgatgcccaggataatcatgccattcccctcccttatcccatgccttccatgatacgggaaaagttctcgcttgtcaagaagatttaacgggaaatatcattgtatttttatacacagcgttgtataatacggacatacgaaaaaatttcgggaggcaacctatcatggcgaaggaaaaagtggtgctcgcgtatagcggcggtttggatacgaccatcatcatcccgtggctgaaggaaaattacgattacgacgtgattgccgtcgcggtggacgtgggccagggcgaagagttggaacccttgcatgagaaggccaagaagtccggcgcggaaaagctctatatcatcgacgtgcgcgaacagtttgtgaccgattacatctggcccacgctgaagatgggcgcggtgtatgagcagaaatacctgctgggcacgagctttgcgcggcccatcatcgccgaaaagctggtggaaatcgccaaaaaggaaggcgcgaccgccatttgccacggcgcgaccggcaagggcaacgatcaggtgcgctttgaactgacgatcaaatccctggcgccgcacatgaagatcatcgccccctggcgcatctggaacatcaagagccgcgaggaagccatcgattacgccatggcccgcggtctggacgtgccggtttccaaaaagcgcccctacagcatggaccgcaacctctggcacctcagccacgaaggcgcggagctagaagacccgtggaacgagccgccgaaggatctgctactcatctgcaaaacgcccgaagaagcgcccgacgaggccgaatacgtggaaatcgaatatgaaaagggcgtgccggtgaaggtgaacggcgaggccctgggcccggtcgccctgatcgaaaccctcaacgccatcggcgccaagcacggcgtgggcgtggccgacctggtggaaaaccgcctggtgggcatgaaatcgcgcggggtatacgagaatccggcgggcaagatcctcttcgactcgcaccagattctggaaaccatcaccctggaccgcgccaccgcgcactataaggacatgatggccatccgctttgccgagctggtgtacgacggttgctggaacacccccctgcgcgaggccatgagcgcgtttgccgattccacgcagcagaacgtcaccggcacggtgcgcgtgaagctctacaagggcaacgtgatccccgcgggtgtgaagtcgccgtattccctgtatatggaagaaatcgccaccttcggcgattccaaggaactgtacgaccacaaggacagcgcgggcttcatcaacctcttcggcctgccgctgaaggttcaggccatgatgaaggagaagaacgcgaaatgaagttgtggggcggacgctttgaaaaggccaccgatcgctcggtagacgatttccactcgtccatctcctttgatcagcggctggccgagcaggacattctcggctccattgcgcacgccacgatgctgggcgagcagaatatcattccccaggccaacgcggataccatcgtgtcggcccttgcccatatgctcgaggaagtgcgcgcgggcacgctggccttttccgtggatgccgaggacatccacatgaatatagaaaccatcctcaccgagcgcatcggcgaggcgggcaagcggctgcacacgggccgcagccgcaacgaccaggtggcgctcgacgtgcgtatgtatgccatggcggccatccgcaccgcgcaggaaaacctgcgcgcgctgatccgcgccctactctccattgccagggaaaacctctataccgtgatgcccggctacacccacctgcagcgcgcgcagcccatcacgctcgcgcaccacatgatggcctgggtggaaatgctgctgcgcgatatcgagcggctaaacggcgcttacgcccgggcggacagcatgcccctgggcagcggcgcgctggccggcaccacctatccgctcaaccgggagcgcgtgcgggagttgctgggcttttcccagatcacgaacaactcgctggacggcgtggctgaccgggattttctgctagaatacctctccagcgccgccatctccatgatgcacctttcgcgcttttgcgaagaggtgatcctctgggcaagcgcggaattccagttcatcgagctggacgacggctttgccacgggttcttccatcatgccgcaaaaaaagaaccccgatgtggccgagctgatccgcggcaagaccgggcgcgtgtacggcgatttgatggcgctcctcaccgccatgaagggcctgccactggcctataacaaggacatgcaggaggacaaagaggcgtttttcgacgcgcacgacaactggatgaagtgcctgaccactttcaccggcatgatgcagaccgcgcgcttccggcgcgagaagatggcgcgcgcggccgagggcggctttaccaacgccaccgacgcggcggactacctggtgaaaaagggcacgcccttccgcgaggcgcacgaggtggtgggcaagctggtgctgcactgcctgaaggacggcaaggccatcaacgacctgtcccttgccgagctccaggagttctcgcccctgtttgcggaggacgtgtacgaggcgatttccatcctcgcctgcgtcaaggggcgcaacctgcccggcggccccgcgcccgaagcggtggaagccgccatcgcccaggccgaagcaaggctggaacggctataggctatgaatttttctcccgggttctgcgcgcagatcccgggatttttttattcttttgcgccaaacggccgattttgcttgcggcccgggcaagaatgtgttacaatcgcattgaggtgatctatgtgaacaggccgaacatccttctcatcatggcagaccagttccggggcgattgcctcggcatcgacgggcaccctgacgtgctcacgcccaatctggacgatctcgccgcgggcggcattcgcttcacgaatgcctattccgcctgccccacgtgcatccccgcgcgcgcggcgctctacaccggactgagccaggaacaccatggccgcgtgggctatgaggacggacagccctggcgctacgcgcacaccatggccggggaactttcccgggccggataccaaacccagtgcgtgggcaaactgcacgtacacccgctgcgcaaccgcgtggggttcgacgcggtggaattacacgacggctttttgcactactaccgcaaggccaacctgccctatgcccagagccagtttgtggcggacgattattaccacttcctgcgcacgcaactgggcgcagagcgcgacatcaccgaaaccggcatcgactgcaactcctggctttcgcggccctggcccatggaggagcgcttccaccccaccaattgggtgacggaccgcagcatcgactttttgcgccgccgcgaccgggacgtgcccttcttcctgatggcttcctacgtgcgtccgcatccgccgttcgacgcgccgcagtgctatttcgacctataccgcgaccgcgacttgcgcgcgcccgccagcggcgactgggacgatgaggagcgcctgcgcgcgggcggccgtttcatcgcttccacctccgggccaatcgatcccaagctggtgcgcgaggcgcaaatcggctattacgcctgcatcacccagctggatttccagattggccggttgatcatggcgctcatcgacgacgacctgctagacaacaccatcgtcgtgttcacttcggatcatggcgaactattgtgcgaccaccatctctatcgcaaaacgctgccttaccagggtgcggtgcgcgtgccgctgatcgtgcgcggcctaccggggcggcggggcgagacggatccgcgcgtggccgaactgcgcgacgtgatgcccacgctgctttcgctcgccggagccgaaccgccgcccatggacggactgaacctgctgggcgaagaaacgcgcgcctggctgcacggcgaacacgccggcggtggggacgattccaaccactacatcgtcacgcaggcagacaaatacgtgtggttctccaaatcgggccgcgaacagtatttccacctggccacggatccccaggaagcgcatgaccgcattgccgatcccgcctgccaggcgcgcatcgccgagctgcgcgcgcatctgatcgaatcgctgcgcgggcgcgaagagggctatgtgcaaaacgagcgcctggtgccgggccaaaaagcccgcaatgtgctttccaccttgccgagggaataatccgccgctctggcgccgggcaaattgccacgcgcagcttgtcaaaaaagactttttgacaagctggtggacgggagagcaagcgccccacaattcgcaatggtcgtcctgctgcgcctggcggcttgcagtacttccttgctcattgggcttacttcgcgctgcttcgcccacagggcgcgcgcttcgtgcgcccccgccactgccatcctcaattcgcaatggtcgttccgcgtcgtgcgcaaagcgcactagcggccctcccttgctcattgggcttactacggcctgtttccgccacaggcggcggccttcgtgcgcccccctaccagtttccgctaaaatcctacggattttcgggcgcggaaactgcaaggaaacgatttttgctctggaaaatgggattttccggcgcaaaaatcgccccgtccccgccgtacacgccgccgggaacgattaaagcgcgaaagggcttcggccctctcgcgctctcccttgattttttggcagtctattgcccggcggttttttgcgcgtatcttttcgcaattcccagaaaaacgcgccccaatgcgcttgattcgcgcgggcaaatcggttataatatagcggaatagaagagtatcggaggctgcatatgccactgtttgaatttcggtgccccaaatgcgggcacaaatttgaggcgctcatgagcgcgcagcgcgtgaaagacgcggtgtgcgaaaagtgcggcgcgcccgttgaacgggtttgggaagggcaattttcgttccataaaagcggttgcggcggcaattgcgcgcactgcgccggttgccacgcgcacgagaggtgactatggcgggagagaaatttctcattcacggcggcatgcgcctggaggggcaaatcgcggtgagcggcggcaaaaacgccgccgtggccatcattcccgccgcgctgctgggctcttcccccagtgtgatcgaaaatctgcccgatattgaagatgtgcatgttttgatcgaaatgctgcgcgcgttgggcgcaagggtggagttcaacggctccgtgatgcgcgtcgaccccaccacggtggatagctatgccccgcccgcccacctggcgcagcggatgcgcggttcctattacctggcgcctgtgctgctggggatttttatgcgcgcggaagtacccatgcccggcggctgcaacatcggcacccgcgccatcgaccaaaccatcaagggtatgactaccctcggcgcgcgagtcgatacgctaggcggcgtgatcgatgtgaaaagcgattcgctcttgggggccgaagtgtacctcgattgccccagcgtgggcgcgacggtgaacaccatgctcaccgcggtatccgccacgggcaccaccatcatctataacgcggccaaagagccgcacatcgtggatttggccaattttctcaacagcatgggcgcgcgcgtgatgggcgcgggtacctctattatccgcatccgcggcgggcgtccgctgcacggttccaactataccatcattcccgaccagatcgaaaccggcacgctgatgatcgccgccgccgccacggggggcgatgtgatcatcaccggcgccattcccacgcacatggaggcgctttccgccaagttgctggaaatgggcgtgtacatccgcgaagaagacgatttgattcacgtgcgttccaatggccgcctgcgcgccatcagcgtaaaaacgcagggctatcccggcttccccaccgatttgcagcagcccatgaccgcgcttttgaccgtgagcacgggttccagcgtggtgacggagaacatcttcgattcgcgctttaagtacgtttcggagttggaacgcatgggcgcgcgcatccgcgtgatcgacaacaccgccatcatcgagggcgtagaccggctggtgggcaccagcgtacacgccacggatctgcgcgcgggcgcggcgatgatcgtggccgggctgctcgccgagggcgagaccgtcatcagcggcgtggcgcatatcgaccgcggatatgagcggctggaccacaagctcaatctgctgggtgcaatgatcgagcgcgttcccgaataggccgctgcaggacaatcgcgcgtcgcttttttgttcccgggcaaatatcttattccgatttgcaggacttagtttttaattgcataatcgcatcatcttatgactcataagtttccaacccctccgtcacggcaccagctgactgaggggttgttttttgcacagccttgtccgcaccaggccaccggacagttctccccttccatttctaggataccgccccacatttgcgaatgcaatattcaaattttcccattcgccggcattgaccaacgaggtatttcattatggcctcgccacgcccattgttttatattaaattttaaaacaaatatataacatatatgtataatcgtcattttatacggccatcattgcagaatttttcaatcatcattttcaatggttgcaaaaatcgtcctttccacgcaaccgacaggctatgccaataaaatgcgaaataccctctctactgtgtgcgaaatttgatttttcccgtattcttcttttacaaagtactgctatgctatttttgcaaaaggagggaacgccacaaggaagccccgctcagtgcttgccttattccaaatgccaacacgcgcaggggcgaaacaaatttttatggttctaggaaatcccctaaaagtatctggcacacgtcaaacgtaaggaggcaacatcaatgcacaaaagactcatcgcccttctctcgctgctcctggccatctccctgttcgccggttccgccatggcggaaagcgatctgctgaacgaatttggcactttccccatcatcaaaaatggttccgacattaccatcaccattggcacgccggccattgccaccgttaccgattacgacgacaaccacctcaccaattactggcgcgaacgcctgggcatcaacatcgaagtgcagctgttcgacaccaacgaatacaaaacgcagttgcagctgatgaccagctctggcgagcgcctgccggacatcctggtaaactttgccctcacccccaccgagcgcgaaagctatggctcgcagggctatttcctggatctgctgccctattttgaggagcatgagctaacccgctacttcgatagcgaagccgcctcttacctcaccgaagcggaaaaagcgacgacgatctccgcaggcctgtcctccaatggcgcgctgtacgcgttcccgttctgggcggtttccgtggcggatccctggtccaatggccttttgatcaacaacaccttctgcgaggcgctgggcatggaaatccccaccacgctggaggaatactacaactacctggtggccgtgaaggaacaggatcccaacggcaacggtatcgcggatgaaatcccgctggtcggctttgccaacagcggcaacggcgatgtaatcatcaacctgctgaacgccttcacctattatccgaacacctggaacggcgtggccctgtgctgcgacgatgagggcaacatctatgtgccctaccagaccgaggaattcaaggaaggcatgaagttcatcgccaagctgtacgccgaaggcctgatttccgatctgagcttctcccaggatcgctacggcctgcaggccatgacggatctcaccggcgacgcgccggacatcgtgggttccgccatgtcgcaccgctcctacatgttcgcctcgcactcctccgcggagcgccgcacgcactacacctccatcggcccgctggtgggcccggaaggcgtggcctatgccgcgacctataaggtggagcccgtgtatgtgaacttcatcacggccgattgtgaaaaccccgatgcggcctttgccctgctcgattacatgaccagcacccactccaccctcaccgcccgctatggccgcgaaggcgaatactggcgctatgtgaccgaagaagaggccgcccgcggttccggctgggccaacctgggctataccgacgccctgtacaccacctccggcatggaacttgcctggggccagcagaccaacgaaatctggaacatcacctgcatcacctggcagccgcagggcttcaccgcgctgacgcccgccgccaccgacgattcctacgagagcgaaaccgccaagtacaattcgcaggattggaacaatgccatcatggcgcgctatggcaaggcgcccaagaacctggtgggcaccctggcctataccgcggaagagcaggccatgctcggcacctcggaaaccgacatcggcatctatgtgcgcgagtgcatgacccgcatggtgctcggcgagatggatatcgacgccgaatgggataccttccaggccaacctggaggccatgggcctgagcaccgtgctctccatcgcgcaggccgcctgggatcgcgtgaactgatccttcgcaaaccggcgattcgcacaaccgcgcaggattccctctgcccgcgagggtggagggaatctttcatccgatagcccgataaccgcgccggtttatccggcgaaagcgaggtggaaattttgcataacaacgcggtgtcttttcacgcgcctgccaagcaaagcctgagaaagcgcgtttgccagcgttggcagttgtttttgtttttgctgatccccgtggcgtgggtgctgattttctgctattatcccatgatgggcgtgcagatcgctttcaaaaattatttgccgcgcgaaggcatttggggcagcgcatgggtggggctcacccatttcgtcaccttctttaagtccttctattttagccgcaccgtgggcaacaccgtgcgcctttcgctgtattcgctgggcgtggggttcccgctggccatcatcttcgcgctgatgatgaacctcatccgccgcagacggtttcagaaagcggtgcagacgatttcctacatgccgcacttcatttctaccgtggtgctggtgggtatgatgaaccaaattctcaatcctgtcaccggactgtacagcaacatctaccgcctgttcaacccgggcgaatatcccatcgatatcctttcccgcgccaatgccttcgatcacctgtatgtatggtcgggcatctggcaaaacctgggctggaacaccatcatctatatggcggcgctttccggcgtggatcccgcgctgcacgaagccgcgcaggtggacggcgcttcgcgtctgcgacgcgtgtggcacattgatctgccggtgctactgcccaccgcttccattatgctgatcatgaacgccggtaccattatgtctgtcggttttgaaaaggtttacctgatgcaaaactccgtaaactccgtgtattcggaagtcatctccacctatgtatacaaaaccggcctgggcggcaccaccaaccaaatgtcttacgcggcggccattggcctgttcaacaacgtgatcaacggcattttgctgctggtagtgaattttgcctccagcaagctctccggcggcgcccacagcttgttctagaaagggggaaaatgtatggcagaaaatcttgtccggcggcggatgaaaagttcgccgggcgaccgggttttatacacggttgtatataccatcatcatcgtgtttttgctcctcgtgctctatccgatcatctttgtgatttccgcctcgttttccgaaggcacggaagtgcagctggggcatgtctacctatggcccgtcaaacccacgttggaagggtacaacgcggtattcagccacaggaatgtgctgacgggctatcgcaacacgattttctacacgctggcgggcacggccatcaacgtcgtcgtcacggtgctatgcgcttatccgctttcccgccgggatatgcccatgcgcggattctttatgttcctgtttgtgttcacgatgttcttcagcggcggtttaatccccacgtatctgctggtgaattcgctgggcatggtcaacaccgtgtggtcgctattgattccgggggccatgagcgtgtataatatgatcatcacccgcacctttttccagaacaccgtgccgaaggaattgctggaagccgcgcagatcgacggctgttcggacgcgcgctatttcttcaatatcctactgccgctgtcgcaagcggtgatctcggtaatcgcactgtactatgcggtcggccactggaattcttatttcaacgcgctaatctatgtgcgcgacgcgcgcctacaaccgctgcagctgattttgcgcagcattctgctctccacccgcgtatcgctcaacgagttcgaagaccccgatctgctggccggcaaggtgggcctggaattcctggtgaaatacgcgctgattgtggtgagcagcgcgccgattatgtgcctgtatccctttgtacaaaaattcttcgctaagggcgtcatgctcggctccgtgaagggctgacgcgccgcacccatcaaaaaggaggaaaaaaacatgtatcgaggagttgccatttggaactacgcgggggacgccgtggaaaacgcccagcgctttgccgacgcgggctttgacgccatcagctggaacgcaccgctatttgtggaccgctacacggacgatgaccgcgcgcgcgtagccgaatatctcaagcgttccggccagtatctcacgatgcacaacctgctgcccagcccctacgacccgcaagagatcgcttccgcgcgcaaggcctggcgcattctggccgattggcacgacaaataccacctgctccacggcatgaccttcgatttctggcacccgcacgacgaccagctccccctgtaccgcgaatgcctagaaatattccgcggcaagggcgtgttcctggcgtgcgaagatacgccgctcaacgcgcgcacgatggaaaaattcgccaagtacctcacgccagaagacgacgtgggcatcctcatcgacctgggacacatgaacgtgcgccagtggatgaatgaacggcacgagcccgaagattttctgcaggtgttccagcagttgcccatgaaggtgcgcgaactgcacctgcacgacaacaagggccgcaaggacgaacaccgcgaagtgggttatggcaatttgcccatgcgggccgtggtggacgcggccaaggccattggcttcgatggcatcgtgacggttgaggtgaccaacagccagggctggagcctggacgagcacattcgccacgccatcgaaacctcccaaagctttttcagcctgctgtaaaagcatttgagcaaaagagggctgccttcccaatggaggcggcccccctttttgtagaacattgcgcgctacccggatatcgcaaagcacaaaaaagctattcgacgcgagtccacacacccttccaggcgatgcgtggccgttccatgagcccatagggcctgagcacatattctggatcaatgcgggaatcggctcgctggaaaaaagtccaatccacccatacgttctgaccgcccgtttgatgaaacaaccccagcagattgcgctggctacccataatttctatatctatgtggttttcccctttttccaaaaaggcacttatctccagcccatctgcgctatgccaagggatgcttccggcggagcgcccattcacgcgaaccgacgcggttacgccttcatagcagcccagaaagagccgcgctccggcagagggctttcctctaaacgcataatggtagcaaagtccgccggcataatggaaatatccttgcaggcaccaatcgcccacccgtacaaatgccggttcttttgccacagcgcggttcgcattcacgccgaaatcgccaagcaaaaagcagtcttccaactggcatgcattgtgataccgccctgttagcaggagcacgtttctgccttttcgcaacgcgggcaaaggataagttttgatacaccgatccataaaccagccgtccggcttgagcgcgacggtttcgccgttgagaaacagggaaaacccttctatcccctccgctgcgagttggactgcggtttccggcacatccgccacttcaaaagcaaattccatttgcagccgtgcgccatcgcccgggtgcggcgcaaaaacccagcgatacctttgcggcgaaccattcgcatagatttgccgcattcccaagcttgcccgcacatggttttgcatgctccatatctgttcttcttcccgccatgggccatcgccaagccgccaccggcatgtatccagcaaaagcgcgttgggatgcgtgcgcgtgacacgggcgcgcggcggaagaaataggatctgctcttgttccacactcttccgcgggacggaggcgtgaacgccttcgttttcaagcaaatatagtgctgattcccccgccataaagcgctttgccaggcaaacaaagttcttatcccacggctctatcgcgcaatcttccatgtcgccggtcaacaaattgacagcatggagatttcccacccagctttgagggagaagaattcgcacgtcgcaatcgcgcaacgcatcggtattcacggcaaaaatggcgcggtggtcgcaatattctttggtgaggcaggcgatttcagcgcactcacaggaacgcgctgcctccagaatacgcacgcgctccggcacgagcgcctgaaccgcttccagcagcgcttctaaagattggaaggaagcatagccgtctgccacttccaaggattggagccgcttatcggctatgccttgtatacgggtaagcgcatttcctatcgtcagaaccctcccgcccttttgcaaaaattgcgcaaggagcgcaaacgtatggtcttccatgttttccaaatatggcagcacgacgatgggatagcgcatttgtccgattcgcacagcgccactttccacttcgcccatccactccaggatcagctcatcgccaaaatcgaaatccacatgcgcgttgaataacccctgtaaaagggcctccatttgcgcctgcaaagcgtcggcctgggaatcatccgtatgccagacaaaatcctgacagtagcccgcgccggtaacaccccaagcgctgctctggggatgcaataccagcaccgggcgcacagcacgcccaccggaaagcgctgcagataagcgcgcaaaataatcttccacaacggaattgtgttcccaccaaatgctgttataattgaaagtgggcggataatcccgcttcgcgcagccgcgaatggtataaagggcatggtgctggcagcgcgtgtcgatgcccatggcatagagccaatctccggcgcgcttctgcccctcgaaagtaaactcccatccagaacaaccatacatttcgcagatgctacgccgtcccagctggttggccacgctggagcactgccgcgccgtaagcaattcgcgcgcgtcacctgtgagcatatcgatgcctggcatgtgttcgaacacataatgcggcatgaccgcaccgctcatacgcgtgctggagcttaatgcgttttcccccatatagtggccagtatattgcaaatggtgcttttcacaccactgaccgatttgccgcgaatacgcctcgcaaaaacgctctgtgatggtgcgccaataatcgtgccgggcctgaaaactcccctcgcctgtgaagaaaatccacggcaacgcagaagcagcggcatatcctcgtttctccgcaaaataggcggcgaaaccctccgtccagggaatccatagcctgcctggcgaatatcgggcgcgaaaatccgcaatgttgggttcatccgtaaaaatcccccgaatggtttcgccaaaatctttttcaaagcgcttgcgatattcttcatgcgtgctgaggataaattgccgcaccgccgcgggattcaaattgtcgggcggcgcctcgttattgaaccattcgcaaggggcggaaagctcttcgcgaaaaactgcgagttgctcttcggagcgtagggcttcattttgtccaatttcacgcgcgaaaaccaaactacccttttgccattttaatgcgaaaagagccagcgcgtcgggatgatttccgccttccctgaggatttccacggtaacggctctggcgccaaaggcagcccggttggcgctttgcaccttgccgcccgcgccgccggaaggaaagcggtcctcatcgtatagccacgcctggccgcccctggctttggctgcttctaccgccgcgcgaatggcttccatccagtcctcgcccatatattccgtttccaacccttcgcgggaatgcaaaaagtaaccgcccattccatgcgccaacatatcttccgcctggcgtcgcacctcatctacttgcagatgcgcgttcaaagcgtaaaacggtagcgaccgaaattccgcgccaggacggggcaattgccgtcgcaaagcctccatatccattgaggattcctccttctcacgagagaacgggccgcgcaaaagccctcgggctggcgcggcccgcaaattctgtgtgcgaaatttaattctgggcccagcggtcgtatgccgtttggtaaatctcctcaaaccgcgtgccgcccatggccatggcttcttccacaaaactatcgaagttctcgtcgatatccagttcgccaatgataaacttggtgatctgctgatccagatagctattgagatctgttgtgatcagggcaagttcattggattcctccgcggtaaagcgcgctgccgggaaagcggttttgagatagggcacatagtgttcttccacgttcgccaggaggttatcatctggatcttcaaagtcgtagcgcgtttcctcatttgtgtacgcgtccgaaagcgtgccgaccggccacatccagggcgatacgacgtcgtgatgccaggcattccaggtatcgtaggagtcttctggccagtggcggataaattcgccatagcccgtttcatcgcgaacgaattcccagccatattccggatattcttcccattcgccgagcattgggccttcgccctcggcgagaatgccttcgtccgtatagaaccaatcgaccagttccaggagcttttccacgttttcacacttattggtgatgcacagattgtaagtcaacgcgacgtcgacgccgggccacatcttagtgctgttgaattcactcgtcagcggatcaatggcctgccactggaaccaatcgtcgaaatcggtcatatacccccactggcaccagtcggtgaaagagccgcactgcttactggcttccaccgcgatgcgctcttcttctgtggtggtaaagtaatccggattcatcagcccttcctcgtagagccggttcatatatttcaagaattccttgtagtttgggtgcgtgggcaccagcaccacatcgccatcaaagacctgtacgcgccggtccacaaagccaaaggccggaagcagccccatcaatccatcgtaatagccgccgtaagcgctgttgtactgcccatagaaaccgtattcatcatccggatcgccattgccattcgcgtcgttatcgcgcacggcaacgcagtaatcatagaactcttccacggtctctggaactttgccgatgtattcttccgcccaatcgacattcacccagaatttgctctgcgccatctgggtcggatccggattgaagccccaaatagcgtaggcatggccatccgggaagaacatggcccggtatacctccggatattcctccatctgcgccataaagttgggcatatactcttccgtgaaatactgttcaagcgggatcagcgtgccctgcgcgccatacgtagccatttccgtgggagtgatggaagtgccgaagaaaaagtccggaagctgaccgctgccaaaagccaggtttttcttctccgcaaacccttcggagcttacgttttccgattcaatgatgatgttgaattcctcttcaattttgtccattaaccactgattgttcaggtcgccgaagtcgctggtgacgcttgccatcacggtaaacgtccaggggccttcctccgccgtctcggccaacgcgcccgtggcgatactgctggcaagaatcagcgcgagaaggactgcgagggtcttcttcatgttcatatcctccatttttttatctccatagccgtataccttcgcaggagccggctaagggtttcacggttatagcgcgtcaacctttgattgcgccgatcatcacgcctttcacgaaatagcgctgcacgaagggatagagcagcagcatgggcaggcttccgacaacgcacaggccgtatttcatcacacgcgaaatctgcgcccgctccaacgcactgcggatagacttgatgtcgttcatcgaaaagctcatgctctggttttcgatcaggatttcgcgcaagaaaatctgcagaggcatgtacttgcggtcgttcaggtagatcaacgcggtaaagtaatcattccaatggcctatggcgtagtacatggcgataacggcgataaccggcgtagacagcggagtgataatccggaaaaagattcgaaaataatccgccccgtcgatgcgcgccgcttcctgcaactcttccggaatggaggaattgatgaatgagcggcaaatcagcatgttatatacggaaaacaggccgatgatcaaaagggtatagggcgtatttaccagattcaatcccaataccacgagataagtggggatcaatccgccgccaaaccacatcgttatggccaggatcacattgatagccgtgcggccgggcagttccttgcgcgaaaggccataggccgcgctgaacgtcacaataaggttcagtatggtaccgactatggtgtagtacaggctatttcgataaccagttacaatattttcattggtgaatatcagcctgtatccactaaaatcgatgcctttgggcaggagcaccacttcgcccgttgccaccaggttgggatcgctaatagaggcggaaatgacaaacagcaacggatacagcgtcacaagcccgataattacgaggagaacgtccactatgatttggaacgctgtgtccgacgatgaggaacccagtctgcgctttctcatgttcattctcctttctaaaacaggctgatgccgctggccattttggcaaacctgtctaccgcaaacagaatcacaaaattgatcacggaattgaacaggccgatggccgtagaatagctatactgagcggtgagcaaacctactttatagacgtaggtcgagattacttccgaaacggacaggttcatggtgttctgcatcagatacactttgtccattcctacattgagcaggctgccacaattcagaatcagcagcatcacaatcgtaggcataatgccggggatgttgatgtgccaaatccgctgcaggcggttcgctccatcgatctgcgcagcctcgtgcagctccggatcaatgccggaaagcgcggcaataaaaataatcgctgaactgccgcagttttgccacacaccggaaacgatatacagcgtacggaaccatcttgcctgccccataaagtctatcgactggccgccaagtttctcaatcagcacgttgacaatgccgttggagggcgagaggaaacagttcagcataccgacaacaaccacggtggagataaacagtggaatgtacgttatattctgaacggtctttttaaaccatgcgtgacgcgcttcgttcaggagcagcgcaagcaggatcggcaacgggaaagtgaatatgagggtgtagacattcaatagcagcgtatttacaatcagtttttcgaactgcatggattgtacaaacgtcacaaaatgcttgaagccaacaaaattgccgaaaaagcctgcggccggattgtaatcctgaaaagcgattacaattccgtacattggtacataattgaagatgataatgtaggcaaatgctggcaatattaatacatatagctgccaacaatgcaaaattcgcagcccaaggcccttttcttttctggttgctggattagcggtcatagcgagccattccctccttaattcgcattttgcatcgctcctatattgtaaagcgtagatgcgatatgcgcaatcagcgattttttcttttgcgctaaaacgaccaaatcgcgaggacaatgcgaaccaatcatggtgtaatttaaccttttcccgaaataggcctactgatgttcttcgctatttcgaaaattctcccgatatttgccggggctcacgccataaatttgtttaaacttgcgagaaaagcttgcaatatccagatagccaacagcctccaggatggattggaccttcatatccgtgctttccagcatgcgctttgcctctgacatgcgcttttccgtgagataatcgataaacgtagttccatgcgtctcccggaaaaagcggctgagataggaaggcgttatctcaaacgtttccgcgatgtttgaaaggctcagcttggagctggtatagttttcttcaatatagcgcaaaattctgtcgtagagcgaaagctgcttttcacggatctggcgtgaatagcatgcaatgatctcttcgcattgcatattggctttatagaagaaggaatctatattttcgcagcattccagctcctccatcttttcctgccgctgtgacatatgcacctcttgcgcggctgacattagacagaagattaaagaagagacaagataccggttgcgcaattgatcctgttcctcttcggccataccgcgcaattggtccaacgtagcctcggcaatggatatatccctctggcgcatgctttcgatcaatttcaattgaagcgactgaatgcacgaaagataatccgtcggacgcacagaaaacacttcactataatgtatgatgtgcccattttgcggcgctttatcatactccatagcaataatcgcttctgtcagcgagtgccgaagctcagtcatattcgcacagattctacccgcgccaatgagaatttcgcagccgcacgcgcccttaacgcttttataaatatcttgcagcatctgctggtaatgcgttgcgtctcgcacatttacaaggattgccacatagtccttgtacagcatttccgtagcatacgcacattcaatcttgcttaatggctgaaacaacactgcctcccgtcgcaggggttcgatgcgctcaaaggttttcaacacagctatggcgttgttgcggtgcggcaggcgaatccgctgattctccttttcgagcttttctggagaaatattgcccgaaatgatcttctggagcaatagttccgtctcaaacttctggctcttctccaactgatctcggatttgcgcgttgttatccacaatttttgttatatactgattgatcgcttcgaattcaccgttctttgcatcggcgtcttctccggacactcgttcatagaggtcgcgaatcggttgataggtttggaaagcaaaccaaacaccgattgcaaccagtattccggtaatcattacaatactaattagaagaaatcggttggcagtgagggccgtcgtccgcattgcactgtgcgggattaccgtcatatatagccatccattgatttcggattgcgcaaaaagcagattatagtcgtccgtcgcctggattccctcgggatacaacgccgccagcgcgcgaacttcttcctctgacagaagcagttcgttcgcctcctgtgcgatgatatttcgattggaatccaaaataaaagttccatgcacgatttcactcgtattttcgttcaaaagttcctgaaaaaagctctgattaacaatgccaattacgcttccaatccgcacaaaagaggcggatttccacggactgatcagcaaaaagcagcgttcgccgcgcgcgttcagcagctggcagtcttccgccagcgaggtagaaatttcgccagtttgaaaaagctcccatagatcttcctgcgtccagctcccctccagcgaatagacctgtgacgtcgtcgaatgcggctgcccgaaaagcgtttcaaaagaagtggttcctctgccggaatatagcgtgctgtcgccttccacgcttaaatagaggttttccaaaaatccaaattgggacgtatacatctccaactggcccagcgcttcaatggtgctatagtttccgcgcctaagaaaatacggcgaaatttgattgcctgtgccaaggcgatacgcgaattcattcaagctgtctacgtttgaatccactgtacgcatgctttggtgcagagcatattcattactggctcgcaaatctttcgaaacttgtttgtccgtcgtgtaaatgtacaacgacataaaaagcgtgaccgggatcaaaataaagcataaattgattaggatatattttcgataaagtttcgaacgcattgccgtataatggaaatccgtttttctatcataagcattccgagaaaacctctttgccataattccttccccgatcaaatgaaaaatcttgcgcttccccgccctcccaaagagctcccaagcgcccctaatgcgtattttacaagaattgaagccgctatgcaattagcaatttttgttccaaaagcaaaatccaccaaacaatgccgcctctacagccctgttgcctcgccaaggctggaatttcgctatgttgcgccgaaattattggcaaaataaaattcgcttattgccaggcggcttgactgccagtacaataagcgtacagtcctttggcgcgttgcagcagattttaagaatcaatgaataatggaggcagatacaaaatggcgtttacaactcgtccttatctcaatggcattggttatgtcccttattattccaaagacttggtgcctgtcgaagaggcggccgaacgaatcgaacgtttgaatgcaaaatgcgttcgcctgtggcacccattcgccacgctaatggacgccccggaccgcttacgcagcgaggtcgtggacttttttcatggcgtgtattccaccctacgcaagcacggtgttgaacaaatcatcgctttgaatcacgattggttcctgccggatgaaacgggccgcccccattttgcgggatttgccgtgccgcaccgcgatacggaggctttcgcgccatttcttcaatggtacgaaaccatgtggcgcacacaagcgcgtgaattcccggaagtcgatggctgggagacgggaaacgaaatgaaccacgtgccctttctgcacgcgtcagacgcaaaagagcacggtgattttactttgctagaccgcgctgacttatgcacggaaatgatgctttgctctgcgcgcggcattcgctccagcgcgccacaatcgctcatcgtaatgcccggcatggcgcccatcggcggcgaacgcattggggtattcgcgaataatgtagcggtagaatacgatggaatggtgcaaacactgcgccggatttacgaaaatatagccagcggcaaatttggctcgaccaatccccgggagtattttgacgcgctttgctggcatccatattatgccgttcaaaacgaccaaggagattggcgctatgtatgccccgatgatgcgtgggtgcggctaaataacagcgtgtatgccgttgccgaggaatatggcgatgcgggcattggttgctatctgtccgaatatggctttaacgacaatggcgacgcgcaagcagacgcgcagttggcggaatatttggcggcaggcattcgcctagcgaaagagaaaatgccctatgtgcaaagcatccaggtctaccgtctgctgaacatcatggatgtgccgggcgtcgtcgacgactactcgctgtttgattggaaaggcggcaaactcttagccaaaaagaaagcgtatgccgtacaagcgtgctttggcggatctggatcgctggattgagccgcatctagcccaacctctgttttggatacccgcgcctcccccgccgcgcgaaaaatccatggatttgcgcattttccttcttgcaaaagcaagccatgattgctataataagcgtacacaaacgcatattgccgggatcatcccggccaggcgggaggaaatgaaagtgagcattcaactgggtattatcggctttgggtacatgggcaaatggcacctgaacaacgcgccccgggtggaaggggtcaaagtcgtcgcggcctacgatatcgacgccgcgcgcgtggccgccgcgcgggaagccggcttgcgcggatacgacaagctggacgattttctgcgcgatgaggagatcaacctcgtgctggtcgccacgccgaacgattcgcactgcgaattggtgtgcgcggcgctggcggcgggcaagcacgtgatcagcgaaaagccgccggccatgtcgctcgccgagctggacaaaatgatcgcgactgccgcggcgcatgaccgtattttcaccgtgcaccagaaccgccgctgggacaaggatttccgcactgtcaaggccgtgctggaatcgggcgaactgggcaatgtgtacgccgtgcgctccacgctgcacggcgcgcgcggcgcgatgttcggctggcgcgcggagccggaacacggcggcggcatgatctacgactggggcgtgcattttgtcgaccagctcctcaacctgttcggctatgacaacgtgaagagcgtgctctgccgcacagcgaaggtcaagacgcccgaggtggaggattacttcacgctcatcctggatttcaaggcgggtttctacgcgcaaatcgaaatcggcaccttcgtgctcaagcccaacccgcgctggctggtaacgggcgacaagggcacgctgtggatccgcgatttcagctgcgacgaaggcggcgtgatctgcgtgaacgaaggcgtgcacggcgaggccgcgcccatcatgaccacttccggccccacgcgcacctttgcgccgcgcgccaaggaagagatcaacgagcatcccctgccgcaaatcgagcctgacctgcgcgaatactacgcaaacctgcgcgacgcgatcgatggcaaggccgaacccatcgtgaaaaccagccaggtgcgcagcgtgttccgcgtgctggaggcggcgttcgaatccgccaaaaccggcaaacagattctgctatagcgcggtagaaagccgcttcaaagcaaacgtgttgtctgggcaaaatccggttgtcaagcgccggattttgcccattttgggctatattggctccatttagaaacaatattcccatcttcttttcctctataaaaatatatcatacaaaggacggctatcattgaaatataacagatgaaatggaaggatacggggggactccgtcgaataactgaatttggattggcgtgcgccagcacgagatggaacggctggcttggcgcttgcgcgccttgcgcaaagtcgttacaggctcgtgctggcacatgccacggataatgaagttttcagtgatgggacttctggcaaacgcgctaaggaggaaggacgatgggtgtaaagagcaatttgcccgaagttcgtgcgcgcagacaggctgtcttcgcgggcgacgaagggcgcgtcaaggcacaaaaggaccttggcaaactgacggccagagagcgcctcaccgcgctgttcgacgcggccagctttgtggagctgaacgcgctgaatgaagacgccggcgtcgtggcgggctttggcacgatcgacgggcgcggcgcttatgcgttcgcacaggactttacggtgggcttgggcgcggtaggcgacgcgcacgcgaagaaaatcgcgaaggtcgtcgagctggcgcgcgacagcggctctcccgtaatcggaatttatgataccgcgggcgcgaagctggaagaaggcgccatggcgctggacgcgtacgcccgcatcggcgcggcgctcgcgtcggcttcgggcgtggtgcccagcatcgcgctggtgatgggccattgcggcggcatcgccgcggcctgcgcgcaaatgcaggattttgtgatcctctccaaggcgggcgagctgtttgtgaacggcccgcaggtcgccggcgcgaaggcgctggacgatatcgccggcggcgaggccgcgatgaagggcggcgcttgccacatcgttgcggaaagcgacgaggccgcactgggctatgcccgcaagctcgtttccctgctgccggacaacaacatggaagacgcgctgaacgaaacgggcgacgatgtgaaccgcgagcttcccgcctacaacgaaattgaaaccctggaagacgcgcgccccctggccgtggaactgctggacgcgggcagcgcgctggagctttccgaaggcttcgcgcccgaggtgatcaccatgctgggcaccatcggcggccgcagcgtgggcgtgatcgccacgcagcccggcgaggcggaaggccgcctcaccaaggacggctgccgcaaggccgcccgtttcgcgcgcttcctggatagcttctccatgccgctgatttccctggtggactgcgcgggcatgagccttgcggagaaaaaccagggcacgctggccagcgcgggcgcgcagttgatgtttgccctggcggaagccggaaacgcgcgcgtgagcgtggtgtgcggccaggccgtgggcatgggctatgcggcgttggcttcccgcgccgcagcggatgtgacgtatgcctggccgggcagcgtgattgcgcccttgaccgccgccgccaccgtgcaggtgctggagccggaaaagctcgatggcgcaaaggatccgatcgcccgccgcgcagagttggaagcgcaggttgccgccgccagcgcgctcacgggcgctgaactgggactcgtggacgatgtgattgagcccgcgctcacgcgccagatggtcgccgccgcgctcaacatgctcgaatccaagcgcacgatcaagcccgccaaaaagcagggcaacctcccgctgtaagggggcgtcgagatggaaattttaggatttggcgttcaagttatgctgatcggcctggtggtcgtttttgtggggctgatcctactgatcctctgcgtgaagatcatggataagctcgtgaacaaatcggaggaaggcaagcctgccgctccggcgcccgctcc

SEQ ID NO: 4058 - DNA, 12473 bp, Unknown
  16S sequences of unknown bacteria
acccgccgcttagtgctccgcgcacttgaagcgggggaatgcttatctgcgttcatgctgctattcgcaaaaaaagtatcaccggtacggaagcagatatctgtaccggtgatactttttaggttatattactgttctttggaagcgttctctgcttcattgacctcatgtcggtgtaatgcagcctccacaaagccgcggaacagtggatgtgggcggttcggacgggatttaagctccggatgcgcctgtgtgccgatgaagaacgggtgatccttgagctcgatcatctcgacgatgcgtccgtccggagaaagtccggataaggtcatgcccttatcgaccagaatacggcggaagtcgttgttgacctcatagcgatgtctgtggcgttcatggatctcttcactgccgtagagctcgtaggctttggtcgtcttatccagaatgcacggataagcgccgagccgtaaggtgccgccgatatcctcgactccgttctgatccggcagaagcgcgatgacaggatatggggtctgcggattcagctcgatgctgtgcgcatcctccagacctgctacgtggcgggcatattcgacgatggcaagctgcatgccgaggcagaggccaaggaacgggatctgatgctcacgcgcatagcggatggcttcgatctttccttcgatgccgcggtcgccgaagccgcccggtacgaggatgccatcgacatctgagagcaggctgtctgcattttcagctgtgacatcctccgaattgatccagcggatgttgacggtggcgtggctggcaatgccgccatgcttgagcgcttcgacaacgctgatataagcgtcatgaagggaaatatatttgccgaccagtgcgatcgttatttcgtggaccggagaacggagtgcctcgaccatcgacttccagtcagtcagatccggttccggacacgggagctccaggcattcgcaagctacctgagccagatgctctttttccatcgcaagcggcgcttcgtataggtagtcgacgtccagattctggagaacatggctgctcggaacattgcagaacagggcaattttatctttgatacccttgtcgagcggatgctccgaacggcatacgatgatgtccggccagatgcccatgccctgcagctcttttacactggcctgggtcggcttcgtcttcatttcaccggatgcctttaaataaggaattaatgtgacatgaatcagaatcgcgttttcatggccgatgtcgtgctgaaactgtcggattgcctcgagaaacggctggctctcgatgtcacctaccgtgccgccgacctcaatgatcgcgatctgtgtctcgtcggtcgtataattgcggtagaaacggctcttgatttcattcgtgatgtgtgggatgacctgcaccgtgccgccgccgtaatcgccacgccgctctttttgcagaacggaccagtaaatctttccggtggtgacatttgaatttttattcaggctctcgtcgataaaacgctcatagtggccaagatcgaggtcggtctcggcgccgtcgtcggtcacgaatacctctccgtgctggatcgggttcatggtgcctgggtcgatattaatgtacgggtcaaatttctgcatggttaccttatagccgcgtgccttgagcagacgtcctaaggaagccgcggtaatgccttttccgagtccggaaacgacaccgcctgttacgaatacgtattttactggcatagttttcctcctgtactgttttatggtgtgtgatgtgtgtgttataaaaaactgttttattatacctcgatcatttgccaaattccatcctttttttgccggaatttcacaaaaaatttagaaaccattttgttttcggtattgatttatattttgggtatacttataatggtatagactgtataaaaggacgggtaacgcctgatctgcagatacaggaagcgaatgaggaggaagctatggataataatcagcaaaatgacaatcgcccgaacggtccgggcggcgccgggcaggggcctaaccggaaccgttctgcttttatggtttttctggcgatcactgtggctgtgctgctgggcatggcgctgttcaacgggctgatgggcagcagtggatcagaagaaatttcctatgacaagtttctggaatggctggacaatggctatatcaagagcgtgaccgtgaacggctccaaccttgaggtcgagctgaagggggatgcgctgcgctctgcgatcggacagcgtacggtaacctattataccggcaatatgaatgatccgctgctcgtacagagactggagaaggcaggcgtcacttacaagcgtgaggtcagcagcgggatcacggatcttttactgaacgtcgtgctgacctttgtactgccgatggttttactctggatcgtatttggcctgctgatgcgcaagatgggaggcggcggaggcggcattatgggtgtcggcaagaacaaagccaaggtttatgtgcaaaaagagaccggtattacgtttaaggatgtagccggacaggatgaagcgaaggagtccctgcaggaggtcgtagactttcttgagaacccgggcaaatatacgacaatcggtgcgaagctgccgaagggtgcgctgctcgtgggacctccgggtaccggtaagacgttgctggcaaaggcagttgcaggcgaggcaaggtgcccgttcttctctatttccggatcagattttgtggagatgtttgtcggtgtcggagcatcgcgtgtgcgtgacctgtttgaggaggcgaagaaaaatgcgccgtgcatcatctttatcgatgagattgatgcgatcggaaagagccgtgacagccgctacggcggaggtaatgatgagcgtgagcaaacgctgaatcagctgcttgcggagatggatggatttgatacgtcgaaggggcttctcgtacttgcggcgacgaaccgcccggaggtgctcgatcaggcgctgctgcgtcccggccgttttgaccggaggatcatcgtagaccgcccggatctgaagggacgtgtcgatgtccttaaggtacatgcaaagaacgtcaatatggatgagacagtcgatctggacgcgatcgcactggcaacatccggagctgtcggatcagatcttgcgaatatgatcaacgaggcagcgatcctcgcagtcaagaagggacgcaaggcagtttctcagaaggatctgtttgaggcagtcgagatcgtacttgtcggtaaagaaaagaaagaccggattctgagccaggaggagcgccgcatcgtatcttaccatgaggtaggccatgcgcttgtcagtgcactgcagaaggattctgaaccggtacagaagattacgatcattccgcgtacgatgggtgcgctcggctatgtcatgaatgtgcctgaggaggagaaatacctcaatacggaaaaagagatccgcgcaatgcttgttgaatttgttgcgggacgtgcagcggaggagatcgtatttgatacagttacgaccggtgcgtcaaacgacatcgaaaaagcgacccgcgtggctcgctcgatggtgacgcagtatggtatgtcgaagaagttcggactgatcggactggaagtacaggcgaatcagtatctggacaaccgtccggtgatgaactgttctgaggcgacggccgcggaggtagacgcagaggtcatgaaggtgctcaaggagtcttatgatgaggcaaagcgtctgcttaccgagcaccgcaaggcactggataagatcgcagccttcctaatcgagaaagagacgatcaccggcaaggaattcatgcagatcttccatgaagtcgaggggatcacagagaccgatcataaggagccggaggcgcgcatcaggcagcgaccgacagaagagacttccgcagaagaggtttctgcagaagcacagccggaagcaggagacgtcattgcattgccgccgacatcggaggcagatatcgcacagccgaagacagaagaagctgcgggcgacatgccggaggaagcatcgactgccggagaggttcagaaagataccgcaaaagacgaagtacatgataatgggagcgaaacggtacagccggcgacagatgaagctgcggggacatccttggaagagaaaacagatcgtctgtaatgtacgggcagaaatgaaaatgatgagatcatgaaaatggcaggatgccatatgccgggccgggagtatgaagggatacatactcccggctgatttgatatatgtgaatttttattaagaattccaaaagaaaattgatctcttcgggcaggtgtggtattgtatgtaggacgttcttaaacagaaagacgaatgaggtgatcaattgaatattttgaaaaaaatacaggagtatgcctgcaggcggccggagcagatagcgatccggtgcggcgacagtgcgctgacctatggcgaactgtggaactattcagacgggctggcagcctggtttttacagacacaaggagacgaccgatcgccggtagcggtttatggccataaggatccgtggatgctcgtatgcttccttgcctgcgtaaaagccggaagaggatattgtccgatcgaccgctcagttccgcagacgcgggtggagatgattctgcaggcagtaccgtcaggggttgtgcttacgacagaggcgatgacggcagatgccggaacaaagcaggtacttgtgtcggaagagctgaaagcactggcagaaaaagagcatccggaggttccggagaccgcgtgggtatcaggaaaagatacctggtacattattttcacatccggaagtaccggtacaccaaaaggcgtgcagatttctgcagactgcctgaatcattatctggactggtctgtcggacttggatctgccgcagaagaaaaggatggtcaggtatttttgaatcaggcgccattctcctttgacctctcggtcatggatctgtacacttcgctggcgagtggcggtatgctgtactgtctggaaaagacggtacagtcggattaccggctgctgatgcagtcgcttggagcatccaatgccaatgtgtgggtatccacaccgtcctttgcggaggtgtgtctctcggagaaaagcttttccgaagagctgcttccgaagctgcaggtatttctgttttgtggtgagacgcttggcaatcgtaccgtacaaaagcttcaggagcggtttccgaaagcagcagtcgtaaatacatacggcccaaccgaatcgaccgtggcagtcacggatgtgctggtgacaccgcagatggcacgtgagacggagccgcttccggtcggccgtgcaaagcccgggacacggattgagatccgggatgaagccggaacagtgctgccggatggagaaaaaggtgagatcatcattttaggtgacacggtgagcaccggctattatcggcaggaggagctgacaaaaaaggcgttttttgagcaggcggaaggtgcgggcgtgatccgtggctaccataccggcgataagggctatctggaagacggtatgcttttttactgtggacggatcgatctgcagattaagctgcatggataccggatcgagctcgaggacattgaaaataatatccggcggattccgggaattgagcatgcggttgtattgccaaatctgcgcgatgataaggtgaagagcctgacagcctacgtagtggagcgggagcttccaaagacagaacgtgaggagatggcaaggctgaagcaggagctgctgcagttcgtcccggattatatggtgccaaagaaattcgtatttctggagcagatgccgatgacaaacaacggaaaggcggatcggaaaaagctcgcggagcttgggaaaaagccggagcgtaaggtgatggtatgagttattatgagggacttgcattttttctctgcctgatcggagtgttgctgattgctgcggtgcttggttatctggaaaaaccgctgaaatggtttagctttgttgtttcgttgctgtttgtagcgggcgtgttctggggctcctggctgaattttttgtatctggtgttgttttatgtgtggtcactggtgctgattctcggatatttttccatccggcaaaagggaggcagaaaggaaggcatttaccatgtctttgtactgctctcacttgtgccgcttgtgatctgcaaggtatctccgctgtttcatatgagtctgtttggattcatcggtatttcgtatctgacgttccgggttgtgcagatgatcatcgagatctatgacggagtcatcaaagaggtatcggcgcttgaaatcacagcattccttgcattttttccgagcttcagttccggcccgatcgaccgcagccgccggtttctggcagactggaatcgcgtgctgaaacgagaggagtacatggagctgtgcggtaccggtatctggaagctgctgctcggtgcggtatataagatggtcattgctgcaggcgcctacaaggtgatgggctattttgataccgggacagcgtggtaccattgggttgggtatgcctatgcctatggtatttatctgttctttgactttgctggctattccctgatggcagtcggcagttcgtatatgcttggcattgagacaccggagaacttccgtcagccgtttatcagccgggatatccgggagttctgggaccgctggcacattacgctgtcgcactggttccgcgattttatcttcacgcggtttgtcatgtacagctcgaagaaaaaatggttttcaacgcggttgcagagagcctgcgcgggatttttcgtcgacatgggtatcatgggactgtggcacggcattaccccgtcgtatattttatatggcctgtatcatggactgctgttggcggcgacagagacttatcagaaaaagtcgaaattttacaagaagcataaaaataagacctggtatcaggtcatctcatgggctgtaacgatgcagctcgtattcttcggattcttcctgttttcagggaagctgatggagcttgtcggattctgaacgcagataagcattcccccgcttcaagtgcgcgaagcgactgcgttcatgagcaagtagcgaagcggattgcgaatgtccgctttactgtccgctttgctagatcaggtatagcaccttcgcagcttatcgggagtggtttgcaccactcctgatacaagcaagtcccaacccaccgcttattgctttgtgcaattgaagcaggggacttgcttgattcggttaaatggaagagaagatcataaggaaaaggaaaggagtataatatgagagaagaagtattggatttattggcagagatttgtgaggatgatgtagtgaaagaagacctggagacggaactgtttgagtccgggcttctggattcccttgggtttgcagagtttctggtggatctggaggatcattgcggtattgtgatttctccgtcagaggtagagcgtgcagacattgatacgccggagaaaatcctgaagcttgtagaggcaaggagcgaagcgtgagaaagataaaagcttttttggtggcgcttttgctgtttgcggtgacagttatcggctgccatttttatatcaaagacaaggcgtcggtagattcgactgcgtttggcacaatgccgagtgaggaaaaaggaaagctccgagcggcattgatggaaaatatgagcgagaatggttatccgattttcggttcttctgaatttcagcatggaaaagagaatttttatcatccgtcacaggtgttttcgggtacggactttcagccaatgctgataggggcagggtattatcagtccctgagccatgcaatcacgcttgcctcgattgaggatagcatgaaggtgcaaaaagcggcgctgatcctttcaccgcagtggttccgcagcaccggggttgtcgatcaggcttatgcctcccgcttttccgagacacattatgcaggggcaatggcaaatgagaagctggacgatgagacgaagcaatacatttccgaccggacacagaagctgctgaatgtagatacaaagacgcagaagcgtgtgaagatgtacgatgatgtgctctggaaaaagaattcggattttatagaggcggcgcaggagacactctggtcggcgtttctttcagaaaaagaggattttcagacaatgctgcttggcagctccaaggagctgaaggtgtgtgaaaaacggcaggcagatgcgctggaaaagatggaagaggaaggactgcttacgaaatccaaagagccggactggacagcgctgcttgcgctggcagagcagaagggcgaggaagagaatcagaatcagttctatatggatgaagcggcctataagcgtctggagccgcatctgtccaaaaaggaaggaatgaacagcgatgcctataagggctatcagaccggaccggaatatgaagatctggagtgtttcctgaaggtctgtcaacagctggagattgagccgctgattgtaattgttccggtaaatggttattattatgattttaccggttttccaaaagaagccagacagaactattatgaaaaggttcgcacactggcggaatcatacggggcaaggattgcagacttttcggatcaggagtatacgaagtatttctttgaggaccgtgtgcatcttggaaagaaaggatgggtgatggtggatgaaagtctttacaactattataaagaagcttgagaatcatccgaggctgcagtttgcattgcagacagcagggttctatgtgctgctgatggtactgtttttgtacttcatgacggcaaatctctcttccgcccccaaattcgtatattcacagttttgattacagggatccaagtaaaaggccaccgatcatgcttgcatgaagaggtggtcttttacttggatttttatttgaattttttatttggatcttttatttggatcccgccgcccatcttcctgacgcgccgcacggcagtaccagtccgctttcggtgaccggcaggccgatttcctcagactctacgtgtccaccgtattttttcagttcggtggcgatcatgtatgtcagcacggcaggcgcgaggccggtcgtgtaggaattcacgaggaagaagagtggctgatcactcaaaagctgagcagtcagacggatgaacggatggattgaatcctcaattttccagatttccccctttggtccccggccataggaaggaggatccatgatgataccgtcatagtgattgccgcggcggatctcgcgctctacaaatttagtgcagtcatccacgagccagcggatcggcgcattgctcaagccggaggctgcggcattttcctttgcccatccgaccatgcccttcgaggcatcgacgtgtgtgacagccgcgcctgccttggctgctgcaagggtggcaccgcctgtgtaggcgaagagattcagcaccttgaccgggcggccggcatttttgattttttcagagaaccagtcccagtttgtggcctgctccgggaaaagaccggtgtgcttgaagctgaagggcttgagctggaaggtaagctccttgtagtggatgctccactgctttggaagatcaaaaaactcccactcaccgccgccctgcttgctgcggtgataatggccgttcggatgcttccagccgtattgctttcttggcgtatcccagatgacctgtggatccgagcaggtaatcgccccagcgctccagcttttctccacgggaggtatctaatacttcataatcgttccattgatctgctatccacataattcttatactccatttctattagatgtaagcacaaaatcttttgtacagaaaaataattcaagtgtagcgctttcagtatacgcgattcaatagggggaatcaagaaaatatttttcctctattgtcattctgataaaaatacagtagagtaaaataaaaatgataaagacgatcagggaggatgcattatggcaattcagatcagttcggatgggcgtacgtttacgcttcagacggagaagagttcctatcagatgatggcagatgcacatgacgtgctgctgcacttatattatggaagaaaaatagcggcggagaatctggaagaacgtattttcagaagtgatgtcgggtttgcgggcaatccgccagaggctggagaggacagaacctattcgctggatgtgctgccgcaggagcttccgggcagcggagtcggtgactatcgggaggatatggtacggctgtaccatgcagatggcagctgtgcggcagattttcggtttgagagctatgaagtacaggagggggcttatcgtattcccgggcttccggcagcctatgataccggtgaggagaagggcgagacactcgtgattacgatgcgtgagaccgcctctgccgtgaaggtaaagctttattacggcgtatttgaaaaagaaaatgtcattacgcggacagtttgcattgagaatcagggaaaggaagcagtcatattggataaggcgctttcctgcaatgtcgatttcctctttggaaactgggatcttatttattttgaagggcgccatgcaatggagcggattccggagcgcgtgccggtgcggcatgcaaaggtggagatcggaagtattcgcggcacgtccagtcatcagtacaatccggcaatgatattatgtgatccggcggcgacggaggattttggaagctgctatggcttctgctttgcctacagcggcaatttcgtggcgggagcacagaaggatcagagaggtctgacccgcgtgcagatgggaatcaaccctgtgcagttccgctataccctggctgcaggggaagcattttttgctccgcaggtgcttatgagctattcttcagagggctttaccggtctgacccatcagtatcatgacttgattcgggagcatatctgccgcggtgcgtacaagcatgcgaagcggccggtactgatcaacaactgggaagcgacgtactttgattttgataaggaaaagatcgtgaagatcgcacagcaggcacatgagctcggcatcgagatgctcgtgctagatgatggctggttcggtaaacgtgacagcgacaacagcggtcttggcgactggtatacgaatgagaaaaaaatggatggtaccatgggtgagctcggagatgagatccatgcgcttggcatgaaattcggcctgtggtttgagcctgagatgatcaatgaggacagtgatttgtaccgcgcgcatccggactgggcgcttcgtatcccgggacgtgagccgaaccgcggacgtgaccagcttgtacttgatatgagcaggtcagaggtgcgtgaatacctgtatgaacggatttcttctatattaaatgaggcaaagatcgattatgtaaaatgggatatgaaccgcagtgtctgcgatctgttcggacatgaacttccgccggaacggatgggtgagctttatcatcggtttgtgcttggcgtttacgagttaaaggagcgcctgctggcacacttcccgcggctgcttctggagggctgcagcggaggaggcggacggtttgatgccggaatgctctattatgcgccgcagatctggtgcagtgacaataccgacgcgattaatcgcctgacgatccagtatggtacctctttcttttacccggccgggacgatgggagcacatgtctcggcagtgccaaaccaccagacgggcagagtgacgccgtttacgacgcgcgggcatgtggcgctctccggtacctttggctatgagctggatctgaatctcgtatccgcagaagaaaagcagatggtaaaagagcagcttgcagaatttgaccgttattatgagctgacacacgagggagactattatcgtctggcgaagccgggtgaagccttaatggcatggggctttgtggcgaaggatcagagccgggcgatggtgacggttgtgagtaccgatgtcgagggcaacccgctggcacagcacgtttcggtaaagggactggctgaagggcggaactaccgttgctcttataacggaatcgtacacgatggaagcgtctggaacaactgcggcctgaccttaaagaaggtgctgaaggagtacgaaagcctactgatagagtggacagaagtataaaagcttgtattcgaaaaaaaacaatacttttttcaaaaaagcccttgcaaaatcttgggcttttttgtataatgcaaacgttgtgacatgatagcgtagaagcgtgaggttgctgcaagcttcgagcctgcaggttttccgtggagcgaatgtcaagttaagaaactggcgacaagtcactgtac

SEQ ID NO: 4059 - DNA, 32759 bp, Unknown
  16S sequences of unknown bacteria
ccggaacatccagacagcccgcaaaacctttatttatgggctttttcgcaatttaatccgctactcgaattcaatcgttccaggtggcttgctcgtcagatcgtagaatacgcggttgacgcccttcacctcattgatgatacggctcatgacagtctgaagaacttcccacggaatctctgcggcctctgcggtcatgaaatcgatcgtctttacggcacgcagggcaactgcataatcatacgttctttcatcgcccatgacacccacggagcgcatattggttagtgctgcaaagtactggttgatctcctgatcaagaccggcttttgcgatctcttcgcggtagatgtagtctgcatcctgtacaatacggactttttctgctgttacctcgccgatgatacgaatgccaagtcctggtcccgggaacggctggcggaatacgagttcacgcggaatgccaagttccagtccggctttgcgtacctcgtctttaaacaggtcgcgcagcggctctatgatctctttgaaatctacattcttcggaagaccgccaacattgtggtgagatttgatgactgcagattctccaccaagtccgctctctaccacgtctggatagatggtgccctgtgccagaaagtcaactgcaccgattttttttgcttcttcttcgaagacgcggataaattcttcaccgatgatcttacgtttctgttctggttcggtcacgcctgccagctttttgtagtaacgatcctgtgcattgacacggataaagttcaggtcgaactgacctttcggtccgaatacagcttcaacctcatcgccttcgtttttacggagaagaccgtgatcaacgaatacgcaggtcagctgtttgccgatggctctggataaaagtccggctgccacggaagaatcaactcctccagagagtgcaagcagcacctttccatcgccgactttttcgcggattgcacgaatcgaattctctacgaaggaatccattctccagtcacctgcacagccacagacaccgcgcacgaaattgtagagcatcttcgtgccttcctgcgtgtggagtacttccggatggaactggattgcgtaaagatgtttttcttcattttctgctgccgcaaccggacagtctgccgtatgtgcagtgattttgaagcccggagctgcttctgcaatataatcaaaatggctcatccagcagattgtggatggcgatacattactaaacagacgtgaggttgtatcgacaaaaacctctgtcttgccgtattcgcgaacatctgcacgtgttaccacgccaccgaggaggtgctgcatcagctgtgcgccgtagcacaggccaagcaccggaataccaagctcgaacagttcttttgtatacgtcggtgaatctgcttcataacagctgtttggtccgccggtcagaatgattcctttcggattcatggctttgattttctcaatgtcggtcctgtaagagtaaatctcacaatagacattgcattctctgacacgtcttgcaatgagctgattgtactgtcctccaaaatcgaggacaatgacggtttctctttccatgttttctccgttccgcatctgtagttttctcagatgcataatgaattgattgtttttctgtcagttttccttattataatgtaggttctcccgattggcaacccatattttttgcgagtttaatacaattccatttgaaatattgcgatttttcttgcatacaagcatattttttctgctttttccatcaaacctgccaagtagtataacaacctgtaatatctgcctgagagacctcttccttctgccaaaataaccattgcatgccccgccccgaaacgctataataatagcagagattttatcaggcagatatggcttctgcccttactgaaagaagaggtgaatctatgcatacaaaaaaagactttcgaaagccggctcctaaccgggcaaaagaatattttctgatcacagttgcagtgctgatcatggatatcggaatttatattttcaaatttccgaataatttttcgttcggcggtgtctccggtatggcggttgtgctttccaaagcactgcccttcacggcatcgcagatcaaccttttgattaatcttttgctgctcgttatcggctttgcttttctcggaaaaaatttcggtgtgaaaacggcttatgtgacagtgctttcttcgatcctgctgaatatttttgaaaagttcttcccgatgcagcacccgcttactgatgagatcatgctggagctttgcttcgccattctgctcccggcgcttgccgcggcacttctcttttttgaaaatgcttcgggcggcggcacagatatcattgcaatgatcatcaagaagtattcaacgatgaatatttctacagcactgctggccacggatctgatcgttgttgtcgtatccttccttatttttgacacgctgaccgggctttgctcgattctgggacttctggcaaaaacgcttctgatcgacaagtcgattgagcgtatgaagctcaacaaatttttcacgatcgtttccagcaatcctcagccgatctgtgatttcatcacgcatgaactggatcacagtgccacaacgtaccacgcccagggcgcgtattcgcaccgggatcgcacagtcattctgacggttgtcgatgtaaagcaggcgatttacctgcagcgatttattcaccgtacggaaccgaccgcatttactgcgatcacaaagagcagcgagatcgtcggcaagggattttcaagctacatttaattgaatcacgcattgatttttttcttatttctgtatacaataaatctggctctcctgctgctttgtaagcaaagtgcaggatgccagattttcttttgaagcagatcagacagaacacctgtaaaaaagcagccatctctggtctgaacctacttttatcataaatgaatttgcatatttttattatggaggattttttttatgaacaatacacttgattatattgcaggacagctgaaagcgctcaccgcgattccgagtccgaccagctttacaaaagctgcggcagattatctgcttaaagtacttcgcgaaatggggtacgaaccagagctttcaaataagggaaacgtgtttgtgacgattggcggcagcggcagcccgctgattttcgccgcgcatatcgatacgcttggtgcgatggtgcgctcaatcaaggaaaatggacgtcttcggccgacaacgctcggcggtcatcagtggcgcacagcggacggtgaaaactgtaccgtccacaccagagacggccgtgtctacaccggagtcgtgcttaacacagagccatccgcacacgttgcagatcagccgattgaacagacagaagaaaatatggagattctgctcgatgaaaatgtcgcatccaaaaaggaaaccgaggcactcggcatccagaccggcgatatcatcgccatggatccaaaaactgtcatcacaaaaagcggctacattaaaagccgttttcttgacgacaaactctccgcagcaattctgctcggtctggcacgcacggtaaaagaagaagggcttgttttaaaccgcaaagtttctcttctgtttactgtttatgaagaagtgggacatggcggaagcttcgttccgtcagacacagaagaaatgatctcagttgatatgggctgtgtcggctcagatcttggctgtacggagcgcatggtttcgatctgcgcaaaggattccggcggaccttacaattatgacctcatcactgtactttctgaactcgctaaaaaagaaggactggattacgcaattgatatctatccgcattacggttctgacgtggaagcgacccttcgcagtggtcacgatatccgccacggtctgatcggacctggtgtatacgcttcacacaattatgagcgttctcacatggatggcgtaaaaaatacttaccttctgttaaaagcttacgttacgaaggagtcattatgagtgaaaaaattctgtacctggaatgtaattccggaatcagcggtgatatgacggtagccgccctgcttgatcttggtgcaaacagggaagtattgatggaggcgcttgaaagtctccctctgaccggctattctatcgaaattaaagatgtttataaatccggcatccgcgcctgcgacttcaatgtcattctggattctgcgcatgaaaaccacgaccatgatatggagtatttatacggggatgcgcatacacatgatgccgctgtatcccatgaatatgctcacgcacacgcggacggagttgaggagcatgaacacgccgtaaataaagtaaccgatgctcatgctgaacacacagtgaatgaaacaccgggcactcctgcacaccaccatcatcacgatgcccgtaatttaaatgacatcgcccagattatcatggctggccgtcttaccgagaatgcaaaatcacttgcacttaaaattttccggattctggcacaggccgaggcaaaggtacatgggaaatcaatcgatgaagttcattttcatgaggtcggtgccgttgactcaatcgtcgacattacggctgccgctgtctgcctcgacaatatccagccagatcaggtcgttatctctgcgctgacggacggaacaggccagattcgctgccagcacgggctgattccggtgccggtacctgccgtgacagccattgcatcaaatgaacatcttacactgaaaatcagaaacgtagaaggcgaactcgtgacaccaaccggagcagccatcgccgccgcttttcggacagaatctacgcttccggactcttttgaaattctgcacaccggtttcggtgcaggcaagcgtacttataccggtgtatccggatttctccgtgccatgcttctgcagtcttctgccggggaggatcacgatacaatcctgagcatggaaacaaacatcgatgactgcaccggggaagcgctttcattcacccttcagcagctgctcaaggaaggtgcgctggatgccttctgtattccgatttatatgaagaaaaatcgcccggcctatctgctcaaggtgctctgccagccggatgaccgcgccaaaatggaagcgatcattttccacaacaccacaacaatcggtatccgttttcaggaaatgcaccgcacgaaactggatcgtcggatcattgcagtcgagaccccctggggcatggcagatgtcaaatgctgcacctacggctccgatacctactattatccggaaaacgacagcgtaaaacagctggctcttttaaacgaggttggattttcggaaatgtatggaatgattcaggcatacacgagggcgaaaggactttgatctgactaaaaaactgctgcacaaaagcaatcctttacctattgtgcagcagtttcttatagcgatccttgtaaataatgcatttaaggcagttcagcagagtgtgaaagactcaggacgcatctttttgctcttatcctactacgtttccatcctcgtttaaaatatgacagatcgaatgctccaccatgtcagatactgcattttccgtataaaaggccatatgcggcagcatcaggacattcggcaaatcttttaaaatcgacatttcacgatgtcccacaacctgatatttataatcaccatagaaaatgccgagctcattctcaatcacgtcaagcgcagctgctcctacttttccactctccagtgcgtccagaaacgccggtgtatcgataatgctgccgcgcgctgtgttgacgatcaccacaccatctttcatctggcgaagcgtctcctcatttaccatatggtagctgctctttgtcgctggagtgtggaaagtaatgacatcacttttctcaaacaactcatcaagtgtacagtacgatgcatacttctttgcctcttcattttcatacgggtcacaggccagaaggcggcatccaaatcccgaaagattgcgcaggacatgtgttccaatttttccggttccgactactccgaccgtaaggctgccaatctctcttccgatatttccatttaaggagtaatccatgccctccgcacgcttgatgatggatttcattctgcgcagcgccatcaggatcagcatcactgaataatccgccacacttccggtcgaatacgtcacattgctgaccttcatgtcaagacggcgcgccgcatccaaatcgatatggtcatagccgatggttctcgtcgaaacatgctttaccccctgctctctccacgcgcgcatgatatccccggtaatcggtgttgtaatgacactcacaccttcacagcccgctgcaagatgcgcattttccactgacggtgtctcgcgaattggaagaatctccactccatactgctttccaaatttttcaaaaaatgctgcttcatcaaaatcccgataattatatgctgctattttcatgattacctctttttctgatatttcaatccctctttaaccgagtagtgaagcggattgcgaatatccgctttgacttttttgttactacatttcttttttacgcccgcactgcccagcgcatcttggtagactttgctcggctgtttcggatacactcttctttcgacggacgaatgacatcttttgcgatatcctgataaatcccctcccggtaaaaacgctggaacgacttctttacaagccggtcttcaccggaatggaaggtcagaattgccacttttccgcccggtttcagcacaccaggcagcttttccagcagagagtacaatacttcgtattcgtgattcacgtcgatccgcagtgcctgaaatgtgcgctgactggacttacgaaccatctccttataatccttctccggaagaaatttcagcgcttcctcaatctcattatgaagctccgtagtcgtccacccttctttattccggcgatttcttgccataattctcgctgcgatctcctctgcatacggctcgtccgaattttctacaagcataccaaccagttcctcttccgtcacagaaagcagccggtcagaggcactttctcccttttgcggattcatgcgcagatccagcggtccatctgccttgtaggtaaaaccgcgctctggattatcaatctgcatcgaggaaacgccaagatctgccagtacaaaatcaaattttccggcttcctcagctacctgatcgatattcgcaaaattcaaaagctttacggtcagaatttccggcccataaccaagcttttcaagccgttcttttgtcttttccgattcaatcggatccacatccaatgcataaagatgcccctgtccctgcaggcattccagcattctcctcgtatggccaccgtatccaagtgtcgcatccagtccctgctgtcctggctggatctggaaaaagtcaagaatctcatttacacagatcgaaatatgcattccggccggtgtcccgcccttactgattactttttcaattgtgtctccgtacttctccgggttgagttccttatatttttctttataggatcttggatgggtaccggagtaacgcacacgtcgtttgtgaacggtctgctgcccagatgggttttctgccgaagtatttattttattttccattttcctgcttgttcctttccttttttctggattgctgccatcaaagcggatatccgcagccccgcagcgggtttacctgattcgcgtcagagccaggaggcgcacagctcttcctcccttatttttgtaatctgcaccgcctccagccagtcgccaaaagccacctttcctgccgcagtgcatgctgcaagggtatattccggcgtctgccgcagcaacatccaaagctctggatttctgtcctctgatttatcagaaatcccacccgcattttttacgtatcttaaaagccagcgtgtacaatctgcccgttccattccgtatcccattccgcggccattccatttcacgacactttctttcatggaccaaagtgcctgaagcagctgttcccgctccggcaaactttcacaggattccacaatccggcgttctttttccgtgcagatgcggcgcatcaggctttctttatacggaaatctccgctcaatatcaattcccgccgggatcgtatccagcgcacaggcacaggccgcccggcaatggctcagattaaaatgaagtccgggatacgctctgctatagggctttccctgttccgttttcgcaagcgaaagttcagaaagcgtctgaattccatacatttcgccagtcacacgctgaaacagcagccaggcagtgagatgctcccgctgattttgcagctttttttcgttttgcgcaagtgcttccgcctctgaagaatccagaagtccggatcgcatggctgctcgcagtaagggggatttccattcttgttctttcaattcgcaaatataaatgttcatttcattagactagcagaaatgagcgcgtttttcaagtcaaagcggatattaggttcgattcgctgcggataagatcaggaagaattctttcctgtgatatttcttattttcttcttgcattatttgcattaatatgtataatacaaacaagaacacgaaacgcttcttatgtactctctgaatctttttctatagcaataccagaaaatcacgcataaaagcaggcaagaaaagattccgagagattatttcttaccaacggaggtttcccatgatcattaaaatcaaccagcgttctgaaatcccgctgtatcttcaattgcgcaaccagatcgtaaccggcatcggaaaaggggcattaaaacctggtgaatcacttccgaccgtacggcagctcgccaccgatcttggcatcaattcgatgactgtcagcaaagcatatcagctgctcaaggccgaaggatttctggaaacagaccggcgccgcggtagcgtcgtctcgctccctgacgcaaaccgtcccggcgcagctgccgcttttgaagaaaaactgaccgatgaactcgaactgctcactgccgaagccaaagtgcacggcatgacactgcaggattttctttctttttgcaccaacgcatttcttgagatggaggtagtatcatgatgctgtttctgattatgctgtttaccgatcttttcatggtcggcatctgcttttctgtctatggaaaagcgaccctttatcatgatcatatgctgctcggggtacatattccggaagataagctggaaacgccatccgtcactgccctgattgcatcctataaaaagcagaaccgccatttctatctgatccatctgatccttggggctgctgtttcgctgctcgcgttctggtatacctcaatcctcatcatctgctggagtatctggcttgtcgcatttttctacggcattttttccgatctttaccgtacacaccgcatgctttactcacttaagacagaaaatggctggtatgatgatctggaagaaccggtcacagcggctgctgatacgagcgtctctgcgccgactcggaggctcacgccgccgctttggctgcaatttcttccgctattgctctttctgattcctgttctgtttccttccatccgtgagcagattttccgtcatcccgaaatgcagctgccgctgatatgtgccactgtcgtcggcctcttttttccatgcatggctgccacaatccttcactccggaaataaaatttacagtgaacattctgaaatcaatctgcagctgaatacactggaaaaaaggacatggtatttctgtctgctgctttccggcctgtgtaacgcgttttctttcctggtgctgctttggcagactgcttatcagccattttcaggcatcctgcccttttctgtaattgcagcacttccggtcattgtattgccgatctgtatctggcgtcttcacgtcaaaaagaaagcgatcctcgccacagacacggccccgctgtacgtcgatgacgattatttctggagaaacggctggtatgacaatccgaacgatccgcgggttctcgtgcagaaccgctattcttctatgaactatacctttaatttgggccgaccgattgggaaagtgcttacttacggaatctgtcttgcagtcggtgctctgttcctctggatgtgccttcttttcctgaaaatagatttcacaccgatccgccttaccatcacaggcgaaaacgtttcaattacatccggatataccgatgccgattttcagctccgtgatattgaagagattcatctgctcgaccagctgccggctgaatccttcaccaaaacaaacggctccgcggataaccgtatgctgcttggtatcttctggggaagccaaacgggaaactgccggatgtatgtgacactgcgtgaatcaccggttcttgaaattcgggtgcctgagtacaccgtttttttgaacagcacgactccggggcagacacaggcgtggtatgaggagcttctcgctgccagatacgttttcaccttttctgattagccccctcttccctcacaaacacttctctcagccgctctaccgcccgtttttcgatccgggatacgtaggagcggctgattccaagctcctttgcgatctcgcgctgtgtgcgttcttttctgccgagcagcccgtaccgctcacagatcacctgcagctcccgtccatccagcacacgctccaggcactcccgaaggcgcaggatatttttttcctgctccatctcctccagaatatccactggttcactctcaagaatatccatcagccgcagttcccgtccatcctgatcggttccgatcctttcctgcatcgaaatctcccggctcagtttcttttttgtacgcagcagcatcagcagttcattttcaatacagcgcgccgcgtatgtggccagccggttatttttggtacagtcaaacgtcattacccctttgatcagtccgatgatccctgttgagatcaggtcatccggatcgtactccggtgactgatatttttttgcgatatgcgccaccagccttagattgtgctcgatcagcttatttctggcttccagatcccccttcttccagcatgccagataatacttttcttcctcctccgaaaacggcttttcaaatgttttcaacaaagcacctctaagcggttttatgttatcttatgaaaaatacaggccggaagtgcctgttccatggattttgtgttacattttctttcaataccgctagactatttttcagattccatatatagtaaaaatagttgctttcccatttgaccgattcagacaagtgggacaaactcacccataagaatgtttataaacgagtagtaaagcagatacaactatccactttaattttacacacaaggagaatctactatggcaaaatggcttgatactgcaattttctatgaaatttatccgcagtccttccaggacagcaacggagatggaatcggtgattttcagggaatcatccgccgtctcgactatatccgtgaccttggctgcaatgcgatctggatgaatccctgctttgaatcatccttccatgacgcaggctatgatgtaaccgactattaccaggctgctccgcgctacggcacaaatgaagacctgaagcagctctttgatgaagtgcatcgtcggggtatgcatatcctgcttgatcttgttccgggacatacctctgtcgaatctccatggtttaaagcatcctgctcactggaagaaaatgaatattccaaccgctatatctggacgaatgatatgatgtgggcaaaggaaaagattccaggcatcaacaactggcttttcggtatctctgaccgtgcctctgccgtagcggtcaactgcttttccactcagccggctctaaattacggattcggcaccgtaactgctccgtggcagttttctgctgattcagaagaagcccagaaaggccgcctgatcctgcaggatatcatgtcattctggcttgatcttggctgtgacggtttccgcgtcgacatggctgccagccttgtaaaggcggatccggaccatcattacacgaagctgctgtggcagaaggttcgtgccttcctcgatgaaaaatatccggaagcagcacttgtctccgaatggggggatccgaaggaagcacttgaagccggtttccacatggacttcctgctccacaacggtccgacacactacatggatctcttccgcgagacaccgtacttctccaaaaaaggtgacggcgatatcagtgaattcgtcaaggcttatctggagcactacaaccgcacaaacggcaaaggcctttgctgcatcccgtcaagcaaccacgacatgaagcgtatgcatcatctgctcgacgaggaggagatgaaaattgcatttgcattccttctgaccatgcctggctgcccgttcatctattacggagatgagatcggtatgcgctacatggacggaatgccatccaaagaaggcggctatgaccgtaccggctcccgtacgccaatgcagtgggatcacagcgcaaatgcaggcttttccagcgccgctccggcaaatctttatcttccgatcgacccgaatgaaaaccgtccgaccgttgaaaagcagctggctgatccggattccctcttaaacctcataaaagcgctgatccgtctgcgcagtgagcatccggcgcttctctccggcagcgatatccgcttcctgtatgccgagccgcacgcatttccgttcgtctatgaaagactgcatgaaacggaaacactcaccattatcctgaatccgtcggcaaacgaagcctcctgcccgcttgaaacaaatccaggcgaagtgatcttctcctacagcggtgacgcgaaatgggaaaccggaacacttaccgtaccgaaatgcagcttcacaatctgccgcagataaaatcaaaaagcttgtgtcgtgctgcgcagacttcataagcaaataatacattaaaaggaacggcacccgcttttcatagatgccgttcctttttctctgtcaaagcggatattctcaatccgctttgctacttgcctggctcgggtcaaagcggatattcgcaatccgcttcgctacttgctcataaccgagtagctgctttgcagcttatcaggagtggcttgtaccactcctgatacaagcaagtccccacccactgcttattgctcagcgcaattgaatcaggggacttgcctgactcggttaaatgctcatttatactgtccgtccagcaatattttgccatgtttataacatacactgcaaaattcaaaacgggcattttccctcactctcacagcctcttccggtaatcactcggcgtacacccgtaaaattcccggaatcttcggataaaataactgaaattcccatatccgacctgaaatcctacctccattacagaaagtggtgtcgtctgcagcaggatacacgcctgctcgatgcggtaacggttcaggtactgtacaaaactcacatgaaacgtctccgaaaagtaattggaaaaatatttgggggacatgtgaatgatctctgcggcctgttccagtgaaatatgctcctgataatgctccgcaacgtacctcagtacttcttttaaacgaagcgccgtcgtggaatgctctctttgcagctgcgaacgtaccacaaactgctggttttgttccagcaaagcaagcacccggtaaagattcgctttgattaacagctggtatgccgtcggctgtctggtgcagaggcttctaagttcctccagcacctgcaaaagctccgcatgtccattttgcacgctccctatcttctgtggaaaccagcgctgatccccgatcggatcgataatcgttgtctgcgtatagtcattttcacggaaatccagacttttcatcgaaaatacaaacgaataataatcgttttcgaacccgtttccctgaatctgatgaatctgcccggaattaaagaaaaagatatcgccttcttctcctcgcagctccctcccatccaccataatctgcagcgtcccttttgccacagtcaggatctccacatcatcatgccagtggcaggcgacaaaaatctccggtctcccgtgccttccctgctccgctgtataatattgaaacggaaaaagcagggacccatgtacccgcttttcctccagatcatttttcatatatcaactctctgccttttttaatttttcctccgtttttctcacggtaacgagataactggaaatcaggatcacatctgctccgaaccacgccagtacctctgccagaaatacaccggtctcgccaaccactgccggaagcagcagtgctgccgaagtacgcatgataagctcgccaattccggaaatcatcggccataccgtattgcccattccctgcagcgaagagcgaatgatatacagcacatacagcaccgggaggcagacacacatgatcgtcagatatcggtaagcaaccgatatcgtctccgcaatctcctgttccgttcccgaaacaaagccactgagaatcagatggccggacagcagcatcgtaacagcgatcactgctgaagtaaccactgccgccacaagtgccgagcgtactcctttatgaatgcggtccatccggactgcgccaaggttctgtccgacgtatgttgtcattgcaaatccgtaagaggaagttgcgatctccaacacgccatgcagtttgcttcctgccgtaaagcctgcaataaagaccattccatagcggtttaccacactctgtacgatcatgccgccgcctgcgatcagaaggttctgcagtgccatcggcatactgagaatgaacattccctttgaaagcctgccgtccaatctgaagtctgaccgtgcaagtgcaagaatttcaatctttctcacccggttaaagcacaggatacaggaacacagctgtgccgttacggtagcgatcgccgcacctgcaattccccatccaaacacagtgacaaacaaaagatccagcagaacattgacaattgatgcgactgccatcgcacgcagcggtgtctgaccatcaccaagagcccgaagaatcgctgcaaacaggttgtagccggtgatgaccggaatgccgaggaacgaaatccgcagatacaccatggcatatggtacgatttcttccggcgtactcagaagtccgagcattgcccgggcaaaaatctgcccgaatagaaacagtacaacagcacccaaagcggaaagcacggcagaatttccaactgcacgcctgagtttttttccatcctgcgcaccaaacgcctgtgacatcacgattgaaaatccctgtgtcagcccctgcagaaatccgagaataacccagttcggccatgtcgtcgcaccgagcgctgcaagtgcatccacgccgagaaactttcccactaccatgctgtccaccacggaatacagctgctggaatacatttcccagcatcagcgggatcgcgaatgcaatgatcagtgcgatcggttttccctctgtcatattctgaatgtgcggtcttttattatgtgatttccttttttttgattcttttacgccgtccgttttttcctcacggagtttttcgttcctacgttctttttcttcaaggacactttttttatcggtatacgtttcgtgggcgtccatttcgctgcctccttcatactgcggtcaagttctgcagtaaagcagacctttgcaagatccccttacaggattccatgacctatttctggcaagtatagcactcataaccaccccgaacaatatacaaaaaacgggattcattgtacaaaatcccgcttcttctgttaaaaatcatgcttttcgccctgtttttgatccaatttcctttttgggctttctctttaatttttactcttttcttcggagcagatcatactgcgccccctgtctatcgagcagtatccacagggactgttttgaatgcggagcactttccatctcctcaccatcatcatttcgaatggaaagaaccgtcgtgacgatgttatcaccgtttggcttcatgatctcaatctgctcaccgactgtaaacttatttctctgctcaatatggatgcgtccatcctccgccacatcgccgataataccaaggtatgtgtattcctttacgtacgtattgctgtcgtagatctgcgactcgtggtctggttttccatagaaaaatccggttgtaaactggcgatacgtacagttggaaatctgatccagataccagtccatattcgcctcataccgcttcggatctgccgcataatcatcaagcgccttacggtatgtccgcgccacagtcgccacgtacagcgccgttttcatccgcccttccaccttcaggctgtcaatgcccgcatcgatcagatccggaatatgctcgatcatacacaaatctttcgaattgaaaatgtaggtgcctcgctcattctcctccaccggaagatattcacccggtcttgtctcctccaccactgcatatttccatctgcacggatgtgtacaggcaccatggttcgcatctcttcccgtaaaataattgctcagaaggcatctgccggaatatgagatacacatcgcaccatgcacaaaggtctcaatctcaaggtcatccggaatatgctcccggatcgttttgatctcccgcatggacagctctctggcggaaaccacacgcttcgcgccaagctcataccagaaacggtatgtctcataattggtattgtttgcctgcgtactgatgtgtcgctcgatctccggacatacccgttttgcaatctgaaatacgcccggatctgcgatgatcagcgcatccggctttatctttttcagctctttaaagtattcctctacgccttccagatcataattgtgagcgagaatatttgctgtcacatagaccttgacgccatgctcatgggcaaacgcaatgccctccgccatctcttctattgaaaaatttttggcttttgccctcagaccaaacgcctctccaccgatatacacagcgtccgcgccaaaaataacggctgttttcaatacctccaggctgctcgccgggatcagtaattccggatgtctcatgtcttttctccgttctgtttccttgctgttatacagtcaaaatatgatatttcatactcatcatcatgaatatgcctgccttacttatgatacagatatatttttctgtttcacaggcagatggtatccttttgcttcactgtcaccgccgctccgtctccgaccggaacgatcgaagtcagcaggccatctgtatgcttaagcacatacaaatattcccgcatccgcttgtagatcgtgcggtttcggcgctccaccgcgtaatgcgactcaatgatgtccccgtcctgcagcacattgtctgagacaagcacgccgcccgtccggagcagccgcagcgcatccggcagaaaatgaatgtactgcccctttgcagcgtccatgaaaatcatgtcataggattcattcagccctttcatgatctccagtgcatcgccctccagcaatgtgatgcgattttcgcgccctgcttttttaaaattctcttttgcagccggaatccgtttttcatatttttcgatcgttgtgatctggcactcctccgacgtatgatctgccatcagaagcgcagaaaatccgaccgctgttccaacttccagaatctttttgggctgatgcacggccaggagcactttcagaaaactctgcatatcctggcggatgatcggtacttcgtcctgaagtgcctgacgctgcagcgcatccagaaacggaccatttccagtatccagtgaattgatgtaaaccgccatgcgctcctgtacgatcatacgtgtttcatttcctttctgcaatgacgtccacaggacgctgtcattttttctctcacaaattcagtcctcttgtcacatcctgcgtatcaagctcaacgctctgtgcgatctcagtcgtgaccttctgtaagatcctgcagactcgcagctcactgtgcagaaatgcatcgacctgcgcatcgcgccggaaatcctcatactcccgaccaaggcgctccatttcctcatacatgtcgaccgattcttttgtgttctgcacttcaaaaatatggcggcggaatcgattgattcgttccctcttttgcggatcctttgctacttcatcccttacacggcagaactcctgatactcactgctctcctggatcgccttcacaagctctgccgtacagctctctattttcttcatttatttactcaacttccataatgatcggtaatatcatcggacgccgcttcgtccgcttccagagaaactccccgagtgaatcgcggatcgcatttttcatcttgctccagtcggttacccgatgagacagacagttctgcatcgcatcctcgacgatctcacgcgcctcttccatcagatcctctgcctcacgtacataaacaaagccacgagaaacaatatccggtcctgccaggatctgatttgaatatttttccagagtcagcactgcgattacaataccgtcctctgccagatgctgacggtcacgcagtacaatatttccaacgtcgccgacaccaaggccatcgacaagaatcgcaccggtctgtacatggccagtcacctttgcactgtcctgatccatttcaagtacatcgccggtcttcatgataaagatatgatccttcggtataccgatgttttccgccagcgtcgcctgcgctttcaggtgacggtactcgccatgcaccggaagtgcatatttcggatgcaccagcgtatagatcagcttgatctcctcctggcatgcatgtccggatacgtggacatcctggaaaataacgtttgctcccttcatcgaaagctcattgatgaccttggaaactgctttttcattgcctgggatcggattggaactgaaaataaccgtatcgcccggcttgatcacgatcttcttatggacatttgctgccattctggacagtgctgccatcgattctccctggcttcccgtcgtgatcagcaccatctggtcgtccggataatttttcatctgttccagatcgatcagcgtattctccggaatattcagatatccaagctccgcagccgtggaaatgacattgaccatactgcggccttccactactacttttcttccatatttataggcggtattgatgatttgctgtacacggtccacattcgaagcaaacgttgcgatgatgatacggtgatcgcggttttccgcaaacagattgtcgatcgtgcggccaacagtacgctcagatgctgtgaagcccggacgctctgcatttgtactgtcgcacatcagtgcaagcacgcccttctttccgatctccgcaaaacgctgcaggtcgatcgcatcgccaaataccggtgtgtaatccaccttaaagtctccggtatgcactacgataccggccggagaataaatcgccagggctactgcgtcctgaatactgtgatttgtcttgataaactcgatgcggaactcgccaagattaatggactgtcccggttttacgactttccgtttagtgccacgcatcagattatgttcggtcagtttgcgctctatcagccccatcgtcaatttcgtcgcatacagcggcacgttcagctccttgagaatatacggcagcgcaccgatatgatcctcatggccgtgggtaaataccataccttttaccttactgatgttttctttcaaatacgttacatccggaatcactatatcaataccgagcatatcattttccgggaacgccataccgcagtccacgatcacaatactttcgttatactcaaatgcggtcatattcattccgatcaggccaagacctccgatcgggatgattttcagtttcattgtctgttcttttttcaatctgcacctccaaaactactgccatctccggaaaagcatcctgaaagctcgcctttttggcttttcagactatatttccgcacagcagcacacaaacagcggaacgcgccagtacgcgcatcccgtctttcaccggtaactttttttctatctgccttactgctttacgacggcacatggccgctttggcagttatattcttctcagctgattacaatatccgatgtttcaccgtttatcacagttccagatccacatcatccaaaagctctgcaaatatctttgataccgcttccagttcttcgtcatcctctacaaacacgtacctggcctctgcttctccgtcttcagagagatccttgagcagataagcctctgcctcatcctcttctgattccgtcacgagaagataggaaactccggcaatcctggtttcttccaccacaaagaacccgaccgcttctgtttctccgtccgggcaaaactcaattttcttcgtcattctttttcctttcaaggctgtcaagatatccctgcaggatatacactgcagccagcatgtctacatattcttttcgattttcacggcgcacgcctgcttcgatcagtgtacggtccgcagctactgtcgtaaggcgctcatcccacatgtgtaccggaagtccggttctgcgttcgagcattgccttaaactccatcgttttttctacacgttccccactcgtattgttcatgtttttgggaagtcccagcacgaattctgtcacctgatactctgccaccagtgcttcgattcttgcaagcgtcttcctcagtttattctccgatgtccgtctgacaatctcgattccctgtgctgtaatcccgagcggatcactcacagccacccccacagttttcgaaccgaaatccagtcccatgatccggatcattcgccgtcgttctgccaggatttattcttgatatattccctgagcagctcctcaaccagctcgtcacgctctaccttcataatcatgctgcgtgcatttttgtagcttgtaatgtacgtcggatccccggacataatatagcccacgatctgatttaccggattatagcccttctcagccattgcattgtaaacaaaatcaagcaccattttcacgcgggtctccgggtctgtgttaaaagtaaaatattgtgtgttattaatatctgccatttcttcacgcccttatcctaaactgtatttccattctattctaatataagaaccgaaatttttcaatattctattaactattccattccttttttcatcttgcaagttacgattcagaaattgtaactgttcagagccaagcaaaatttcataaaacaggcggaaaatgcttgcatttttaagcctgtttttgaaattttatttggcggatacgccacaccgacgaaatgcgtagcattttggaggttggctctgaacagttaccagaaatttattctttcaacgtacagatatgtgctgccggtcccgcggtcagaatcccacgcaccgtttcatttgcataatcgcggtccgccaaaactgcggctcttatatattctttcgtatatccggtaaaatattcctttccggcaatcgtatttttttcttcaaagagaatctctgcttcccgtcccatccagctttcttcaaatgccaggcggttttcctcaccaagcgcgatcagccgctcgctgcgaaatgccttgacctgctcatccacctgatccggcatcactgccgcacgcgttccctggcgcttcgaatatttgaaaatatgtgtctcgtacaatttgatctgacgaagaaattcttccgtcactgcaaactcttcctccgtttcgcccggaaagccaacgatcacatcggttgtgagcgccggaagtgtaaatgcctcccgcagaagctcacatttttcccggaattcgcctgatgtgtagcggcggttcatccgtttcagaacggtatcgcagccgctctgcagtgaaagatgaaaatgtgggcagacttttggaagctctgccagcgtgtatgcaaatttttctgtcacaatcccaggctccagagaaccaaggcggatcctggagatgccgtccacctcatgcactgcctcgattaatgccgtcagatccataccttcgcccagatccacgccgtaggaacttaaatggataccggtcagcacgatctcctggcatccgcttgctgcaagtgcacgtacctcctgcagaacatcctgcgtatcgcggcttcttaccctgcctcttgcaaacgggatgatacagtacgtgcaaaactgattacagccgtcctgtactttgatatcggcacgcgtccggttttccgtgcggtcgataatcaggttctcatactcttttgtatgattaatatcaattttttttgtcatcacaccggatggttcttctgctctttttccggctcttttttgttcaaaatcccgaatcactgaaaccagctgattcttctggttatttccaagaataatgtcgattgccgggtctttttccacgcctccgtccgctgtctccacatagcatcctgctgcaaccacgatcgcatccggattcatttttctggctttatgcaacatctgccttgattttcgatccgcaatattggtcactgtgcacgtattaatcacgtatacgtcggctccaggttcgaacggcacgatctcataaccgtcttcctccagcagctgacgcatggcttctgtctcatatgcatttaccttgcacccaaggttatgaagtgctgctctctttttcattcttttccctccgttttcggcaaattaacgaataattcctgttatcttcgtatgttttcagcttgacttttcccggttcagccgttaagatgatgctgtaacaaaaaaaactgatttgggaggattatagcaatgaaaacagttcagatctctttaaactccatcgataaggtaaaatctttcgtaaatgatattacaaagttcaacaatgacttcgatcttgtttccggaagatacgttatcgacgcaaaatccattatgggtatcttcagccttgacctgtccaagccgatcaacctgaacatccatgctgaagagaacatcgatgagattatgacggttcttgctccgtacatcatctaatgtatcggaacatttaccacatctgatttgacagattttataactgctgcaggaatcctgcagcagctttttttatgcctttattcagctttactcgacccagatggtctctgtggtctcgatcgcagtttttaccagctcgtcgatcttctcatccagctttcgctcagacgcctcgataatatgaatgtttggctttgttaccggatgctttgccacaaagatcgtacagcagtcctcatacggcagaatcgatgtctcatacgtatcgatcttctccgagatatcaatgatctcctgcttgtcaaatccgatcagaggacggaataccggcatctcgcacaccgcgttcgtcgcagccaggctctgcatggtctggcttgctacctgcccgatactctcaccggttaccagtgccagagaacctgtctcctttgcaaaatgctctgcgatccgcatcatatagcggcgcatgataatagtcaactcatcatgcggacatttttcataaatatacagctgaatatccgtgaaattcacaacatgaagattgatcggtccggcatacggtgtcagctttcttgccaggtctactaccttctgttttgcccgctcgctcgtataaggcggcgcatggaaataggttgcatccagcttgacaccacgcttgcagatcatgtagcctgccactggactgtcgattccgccggagagcagcagcattgcttttccgttcgtaccaaccggcattccgcccggtcccggaataatctttgagtaaataaaaatctttccgctctcacgaagctccacataaaccataatctccggatgatgcacatccaccttcaatcccggaaactctctcaggatacgctcgccaaggatcgcatttacttccatcgactcaattggataccgcttgttcgcacggcgcgtatgcaccttgaacgtctgatgctccagatcgtagacgtttttcagaaaagtcagcacatcgtctccaagtgcctcaattcccttatcctccgcctgcataaccgggcagattccgacgataccaaaaacatgctgcagatgtccgaccgtctcctcgtaatcatattctccttcacagttcacaaaaatgcggccctgctccttatatacggtaaatgttccatcacactttttcagtgcatgacggatctggcgcacaagcgcgtcctcaaagagatggcggttctttcccttgatcgcgatctctccatatttgatcagaaatgtcttaaacatgtgtaattcctttcctttttcagtgttcttctgttctgcctgatgcgcgcgcattctgatccatgccattctgatcaaaaaatcagcggctctctttgcgcttcttttgttcccacaggcctgtcaaaacggtcgctttactggtttcatcgctcagctctcattatcggctgatcaatcaatgtcttgcatatctgcgcagcaccggcagcagttcccgcagcgctgcaagcgcatagtccacctcttcatccgttgtaaaacggctgaagctgaaacgcagggttgattccagcagcggctgttccatatggatttcttttaatactgtgctcaccggaagcttcttattcgaagagcacgcagagccggacgatacgtaaatccccttctcctccagcgcatgcagcaatacctcgcttcgtacccccggaaatgacgcactcacgatatgcggtgcacctgcttctccgcgctgcgaatttacgatcactgccggatattccttttttcctgcgtgaagtacctccatctccctgccgatctgctcaagcccgtcaatcatccgctctttcagttccagaaaatgcgcatagctctcttcaaagtgtgcaaatgtctgctttgcagcttctccaagcccggcagcacccggcacattgtccgttccggaacgcatacctttctgctgtccgcctccgtagatcagcggtctgatgtgcaccttgtcgctcacatacagaaaaccggaacccttcggtccatggatcttatgtccgctgaccgaaagcagatcgatactcatctttttcggatagatcggcagctttccatatgcctggattgcatctacatggaacagaatatccggattcttctttttgagcagcgctcctgcctccgcgaccggctcaatcgctccgatctcattattgaccatcatcacagacaccagaatcgtatcctcgcgaatggcatgctccagatcctcaaggctgatatggcctttttcatccaccggcagaaacgtaatctcatatccctgctcctgcagaaactgcatcggcatcagcactgccgcatgctcaaccgccgtcgtgatcaggtgctttccggcacggcgctttgcatatgcgccgccgatcagtgcccagttgtttgactcggtgccgcctgaagtaaaataaatctctttctcgtttaccttcagagacttcgcaatgatctccctcgcgtctttgagataatgttcggcctccacgcccttcatatgcttcgaagatggatttccataatcctccatcattgtctttactacaatatcttttactgattccagacagcgcgttgtcgcggaattgtccagatatgcttccatgttctgtttcctcacttttttctgctgttttatttcgatcctttttttgcagaatcgtctccatacatcggctcttattgtacaggaaacagggatgaaatgcaacagggaaatccagcgcatggataatgattcacgatccgtcttgctgtctttcagatcataaaaaagccccggcagcatttcccgtttctgattcttcttaccaggaataccgccagagcttctttgcgtccaaaaatatataacagcttatcatccggaatccataacattgcgtgtcatctcttactatgaaactgtaaagcggacattcgcaatccgcttcgcgacctgcgttcaaaccgctgctttactatcgcttcactcaatccaggtccagctgcagcatcagcgccgagagcactgcaagtcctgctgtctccgtccgcagaatccgatgtccgagcgtaatcgggtgcacacctttttcctgtgcatacgcgatctctgattcttcgaaaccgccctccggtccgatcaggattgcaacggatgtccccggctgcacttttgcaagaattgcacgggtctgttccatcccctctgcgcattcatatgggatcaggcagacatcatacgtctccaccgcataaataaccgcctcacggaatgaaaataccttcgtcacctccggtatcaccgtccgcttcgactgctttgcagcactctcggcgatcgcattccagcgttttcgtttggattcctcttttttctgatcgagctttacgaccgcgcggtgggtcgccatcggaaccacttcgtacgcgcccagttccaccgccttttgaataatcagctccatcttgtcacttttgggcagaccctgaaataaagccagtttcgatggaagctccgaggatgcttctttttgctcaaggatttctgcgatgacttgatcttcctgcagtctgcggatctcacagaaatattcttttccgtccgctccgctgctgacggtgatcttctctcccggcgtcatccgaagtacgtttcggatatggttaacatcactgccctcaatccagatctccttttcgccgatctgctccggcgcaacaaaaaaatgatacatggctcctccgcgatcaattctttcttgcagtaacggatacccagtcgttctggtgggttacttccagtacttccagtccggctgcctttactgcctcaactaccgtctcttccttctcatcaatgataccggaagtaatgtagattccgccctttttcatctgatgaatgatcaccggtgtcagcggaacgagcacatctgcaagaatattcgccgttacgatatcatatttttcatagccgactgcatcctgcactgctttgtcatcaatgatgtttccgatcatgacatccatactgccatccgggatctcatttgcttccagattttcctttgctgccgtgatcgcacacgggtcaagatctgttccaaccgcatgcttcgcaccaagtttcagcgctacgatggaaaggattccacttccggtaccgacatcaagcagctcggtctccggtgtcacatattttttcagctgacgcatgcaaagttgcgtcgtctcatgcattccggtaccgaatgctgtacccggatcgatatggatgatcatcttatccgcatcctccggctgtacctcttcccaggacggaatgatcagaatgtcatcgacataaaactgatggaaatactgtttccagttgttgatccagtccttgtcttcagtctggccttcctcgatggtgccctcgccgatatccataaaactgcggagctcctcaagtccctcgtttacacgggcaaggatcgcctctttgtccgcatcctcctccagataaaagctcagataggcaattccgtcatcctccggggcatccggaaggatatctacaaacatctgctgcttgtcggactcggaaagcggtaccttatcctcaatctcaacgccctccactccggcatccgccagtgtggagatcacaatatcttctgcctctgtcaatgtctttaaggtaaatttattccagcgcatttccccatacctttctttttctatactttcacttatttccagtggtacgcacacatttccctgtttctcgcatccaactctgcacatcggaagccatgcatctgcaattttcccactgcattttatcaatttagtttaacatagcccctgacagaagtcaattacagcaaaaaagcccctgcaaactgctatgcagaagctttttcttacctaattttctgttatttctcattctggccgtccagatcctcaaaggtctctttcagcttattcatgaagcccttctttttccccttctcggccttttccgttttcttctcctcgctgcgtccgaggctgttgcccgtctccatatcaaactccttcagagcctgctttgcagcatcatttaatttcgtcggaacctgaacaaccagtgtaacgtaatggtcaccacggacattcttgttgcgcagggatggaacaccctttcctttgaaacggaccttcgtatcggtctgtgtgccaggctttacagtatagatgatatcgccatccaccgtattaatcttgatatccccgcccagggccgcctgtgcataggacatcggtactgtcgaatagatatccatatcctgtctctggaagatcggatgtctgcccacgatcacctcgacgagcagatcgcctctcggaccgccatttgtacctggctcacctttttcacggatacggatactctgtccattgtcgatacctgccggaatcgttactttgaatttcttccggctggatgtataaccggtgccgcggcacgccgtacatttttctttgatgatctttccgcttccgccgcagtccggacacgtctgcacgttctgaaccgtgccaaacagagactgctgggtaaatactacctgacctttgccgccgcacttcgggcacgtttccggatttgttcctggctttgcgcctgtaccgtgacacgtctcacactcatccttctggttgagctcgatctccttctcacatccggaaatcgcctcctcaaaagtgatgcggacgctggtgcgcagatttgctccctgcatgggacctctggatgctccgcgtcttcttccgcccccaaagagatcgccgaagatgtcaccgaagatatcacccatatcgccgccgttaaaattgaagccgtcgaatccgccaaatccgcctgctccgccgccctgctcaaatgccgcatggccaaactggtcgtactgtctgcgcttctccgggtcactcagaaccgcatacgcctctgatgcttccttaaacttctgctctgcctctttatcgcccggattcatatccggatgatactttttcgccagcgcacggtatgcttttttcagcgctgcgtcgtctgcatttttgtccacacccaggacttcgtagtaatcccttttattctctgccataatttcttccaccttacctgacaatgcccctgcaggcactgcccacaggggtattccttattttatctgtcacctgccatacatttcatctgctgcacagcctgcgtttctttgccctaaagcgcttagacttctctgtaatctccgtctaccacatcatcatcctgcggagcgcttcctgtatttgcgctgcccatatccggacctgcgcctgctgctccggccgcacctgctgctccctgtgcattctcatacacttttgcgaacagtttctgtgcgctgttcatcagtttctccttaccagccttcagctcatcgatctgtgcatctgtcatgtcttccggatttgtcttctcgatcagttctttcagctctttcagatcagcctctaccgcactcttgtctgcagcgtcgatcttgtcgccaacctcttccatagccttctcggtctggaataccattgcatctgcatcgtttcttgtatcgattgcttccttcttcttcttatcctgtgcctcgtactcagcagcctcttttactgccttgtcgatctcggaatcagacatgttggatccggaagtgatcgtgatgtgctgctctttgcctgtaccaagatccttagcggatacgtttacgataccatttgcatcgatatcaaaagtaacctcgatctgcggaacacctcttcttgctggcgggataccatccagacggaactggccaagagacttgttgtctttcgcgaactgtctctcaccctgtactacatggatatctactgctgtctgattgtctgctgcggtggagaatacctggctcttctttgtcgggattgtggtatttctctcaatcagctttgttgctacgccgccgagggtctcgatggaaagtgacagcggggtaacatccagaagaaggatatcgcctgcgcctgcatcgcctgcgagcttaccaccctgaatagaagcaccaagtgctacacactcatccgggttcagagtcttgctcggctcatgtccggtcagctgtcttactttgtcctgtacagccggcatacgtgtggaaccgccaaccagaagtaccttggacagatctgctgcagtaaggcctgcatctttcagtgcgttctgtaccgggataaccgttctctctaccagatcatgtgtcagctcatcaaattttgctctggtcagatccatctcaaaatgcttcggaccagtctcgtttgctgtgatgaacggcaggttgatattggtcgttgtggaggaggacagctccttctttgccttctctgctgcttctcttaatctctgcagtgccatcttatcgttggaaaggtcaatgccttcttttttcttgaagtcctcaatcatgtaatcggtaactttcttatcgaagtcatcaccgcccagtctgttgtcaccgtttgttgcaagtacttcgatgacgccatcgccgatctcgatgatagatacatcgaatgtaccaccgccaaggtcatataccatgatcttctgctctttgtcattgtcaagaccatatgcaagtgctgctgctgtcggctcgttgatgatacgctttacatcaagtcctgcgatctttcctgcatccttggttgcctgacgctgtgcatcgttgaagtatgccggtacagtaatgactgcctctgttactttctcgccaagatagttctcagcatctgctttcagcttctgaagaatcattgcagagatctcctgcggagaatatttctttccgtcaatctctactctgtaatcactgcccatatgtctcttgatggaagagatcgtacggtctgcatttgtaactgcctgacgctttgccggctctcctaccagtctctcgccgctctttgtaaatgccactacggacggggttgttctggatccttctgtatttgtaacgacggttgctttgccgccttccataactgctacgcagctgtttgttgtaccaaggtcaataccaataatcttgctcataatcgtttcctcctcatcagattctgtctgtatcttaatttgctacttttaccatactgtgtcttacaacggtatcgcggtagaggtatcctttctggaactcctccacgatgatgttttcaccggcctcttcatcctccacatgcatcactgcattgtgaaagttcggattaaattcctgaccgaccgcctcgatcggcttgacaccgatgctctcaagagaggccatcagctggcggtaaaccttttccattccctgtacgaacggatcttccttctgctcgtctgtcacactggcaaacccgcgctcaaaattgtctaccgtcggcagaagcttttcgatcacgctcttcgcgccaacctcaaacattgctgccttctctttttcggtacgtttgcggaagttgtcaaattctgccatctgccgctgtacccgatctgtaagttcttcaatctgtgtgtcttttttatctttctttttctttccgaagaagcctttctttttgctgtcctcttcctcggaagatgcatcgtctttttcttccggctcagctgcagcttcccgcgtatcttccgtagcagcctgttcttctgcagccgtttccgtggtctctgtctctgcagcttccttcgaaagctcttcgtttctgttttcctccactggactttccacctttctccggcagcgctccacttggatcactgctttccttttttaaatatttcatccaactgtgccatcagcgttttcatcgtgccgactaccttctcgtagtccatacgcttcggtccaatgacaccgattttgccatacatgccatctcccagctcatacgtcgctgtcaccacgctgcaatcctgcatcgtcgccaccggagattcgcctccgatgtaaacctgaatgccggtttcatcattcgaatcctgactgataatatctgccagctctttcttatcttcaaatgcactgatcagctcactggctttctcacttgtgctcagctccggatatttgaaaatattcgtcgctccgctggtgtagatctccagatcatcgtcagaagtctgaatggcttcagccaccgtatcaagaacccggtctaccagctcactgtgtaccccggcctgtcctttcagctttgcaatcgtaccaagattgatctcttcgatcgtcagaccgttcagtgcgctgttcagcaggatattcatctcaagaaccgtcttctggtcaagtccgtgctcgatatcgagaagcctgttcttgacgacatttccttctgcaacgat

SEQ ID NO: 4060 - DNA, 32759 bp, Unknown
  16S sequences of unknown bacteria
ccgccgaagttctgccccgaatgcggagatatatttgacgataacgacaaaaaataatacgtctgagcaaattccggtaagcggctcggaaagcggcggaatctaagtttttcaccttacgtcaccgatcctgtcagatcgcatgtaacgtcttctgccatgccgtaaaatgcggcggcgcagtcgatacaaaatgtcaacaggagggcataaatgccaacacttcaagaatacaaatgcccgtgctgcggcggcgagatcgtcggagacgcgaacaccgcggcatcctcgtgtccgttctgcggaaatcccgtcgttatgatgaggcagttttcgggagcgctcggacccgactttgtgacaccgttcaagccggataagaaagcggcaaaggcggggcttcagaagcatctgacgggcaagcggcttctgccgaagatattcaggaatcaaaaccacatcgacgagatcaagagcgtgcacgttccgttttggctgttcgacaccgtgaccgcagagagcagcagcgtacagcttcacggcggcaaagcgaagtatgcgctttaccccgtgtggattctgaacaccacatggaagggtcaaaaatacacctttgcgatgaacggacagacaggaaagtttgtcggtgatctgccggtagataaggcggcggcgcgaaggtggaaactgattctcactgcggctttttctgccgccgtttacgctgcggcgtggcttctctggtttctcgatattctttaaggaggaattgaaatgaaaaaattatttgcttttctcctccttgtctcgcttacgctttcacttgccctccctgcggtcgcgcttgatcccaccgacgatcttatagttgacgaaacgggctcgatatcgcgccacgatctcggcagtctcaacgatcttgccttgacggcatccgaaaaatgcggcattgaaataatgtttcttctgaccgacaaagcggatggcaatgaaatcgcggattatgccgaggaagcaccgatgggcggctcgggacattccgttcttcttgcggtcaacgaaaccttctggtacatacgctcacgcggcgatgcagcagtgataacggacgacgaggaggagatcctcttcgaaaaattcgcagacggcagcggctacgtcgatggaatagaggaatacatagcggaagccgaggattattttgttcagcttcacaaaagtgatgccgccgattcgacagaagccgacgcggcgggcaatgaaagcgccgaaacccagccgccgcgcctcgtggacgatgccggtcttctctccggttcggaaaagcgcactctcaccgccaagctcggcgaaatcagctcaaggcagaaactcgatgtcgtaatcgtgaccgaaaacggactcggcggcaaatcgatacgcgactttgccgatgattacttcgactacaacggatacggatacggcaaaggaaaagacgggatactgcttctcgtcgatatggattcgcgcaattattggatgtcgacccgaggctatgcaatagatgtcttcacggatgcggggatagattatatcggcggctgcttcaaggacgatctttccgcgaaaaattatttcgatgccttcgacaccttcgcggataaatgtgacgaattcataaaccgcgcaaatgacagcgagccttacgacacgggaactctgccgcgtgcgcccctttcgaagatttggatcctgctgtcgatcattataggattcattatcgcttcgatcattgtcggaggaatgaagcgcaaactcaagaccgtccgaccgcagaattctgcaaacagctacctcaaagaaggcagcctcgatctgacagaaagcagcgatctcttcctgtacaataccgttacgcggaccgagatcccaaaggatgacgacagcagcagcggcggaagcagtacgcatacttcttcatccggctcgacccacggcggaggcggcggaagcttttaagcaaaatccgcatcatttagagagatacagtgtctcgccgtaaagtcaaataaaatcgaaaatcggtcgtttaccgtaattacgtcaaacgaccgatttatttttcgctccgtccgaatgaggcagggcaaaaagcgttacaacgctgtccgctcatccgccgcggtcggcattttggtccggcgaaagattcacgccgtatgccaaccgtgggagaatcacgcccggcagttcatgcgggacagtgagcggaggcacatataaagagcgcaaaacggaaattccgttttgcgctcttttcggttattcttcttcgtcggtgaagtcgtcggaatcaatgtcctcgtcttcatcttcgtcttcgtcggaatcgatatcctcatcgtcaagctcatcgtcggtgaaatcatcaccctcgccgttcgggaggttatcgtcttcgtcctcttcctcacgctcgctcagggatgcaaccatcgaaagctcgttcagaatagcgtcatcggaagagttatcctcgatgcgtaccgagcggtactgctctatacctgttccggcagggatcagcttaccgataataacgttctccttgagtcccataaggtggtcgaccttacccttgatagccgcctcggtaagaaccttggtggtctcctggaaggatgccgcagaaaggaaggattcggtgagaagcgaagccttcgtaattccgaggagcacgggagacgaggttgcggggagaaggtctctttcgcccgcgtcgatacgcgcctgaatagcctcgttctcggcaaggaactcggtcaggtcgatcgtcgagccggagagaagctgagtgcttccggaatcctcgaccttgacctttctggtcatctgacgtgtgattacctcgatgtgcttatcgttgatattgatgctctgtgaacggtacactctctgcacctcgcggatgatgtaatcgtaaaccgcgtcgatgccgtttatgcggagaatgtctgccgggctcttgtagccttcggtaaagtcgtctcccgcagagaggtactgaccgtcctcgatagtgatcttggttccgaagggaacggaatactcaagcggctcgcttccgtcgtcgggcaggatcttgacggtacgcattttcttcgcttcgtgaataaacgcagtacccgacttctccgccacaaaggaagtcttcttcggcttgcgcgcctcgaagagctcttcgactcggggaagaccctgtgtgatgttgctgcctgcgacacctccggtatggaaggtacgcatcgtaagctgtgtgcccggttcaccgatggactgtgcagcgatgataccgacagactcaccgatagtaacgggagtggaatgtgcgagatcggagccgtagcagtgtgcgcatacgccgtgacgcgcgcggcactgaagcacggtgcgtatctcgacacgctctatgccggcatcgatgatcttcgagatcgtcgcctcgtcaagcatggtgttcgcctcggcgatgacctcgccggtctcgggatgaacgaccgcaccgacagtgtatcttccgagaagtctgtcacggagcggctcgatgacttccttgccgtccttgatatcgtataccacgataccgtgagtacttccgcagtcctcctcgcggatgatgacctcctgcgatacatcgacaagacgtctcgtgaggtatccggagtctgccgttttaagtgcggtgtccgaaagggatttacgcgcaccgcgcgctgcgatgaagtattcgaggatattaagaccttcacggaagttcgacttgatcggtatctccatcgtgttaccgctggtatcgaacatgagtcctcgcatacctgcaagctgacgcatctgggtcatgcttcctcgcgctccggaatccgacatcatcttgatcgggttgtagcggtcaaagttgtcctgaagtgcggtaacgacatcggcagtcgtctgttcccacacctttactacgttgttgtatctctcttcgttggaaagctcgcctcgcatgtagtgcttggagatcatttcgaccttcttttcagcctcttcgataagcgtatacttttccttcggtatagtcatatccgcaacggagatcgaaagtccggaacgggtcgaatacttgtagcccatttccttgatcgcgtcgagcatcgcggcggtggtgttgaagccgtgaaccttgatgcagcggtcgatgatctttccgagctgtccggatgtggtaacaaacatgatctcaagatcgagaagctttgcgggatcggaacggtcaacgtatccgagatcctgaggaatgttgcggttgaagatgagacgtccgagagtagcgtcgattatgcggctctcgagcttgccgtcaatctccttctcaatgcggaccttgatcggcgcgtgaagtccgagaagtccgttctgatacgccatcatcgcctcgttgaagtcgcggaacaccttgccctcgccgggctctcccgctttatcgagcgtcaggtagaacgaaccgagcaccatatcctgagaaggaacggcgatcgcacgtccgtcgacgggcttgaggaggttgttcgcggaaagcatgaggaatcttgcctctgcctgagcctctgcggaaagcggaacgtgaacaggcatctggtcgccgtcgaagtccgcgttgaacgccttacaaacgagcggatgaagctttatcgccttaccctcgacgagcacgggctcaaacgcctggatcgacagacggtgaagcgtaggcgcacggttgagaagcacgggatgctctttgataacattctcgagagcgtcccagacttcgacgttcaccttttcgactttcttctttgcttccttgatgttcgacgccttctgcgtctcaacaaggcgcttcataacgaacggcttgaacagctcaagcgccatctccttcggcagaccgcactgatagatcttcaggttcggtccgacgacgataacgcttcgtcccgagtagtcgactcgcttaccgagaaggttctgacggaagcgtccctgcttacctcggagcatttcggagagcgacttgagcggtctgtttgaagggccggtcacgggctttccgcgtctgccgttatcgataagcgcgtcaacggcttcctgaagcatgcgcttttcgtttcttatgatgataagcggagcgcgtagctcgagaagtcttttcagacggttgtttctgttgattacgcggcggtagagatcgtttagatcggaggatgcaaagcgtccgccgtcaagctgtaccataggacgtatttccggaggaattaccggaacgacgtcgaggatcatccattcggggcggttgcccgaggtgcggaatgcctcgacaacctcaagacgcttgataatgcgaacctttttctgtccgctagccttttcgagctcctccttgagctgctttgatatcgcctcgatatcaagctccgcaagaagctcctttatcgcctccgcgcccattccgacgcggaaatcatcctcatatctctcatagtagcttctgtactcgctctccttgagaagctgatacttcgccaagggagtattgccgggatcgataacgatatactgtgcgaaatagagcaccttttcgagaagtctgggagaaatatcgagaagcagacccattctcgaagggatcgcgcggaagtaccaaatgtgcgataccggagcggcaagctcgatatgacccattctctcgcgtcgaaccttcttctgcgttacttcaactccgcacttctcgcagatctttcccttatgacggatgcgcttatactttccgcaaaggcattcccaatccttcgtaggtccgaaaatacgctcgcagaagagaccgtcacgctccgccttcagagtacggtaatttatggtttcgggctttttcacctcgccgtatgaccagcttctgatcatctccggcgacgcaagaccgatttttattgaatcaaacgtatggttgttttccatcggcattatacctcttccttattactttgatcacgcatcgcgtgccggaattatcagaaatcgacgaattcgtcatcggagtcgctgtcgtccgatgcgttatcgctgtcaaaatccgcatccgtgaaggaattgtagagatcgtccgtctcaacgctttcgccgagatcggcctcggtcacgtcgggacccgtggggatattcggcgcttccggagcatcgtcggtaaagcttgtcatctcgatctcgtttccgtccttgtcgaggacacggatatcaagagcaagagactgaagctccttgacaaggaccttgaaggactcgggaacgcccggagtcgggatgttctgacccttgacgattgcctcgtaagccttgacacgtccggtaacatcgtcggacttgacggtgaggatttcctgaagcgtgtaagccgcgccgtaagcctcgagtgcccaaacctccatttctccgaaacgctgtccgccgaactgcgctttaccgccgagcggctgctgcgtaacgagggagtaaggacctgtcgaacgtgcgtggatcttatcgtcaacaaggtgatggagcttgaggtagtacatgattccaacggttacagggttgtcgaaaggctcgcccgttctgccgtcgtagaggatcgtctttccgtcgacgatcttctgcttttcctcgccagtgacgggatcggtaacggtaaaggtcgtctttccgtcggtgcgctcgccggggagaacatcacgctcgagtcccgccatcttgaggcactcggtaatatccttctccgttgcaccgtcgaatacgggggtcattatcttccagccgagacgctttgccgcgataccgaggtgaacctcaagcacctgaccgatgttcattcgggaaggaacgccgagggggttgagcacgatatcaagcggagtgccgtcgggcaggaagggcatatcctcgggaggaagtatacgggaaacgacacccttgtttccgtgacgtcccgccatcttatctccgacggatatcttcctcttctgtgcgatgtataccctgacaacacggtttacgccgggggcaagctcgtcgccgttctcgcgggagaactcccggacatcgacgattattccgttttcgccgtgaggaacgcggagcgaagtatcgcgcacgtctctcgacttctcgccgaagatcgcgcggagaagtctttcctcggcggtaagctcggtctctcccttaggagtgaccttaccgacgagaatgtcgcctgcgcgaacctctgttccgatcttgataacgccgtttgcgtcaagatccttgagtgcgtcttcgccgacgttcgggatctcgcgggtgatctcctccggaccgagcttcgtgtcacgcgcttcgtgggaatactcctcgatatggatcgaggtgtaaacgtcatcacgcacaagacgctcgttgagaagtaccgcgtcctcgtagttatagccttcccatgtcatgaatccgacaagtgcgttcttaccgagtgcaatctcaccatctgcggtgccgggaccgtcggcaatgacctgaccttcatcgacgctctcgccgacgtcgacgatcgggcgctgatttacgcacgttccctgattggaacgcttgaattttataaggtggtaggtgtccttcgtgccgtcctcgcggcggatgacgatctgatccgacgttacggtctcaaccgtacccggattcttcgcaactatgacaactccggagtcaacggcagccttgtattccataccggttccgacaatcggagaatccgtaaccataagcggaaccgcctgcttctgcatgtttgatcccatgagtgctcgggagttatcgtcgttctcgaggaaggggatcattgcagtcgcaacggaaaccaccatcttaggcgaaacgtccataaagtcgatgcgggatgcttcaacctcgatgatctcgttgcgatcgcgcgccgcaacgcgcttattcacgaagcggtgattctcgtcgagaggctcgtttgcctgagcgataatgtatttatcctcaacgtcagccgtcatgtacacgacctcgtcggtgacgacgccggtttcgcggtcaacgcggcggtacggagcctcgatgaagccgtacttgcttatgcgtgcatacgttgcgagtgacgatataagtccgatgttgggtccttccggagtctcgatcgggcacatacgtccgtaatgagtatagtgaacgtctcggacatcgaacgatgcacggtcgcggctcagccctccgggaccgagtgcggagagacggcgcttgttcgtaagctctgcgagcgggttattctgatccatgaactgcgacagcggcgacgatccgaagaactcgcgtattgcagttacaacgggacggatattgatgagcgtctgaggagtgagcgtttcgttgtcctgaacggtcattctctccttgacgatcttatccatacgggaaagaccgattctgagctgattctggagaagctctccgacgcagcgcaggcggcggttgccgagatggtcgatatcgtcggtggtaccgatgccgtgcgaaaggcagaggaggtagttgatcgacgaaaggatatcctcgcgggtaatatgcttcggtgaaagctcaccgcggcggcggtgtgcaagctcaatcacttcctcgcgctcgccctctgcctcctccatgatctcgagaagcacgtcggtgcggaccttctcgtcgatgcccgcctcggtgaggtcgtagccgagaacatcggcggggtaaaccgtcatgttggagaacaccttgacctcggttccgtcctcaagacggacgtaaacctcgttgacgccggcgcgctcaatctcgcgcgcatcctcttcggttatctttcttccgtcctcaaacacgatctcgccggtaacggggcttatcgcgggacgcgacagcgtctgtccgagtacacggtttgcgacggaaagctttttatcgtatttgtacctgccgacgggggcgagatcgtaacgctttggatcgaagaacaaattgtttataagtatctcggcgctttcaacaatcgcaggctcgcccggacgaagcttcttgtatatctccttgagagcctcctcacggatgctcgtgttgttctcaacggcaagtccgacggtctcgtccttgtcaagcgtcgccgaaagctttacctcgtctccgaacatatcgcgaagctcggcttcggactcgattccgagcgcgtggataagcacggtcacggggattttgcggttcttatcgatgcgcacatagaaaacatcgtttgcatccgtctcgtattcaagccatgcgccgcggtacgggatcaccgtagtggcgtaggtgtgcttgccggttttgtcgatatccgaagaatagtagattccgggagagcgaacgatctgcgaaacgataacgcgctccgctccgtttataacgaaagttcccttgtccgtcattatgggaaaatcacccatgaatatctcggattgcttgacttcgcccgtcagcttattcgagagacgcacatcgaccttgagcggcgccgcatagtttgcgtcgcgttccttgcactcctcaacgggatattttactttggattcgtcaatggaaaaggatacaaagtcgataaagagatttcccgaataatcaacgatcggggaaacatcctcgagaacctcctgaattcctttttccatgaaccatcggtatgaacccttctgcacttcgagcagatcgggcatctgaatgggctcttcgatcttggagaagctcattctcactttttttccgactttctggggcttgaccatctggttttcagccattaaaaatcaactccgttcttcatgtccttcgcgcctcaccgccgctttattctaaacgccgaaagtgccttttcaggcaatttgagcgatcctgacgcagtttattattttatcattaatatatacgaatgtcaatgaatacggagaaaaaagccgcttcaccgggtcattatttaccgtatggtttcaaaacatttacaataatgttaaatgtaaaaaaactgtaaattataaaaagagctgcccggtcagcttatgccgagcagctccgatacggtaacgaaggaaaatccccgcctcttcaattccggaattattttttcgagtgattcgggagtcggcgacttttttgcgatataatcgtgaaaaaggatgatatcgccgcttttcgccttgccgagaacctccttcgtaatgttttccactttattgtgcgcccaatcgcgcgtgtcgatcgtccacagtatcactgtatagtcgagcctgtccgcgatacggaatatcgaatcgttgtaaagacctcccggcggacggagaaggcgcgtgcggtactcgttttcctcgaagaccgcattttccgccgacattatctcctcgcactccttccggtagctgagcttcgagaggttcgcgtgggaaaatgtatggtttccgagctcatgcccgtccgcaatcacgcgcccgacgacatcggggtatcgctccacattttccccgacgacaaaaaacgtcgcgcgtactccgtactttttaaggatcgcaagaattttgtcggtatactccgggtgtggtccgtcgtcaaaagtcagcgcaagcttcatatcggcgtcgggatttgaatagtgaacgcatccgctgtcctcctccgccgctgccgtccccggaagcgatgcaagcacagcggcaagagacacggcgcaagcaagaacaagcgccgagatcacaaacaaacgaagctttggcatcttcatccttccttcggtgaaagaagctcgtcaagcgatccgaatctgtagccctctccggcaagctccgtgataacatcgccgagtatttccgcgtttgtcgcggaggtcggatgaagaagcattatttcgccgcagtgaacggaatcgataatttttctttttgccttctccgcgctcatctgacgcgcgttgtcccaatcggcgtatgcgaagctccacatcaccgtcgtatatccgagctcggaggcataacggaggctgtcgcggcttatctcgccctcaggaggacggtaaaacttcgaaatttcgattccgagctcatccgacgcgcatttttcaagctcttcaagttcttcggcgaattcttccttcgacgacacattcgacatgttccgatggtgcgcggtgtgattgcagaccgtgtgcccctcttttgccatgcggcgcacaagctcgggattgcgctttatcaggttttcgaggataaaaaacgcgccgcagaccttcttctcgccgagaacgtcgagtatcttctcaacatttccgttttcgtatcccgcgtcaaacgtgagatacacgaccttatcgcccttttcggcagccgttttgtttatatatacgccgccgtattccgtaagataggaaaactccgtcgggcacggcgggattttcccgtccttttcatgcttgcagtaccagccggcggcgtttatcgatattgcaaaaatcacggacagagccgcgagtacaagtgataatcttttcattttacattccttttcgccgcagagcgcggcagaacagattgccgaaagcataattgtttcgttcaagattatctttccgtcgaaagcgccgtatatcctctgaaaaaaacggaatttgcgttttataatccgcggacaaacatattttgattttgaaaataaaaatcccccgccgtatgcggtgcaaagcgcactgcacgttcgtcggcggggatttttcattttcgttttccggcaaggcgatagctttcgtcaactctgcggcaaagctcatccaacggcagtgcgccgtcgggcacgaccgtataccaatgcttcttattcatgtgccatccgggatatataccgttctttccgacatctgcggttatatcctccggtataccgtgaagattgattatctcgatctcgccgtcattttctatgcctatcctgcgcgcggcgaccgccattataacgcagtaccactttccggtatccgcgcggcgaaggatcgcgcatcgcggagaatcctcccacagaaattccggatcgcttccgtatgtgtttttcgcatatgcgatcagtttctttaactcatcggagcgaaagacgtccgaaacgaagcatttctccgaaatatcacgaagaagtgcttcaaagtcctccctgacgccgccgacaaagctgccgcttgccatatccgacagatgaagcgtatattcttcatccgaagccggatcggtcaccgaagccgccgcgcgtccgtccgggaaaatatcgatcttcatccgaaaaaggctttttgaaagaaccgcctcaaaggaaagctttctttcgttttcacaaaagccgtacagacgcagcttttcggggactgcctttttcatcgcaaaaaatgaagttacatcgtgcacggtatacctccgaaatcgttatttcgcgctgaactgactgttgtaaagctccgtataaagtccgccgcgtccgagaagtttctcatgggttccgctttcaaagacggtgccgtccttcatcacaatgatgcagtccgcgtcacggacagtcgaaaggcgatgcgcgacgacgaacgaggttcgtccctgcatgagccttgtaaacgcatcctgcaccttcacctctgtgcgcgtatcgatggacgaggttgcctcatcgagaatcagcaccggaggtctgagaagcatcaccctcgctatgcagagaagctgacgctcgccctcggagagatcgtcgtcgccgatcacggtatcgtatccatccttaagcctctttatgaagccgtgtgcgcgcgccgcctttgccgccgcgattatctcatcatcgctcgcgccttccctgccgaacgcaatattctcttttaccgtggcgtgctttatccatgtgtcctgaagaaccatcccgaaattctcgcgcaggctttttctcgtaacgtcggcgatattctcgccgtcgatcagtatgcttccctcgtcgacgtcgtaaaatctcataagaaggttgataagcgttgtttttccgcatcccgtctgaccgactatcgcaatcttctgccccgccgatgccgaaaaatcaaatccctttatcagcgtgcggcttttatcgtatgagaaagcgacgtttctgaactcgacgttgccctgcggattctcgagatctcgctttccttcgtccgagctttccggagcctcgtcgatcagctcgtatattctcgcggcgcaggcaaaggcgttctgaagctccgcgacaactccggaaatctcgttgaacggctttgtgtactgattcgaatatgcgagaaagcttacaaacgcgccgacggtcattcttcccgccacggcgaaaagtccgcccgcaagtccgacaacagcgtagatcaggttgtttataaatctcgtcgtcggatttgtaagggatgaaaagaacgttgcgcggagagaatacttcctcagcttttcgttcacgccgtcgaatctgccgagcgcgcgctcaccgtaggaaaacgcctgaacggtcttctgattctggatcatctcattcatgagtgaggtctgctcgccgcgcgtctccgactgctttttgaacatatcgtacgtccggtttgcaataaagcgagccgtgaaaagcgacagcggagtaagaacgaccacggcaagcgcgatggagggagagatcgaaagcatgaatccgagcgtgacggcgacggtgacgacccccgtaaaaagctgtgagaatccgagaacgagaccgtccgaaaacgcttcggcatccgccgtgatgcggcttacgatatctccgtagggatgcgaatcgacatacgacaccgggagatgctgtatccttccgaacgccgcgtcacgcagctcgcgcaccgcgttgtatgcgatacggttattcacggaggtcatgacccactgaagcacaccggacacaagcgcgcacacggcaagcgttacaagcgcacgtatcacaataccgaaatccacgctgcccgccgacgcgatcccgtcgatcgcgcgtccggcaagcacgggaatgtaaagcgacaggactaccgaggcaacggagaacacaagagataaagcaatgagaaatttcgaatgcgatacggtttttacaacacgtccgatcacagatttgtttttcatccgtcagtcctccttttcaagctgggattcgcatatttcgcggtagacctcgcacgacgagagaagctcggcatgtgttcctactcccacgatcatgccctcgtcgagtacgacgactgtatcggcgccgcgtattgcggatacgcgctgcgacaccgttattacggtcggtgaaaaatccgtatttcgcagagctcgtccgagcgcggcgcccgtcgcgtagtcgagcgcgctcgccgcatcgtcgagtatcagtattttcggctttccgacaagtgcacgcgctatcgtcatgcgctgtctctgcccgccggacagattccgtccgtcctgctcaagctcaaaatcaagaccgccttttttgccttctgtcatttccttcgcctgcgcggtctcgagtgcttcccatatttcaccgtcggaagcgtcctctttgccgaagcggatattgtcgcgcacgctccccttgaagagcacctttttctgcaagacagtgccgatcattttgcgaagagatttaaggtcgtaatcctttacgtcgtttccgcacacgcgcacagttccgtccgtgacatcgtaaaatcgcggaataaggctgacgagcgagctttttcccgagcctgtcgagccgataattccgacgttcgatccgcgctttatcttcagatttatatcgtgcagcgcttcctcggctccgccgtaggaaagtgatgcgtgatcgaattccacgtcaaattcgctgtccccggcggagactgctttgccggacaccgtgcccggctccgtatcaagaactgcctgaacgcggtttgcgcaggcgatcgatttcgtaatgctgattataagccccgcaagcttcacaagctcaatcagtatctgcgacatataattataaagagcaacgacatctccgcgggatatgcttccggaatcgacgcggagcgctccggtatagatgagtacggcgacggcaatgtttatgagaacgagcgtcgcaggattcatgaccgcggaaattctgccgaccgcgacctgcatatcggtgagcgcgcggttcttttcgccgaaatcgtttatttcctcgtcctccttgcagaaggcgcgcaccactcttgttccggtgaggttttcacgggtaatgccgagaagcgcgtcaagctttttctgcacctttttataaagcggtatgcatacgagcataacggcaaacacgaccgccgcaagaagcggaacggtgacgacgaacacaagcgccgactttacgtcaacggtaaacgccatgatgacagcgccgaaaacaacaaacggagagcgcaggacaagacgcagcgtgaggtttatacccgtctgtatctggttaatgtctccggtaagccgggtgagcagcgtcggcgcgccgaaagagtcaagctgcgaaaatgacagcttacctatatggctgaacaggtcacggcgcagatcggtcgttgaacctaccgccgcctttgcggcaaaatactgtgccgctatcgtgcatccgagcccgaaaagcgcaaacatcccgagcaggatgcacctgtttataatgaagcttttgtcccccgccgcgattcccctgtcgatcacgtcggcgatcacaagcggtacggcaagctcaaaggcgacctcgacaagcttaaacaccggagcgaggatgctttcctttttataatttccaagatatccgataagtttgaacatacatacctctttatatattatcccgtaaatgataccactaacgccgtattttttcaagtacgaaagacaaatttacccgaaggcgcttgattccccgatcgcaaagagcctcggcaggtgcaattgacaaaatattcacgcggtgatataatgacggtatgcgttttttgaaaggaaataaactatgatatacggtaatgtgctggaggctgtcggacacacgccgatgatccggcttaacaaaatggcggaaaacgggtctgccgaaatacttgtgaagtacgaaggacttaacgtgggcggatcgataaagacgcgcaccgcgctcaacatgatagaggacggcgagcgccgcgggctgatcggtcccgacaccgtcatcgtcgagccgacgagcgggaatcaggggatcgggcttgcgctgatcggcgcggtgcgcggataccgtgtgaagatcatcatgcccgacagcgtatccgtagagcggcgcaagctcatcgcgcactacggtgccgaggtgattctcgttcacgacgcgggcaacatcggagacgcgatcgaggagtgccgtcttaccgcgctgaaaatggcagaggaagacccgaacgtcttcattcccggtcagtttgaaaatcccgcaaaccccatggttcacaagcatcacactgcgctcgagatactcgagcaggtcgcgggaccgatccacggcttctgttccggcgtcggcaccggaggaacaatctccggcatcggcgaatcgctcaaagcgctgaatcccgacatcacggtatgggcggtcgagccggagcatgccgcgatactcgccggcgggaacatcggcacgcaccttcagatgggtatcggcgacggacttataccggataacctcaaccgcagcatatactccgacatatgcataatcagcgatgaggaagcgatcgaaaccgcacgcgatcttgcgcgtctcgaaggactgatgtgcggcatatcatcgggcacgaacgtcgccgccgcacggcgcatggcgcgcatactcggcgaaggaaaaaccgtcgtcacggttctgccggacaccgcagaaagatatttttcgaccccgctctttgacgaataaagcgttatttgctaataaaactccgcccgcgaaagcgggtgcggcttagagatttcgtaatcccggaaatatcggcatagtcatgttatgcggctgccgcgcggttttctttatgcagaaaaacgcctccgcacttcaaatgaagtgcggaggcgcttttaatttcatgctttacggtatcatatccgtacggtttactcggcggcgatctccaaagtctcgcttccgccgtcccagataagctcaagcgttacgggaatgttcgatttgaccgcgacacggggcttttcggcgctgtcggcacgttcctcgcaaataagatcaagcataccgttcttgccgaagggatatctctcgacgccgtgcttttccgtgcggtttacatgccatgtgatcttgttctctccgacgttgctcttgattccgaatacaaactcgaaaagtatcgttatcgggaaaagtccggaccagccgacgaaatcgccctttgcgggtctgccctgctcggtggcttcgggagcgtaattctcccacagcgtacccgtcttatcgaacactccgaccacgttttcgatgttggagcatgcaatgtcatatgcgatcttgtgatatccgtatttttcaagtccgcgcagcaccatgtaggtcgtcggagcccatatcgatccgcgccaataaccgccctcggcgatgtagtcgggatgatccgcggaaagcgtgggcggacggtgatgacggttgaactcgtccttgttttcgaggtgagcgacaaaggcgtccgcgcgatcctcgggaacgactccggcaaggagtgcccaatatgccccgatcgtcttcactccgctaagctttccgtctctccaaagatcgtaataataatgggtcttctcgtcccacagcttttcgttcacgacctttttgagcatctcctgctcctcgacgaggaacgcggtatcctcttcgcgtccgagaatcttgcccatttcgatgaggatgtgaccgcttaatatcatctggaagcatgcatcggtccagaccatgtgaccgtgcgagaacagaacgttgtatccggggctcattcgcggctgattgtccatgccgcagccgagacccgatgtccaatatgtgccgtcctgccatgtatgattatcgtggagccacttatgatacgcaagcagcggcgggaagatctcggctatacgcagacggtcgcctatgttgagatagtattcccactcgcaccacggcataacgttcgggcccgttgcgctcgggtcgaagcgcgtgaatttttcgcttccgtcatcctcttcgatctcgcggcttatgaagccgtcaacgtgctgatgagaatagaagttgttgagcgtattctgaaaattgaacacacgcgagccgtatttgccgaacatgaggatgaacgacgaatcccacatgaaggtgcatccgttgaatgcagtgtcgataaagttgctgacaaatccgcttccgggcgtcgggcggcgcagattgccgaaggcgatctgccaagccttgtcgtagcaggcgatcgcgtcgtaatgtccttcccataccggcttcgggagacggtcccgagcctcctcgtatgtcggcagcggcgcgtcctcgggctctctgcctacgaaagtattctcactgacgtatgtacacggcgcgtaagtccactccgaatccgaaaagaattttcccatgattctgacctcgtttcgtttatattttattatagattccgaataacgtaagcggcggaaagcgccgctttcttccgactatattataactcagcgacgacaggcagtcaagacattctgccgtctctcggcataaaagcgaaagaaaaaggcgcacgcttcatcgaacctcgccctttcgaaaaatttcccgccgcgcagaatgcgcggcggggcgtaatattgtcagtctccgagaaattcctttgcctgacccgtcacggcggtatcgtagcatgagaacatctcgtctgtctttgcgcggtcggggctttttgtgagaaggctcaccacgggaacgattacaagtcccgcaagcataacgaacgctccgcagtttacgggtgagcgaaggatcgcggggaaatacgaacggaagatcatatttgccgtcataactccgacaccgaagacgaagcttgcggcacagcccgcggcagtggcgcgcttccaataaagcccgtatatgaacggcgcgaggaatgctcccgcaagcgcgccccacgagatccccataagctgagctatggatgaaatgttgagcttatactgaacaaacgcaaggactgcggaaattatgataaacaccgcgatgagcacacgcattaccgaaagctgcgtacgctcggtcattttcttcgatgcgggcttgattatgtcgatcgtgagcgttgatgacgaggtgagcacgagagaggaaagcgtggacattgacgcggacaggacgagaagtatgactacggcgatgagcagatcgggcagattttcaagcattttggggattatcgcgtcatatccgagcgttttcacatcgatgtcgaagaggcgtccgaagccgccgaggaaatagcagccgcccgccacgacgacggcgaagagcgtggagatgaccgttcccttttcgatcgccttttcattctttattgcgtagaacttctgcaccatctgcggaagtccccatgttccgagggaggtgagaatgaccacggcgaagagcccgaacggatcgggtccgaagaacgatgcgaacacgccgggaatattcgtttcgggatcgctcacatttgcaagtgcagcaatcgagcctgtaaagcctccgttgagtgagagaacggcggcgataacggcgactatgccgaagagcattattatgccctgtatgaagtcgtttaccgcggtagccatgtatccgccggcgataacgtaaattccggtaagcagcgccatgacgagaatgcagatgccgtagtcgatcgagaacgccatggagaagaggcgggaaagtccgttatacagcgatgcggtatagggaataaggaagacaaaaacgataagcgcggcgctcaccttcagcgcgggagacgagaaacgctttccgaaaaattccggcatggtcgccgtgccgagcttctgggtcaggagacgggttcgccgtccgagcacgacccacgcgagaagagagccgagaaatgcgtttccgagcccgatccatgtggacgcgacgccgaatttccatccgaactgaccagcgtatccgatgaagataaccgccgaaaaatacgatgttccgtaagcgaaagccgtcagccacgggcccacgctgcgtccgccgaggacaaatccgttcacatcggtcgtatggcggcggcacgatatgccgacgccgaccataaccgcaaaaaacagcacaagaagaattactttaactgccatagcttatttccttaccttccgcgcgtcggggcgcgcatttcattttgttgtctgagcttcgacaagcctctctccgcagtatatctcgcggagcttcggtttctcgatcttgcccgtgggatttcgcggaacatccgcgaagattatctttctcgggcgcttgtaccgcggaagctcggcgcagaattcgttgatctcttcctcggttgcgctcacgcccggcttcagctcgattatcgccgccgcgatctccccgagacgttcgtcgggaagtcctatcaccgcgacatcctttatctttatattcgcacggagaaaatcctcgatctgcacgggataaagattttctccgcccgttatgatgacgtccttcttgcggtcaacgagatagatgaatccgtcctcgtcggctttcgccatgtctccggtatagagccatccgccgtgaagcacttcggcggtcgcctcgggattcttgtagtagcatttcatcacaccgggaccgcggacagcaagctcgccgacctcgccctgagggacagtgttcccgtttccgtcaacaatgtcggtctcccaaaggtagcccgccttgccgatcgcgccgaccttgtgtatgttttcgactccgagatgcacgcatccgggacctatcgactcggaaagtccgtagttcgtgtcgtactgatgattcggaaaatgctctttccaccgtctgatcaggctcggcggcacgggctgcgcgccgatgtgcataagtctccactgcgagaggcggtattcggaaagatcgacctctccggaatcgatcgcgtcgaggatatcctgcacccacggcacaagcagccacactatagtgaccttctccgcactcaccgtgtgcagcacccattccggcgagacaccgcgcagaagaaccgcgcggctgcccgtgaggaggctgccgaaccaatgcatcttcgcaccggtatgataaagcggagggatgcagaggaacacgtccgaatgcgtctgcgaatgatgcttctgctcggtcttggcggaggacacaagcgcacggtgcgaatggagtatcgctttcggaaagcccgtcgttccggacgaaaaatatatcgccgcatcgtcgtcgtccgttatatcgaccgcaggcgcgaccgatgagcagtacgaagtcataaccgaatattcgtcggcataatccggacattccttacctacaaagaagaagttgccgacaccggggatctcgtcgatcactgcgttcacgcggtccgtgaattcgggtccgaacacaagcaccgacgcatccgcaagatcaaggcaatactttatctcatcggaggtgtaccgataattcatcgggacggcgagcgcgcctgtcttgagtattccgaagtatatcggcagccactcaaggcagttcataaggagaatcgccaccttgtcaccgcgcttcactccgcgcgtgagcaggagatttgcaaagcggttagcctttgtgtcgaactccttccacgtcatctcgcggcggtacttctcgtcctccgcggattctataagtgagaattccctccacgttgtgcttttgtgcggacttcttgcgggatttatctcaacgagagcgacctcgttagggtagatctttgcgtttttctcaagatattcgcaaattggcatttctttttcctccgataaacgattcggacgcggcagcttgccgccgtgccgtaaaaatcaaaaagtcctctgtgagaaaactcacagaggacggataaaccgcggtaccacctcagttttccgcatccttacggaatacggactctcaggcacggacggacaagccgacttatgcccccgcactgtaacgtgtgcacacgtcgcagcctacgctttcgcttcggtgcgctactcccggaatgtatttcgtgcgctctgccttaccgccttgcaccgtccggcggctctctgaaaggaactgcgcattacttctttccgatcactgcatttcttttttcagaatatcacaattttttccgtttgtcaagtactgcggtcgaattttgtaaatatttttttgcaccgcttttccgaccggatacaggcagctccgcgcgccttatccgccgcgggaatttacgcaaaatcggtcgtgacgtgtgtttttctcttgatttattcccgaaagcgttatataatatagtctgatatattattttataaatccgactgcggcgttgcgatgcgccgacggagaaaggcagctttgcgttgcaaggcgaggtgacggaatggaacgagtatcgaaaatcaactactatcttgatatcgcacagacggtgtccgagcgttcgacctgcctgagaaaaagattcggcgccataatcgtcaaaaacgactccattgtttccacgggatacaacggtgcgccgcgcggacgcgaaaattgctgcgatctgcgcttctgcctcagagagcatctcggaatcccgcgcggcgaacggtacgagatgtgccgcagcgtccacgccgaagcaaacgcgatcatcgcagccgcacgcgaaaacatgatcggctcgacgctttatatggcgtgcaccgatcccgccgacggaaaggtgatcggcggcgtctgttcctgcatgatgtgcaaaaaaatggtgataaacgccggaatcgaaaagattatcatacgcgaaaacgcaaacgaatattccgtttacgagataagcggatgggtcgtcgacgacgacagcctttccggaaaattcggatattgatacaaaggaccttcaaaaatggctgaagaaagtattgccctcgaagaaaaaaagatcttcactccggaagttccggatatacttctgtttgtatgcacgggaaacacatgccgcagtccgatggcggcggcgatgttcaatttcctgtttcccgaaagaaacgcattcgcggtttcggcgggactttgcgccgacggctctccgatctcggaaaatgcgaaggaggcactgcggcggcgcggagttccctgcactgtcgaaaacaactatacagatcacgtctcgcgcacggtaacgcccgagatgatcgcgacggcatcgcaggtcataggaatttcctcccgccatgcgatggctctgatctgcgcatttcccggacaggctgagaagatctccgctatgcccgaggatatcgccgacccgttcggcggaacggtcgacgactatgtgcgctgtctcgcggacatcgaaaaatctcttcgggcgatgttcggtgaaaaatgaagatcacagtttcaccgaccgtgccggaagagcttgacggaatctgcacgatagaaaatgcatccttctccgatccgtggagcagaaggagctttgcggaagcgctcgaaaatcccgtatgcagatttttctccgcacacggagaaggcggagtactcatcggatatgcgttaataagcgttctgttcgaggatgccgagattctttcggtcgcggttgatgattctttccggagatgcggtgttggacgcgctcttatgcacgccatgctcaccgaagccgtccgaagcggagcgcaggacatattcctcgaagtaagggaatcaaaccatgcggcacggaaactgtatttgtcggaaggctttacggaattcggacgcagaaaaagatactacagaaagccgaccgaggacgcgatactgatgcgcctctcagccgattccgcaatgctcggataaatccattatattaatgaaaggcaacatcatatgctgattctgggaattgaaagctcatgtgacgagacctcatgtgccgtcgcggaaatgtcggacggagagcggcgtctcctctcctgcgcaatagattcgcagatcgagacccatgcaaggtacggcggtgtcgttcccgaaattgccagccgcgcccatgcggaggcaatctgccccgttgtcacttccgctgtgaaggacagcggaatttccctgtccgaaattgacgccgtggctgtgacctgcactcccggacttatcggatcgcttcttgtcggtgtaagctacgcgaaagcgcttgcgttctccctcggagttccgctcgtccccgtaaatcacatcaaagctcacgttgccgccgcgtattttccttatccggagcttgagccgccgttcaccgccgtcgtggcatccggaagccacacctcaatttacagcgtcaccgggtattcctcctttgaggagatcggcacaagccgtgacgatgccgccggagaagcattcgacaaggtaggacgtgttatcggtctttcttatccgtgcggacgcgaaatggacgagcttgccgcgaaagcgggagacatcgagcggataaaattcccctccccggcgctgcgcggcgacacatttgatttttcgttcagcggactgaaaaccgcagtgataaatcatgtgcacaatctccgtcagcgtctcggaatcggagacggaccgctgcccgaggaagagagagtacgaatcgccgcctcgtttaccgatacagtcaccgaggcgattgccgaaaaagtaagcgcggcacttgcggaatatccgtcggataaaatcgtccttgcgggcggagtagccgccaattcccatctgaggaaacgtctcgaaaagctctgtgcttcgctcggcgcgtcgttttttgtacccgagatcggactttgcggcgacaacgccgcgatggtcgccgctcagggatactatgaatacaaggcgggaaagcgcgccgacgagtcgctgaacgcttatgcatccgaagaagccgccgagactgccgggatattttaggcaaaagctgtagaaaaccctttttatgcaatcatcttattctgctttcgcctaacatttctacagggttttctacagactgtagaaaactcgctgttcataaaccgtgtttaaaagcttccgatgccttattttcaaggagaattcgctgcttttgcgcatctgacgcaatttacggctgttgtctataatcggaagtcttaaaaatgttcaaaaatacctacatataaggagacacgaaaatgtcaaaatatgatgctcagatcaaagaagcctgcgaaaaattcgctcaccttctcgaaggtcagctcgagcgcgttgaaagaatcaacgcggcagccgactttgtggattacgataagcttgacaagattgtgatcggcatatgcggcggcgacggaatcggtccgatcataacaaaagcgtcgcagaccgttctcgagaaacttctcgccgaccgtgttgcagcgggaaaggtcgagttcaaggtgatcgacggacttaccatagaaaaccgcgccgcggtaggaaaagcgatccccgacgatgtgctcgcggagctcaaatcctgccatgtgatcctcaagggaccgaccaccacgccccgtgccggtgatccgtggcccaatatcgaaagcgcaaacgtggcaatgagaaaagagctggacctctttgcaaacgtccgccccgttaaggtgcccgataagggaatagactggaccttcttccgcgagaacaccgagggaagctacgcagtcggaagccacggcgtcaacgtcaccgacgatctcgcaatggatttctgcgtaacgacaaccgagggtacaaaccgcatcgcgcgtcttgcgtttgattttgcgcgcaaaaacaacaagaaccgcgtttcgatcgtaaccaaagctaacataatcaagaccaccgacggaaaattcctccgcatctgcgaggacatcgcaaaggaatatccggaaatccagaccgacgagtggttcatcgacataatgacagctaagcttgttgacgaaaagcgccgcaaggacttcaaggtattcattcttcccaatctctacggcgatatcatcaccgatgaggctgccgaattccagggcggcgtaggcactgcgggaagcgcgaacatcggtaagcgctatgcgatgttcgaagcgatccacggctccgcaccccgcatgatgaaggaaggacgcggcatttacgcagatccctgctccatgctccgtgcaaccgttcttcttctctcgcacatcggtgcgaccgaggaggctgcaaagcttgagcgtgcgctcgacttctgcatgtttgaggataagaagtacgttatcaccggacgcgacaccggcacgacctgcgaacagttcgcacagtatgtcatcgacaatctttaattattcatttgtctaaaacaaaggaaaggagcatcgcatgaagataagcttcagatatgacgacggggttgcggtcattccgaaaaaagtactcgacaaaagcgcagcacaggcatcccgtgaagatcttctcgttctcctttccctcgccgccgatcccgcagtgcctgccgcagagcgcgccgaagctttagggatcggcaaggacgagcttgagcaatcgatctcgttttggaagcggaacaagataatctccgtcgagcttgacgaaggcgaaaagcttcccgcatacaaaaagaagaacgcggaatcggattccgaagcatattcggcatctgcaaaaagtgcatccgtcaaacgtcatctccgtgacaattcccttccgacctataccgcagacgagcttgcctcggcgcttgatgttcccgattcgcgcaagctgatcgaatactgtcagcaatcgttcggcaggatattcaacatgtccgaatccgaaaaggtcatcggaatcgtggattacctcggcgtatccaccgattatgtcgccatgctttgttcgcatcttgcagccgacggaaagcgttccgtccgcgctcttgaaacggaggcgatatcgctgtacgaccgcgggatcaccgattttcaggggcttatcgaatatctcgatctccgcgagaaaagcggtgcgctcgaagcacgggtgcgaaagcttttcgggatcggcaagcgcacgctcactccgaaggagcaggcatttgtcgaagcatggacgaagtccgctcttccgtttgatatcgtggagcacgcctacgaggtgacggtcaacgccacaggcgaagcgtccatgccgtatgcaaattccgttcttgaaagttggatcaattccggattttctacacttgacgaaatcaaaaaatccgaagagaaatataagaaaagcgcaaagccgaagggcagaaagcagcaggaaagccctgcggaatcctcatttgcgaccgacgatttctttgaggctgctctgcgccgttcctacggagacaccgaatctgattccggcggcgacggcaagtgaaattccccgatgaagatatgaaaggacaggctttatgacacgaagcgagaccgtaagaaacgtaatagaggaattcgatctcaggcgtgccgcggacgaacgcgaatacgatgcacggctcgccgagcttagtgaaaagatcccgggattcggcgatattacgcacgccctgtcatccgtcgggctgcggatactcgatgccgcgatgaaaggcggcgacaccgctgcagcagtagccgaagttcgccgcgagaccgaaaagctgcgcggagaacgctgcgatcttctcgaaaaagcgggatatccgcgggattttgcggaccgcagatacaggtgcgaaaaatgctccgactccgggtatgaggggctgaaaatgtgcacctgcctgagaaaggagatcatcctcgcggggctcaagaattccggtctcggaaggcttgcggatacgcagagctttgataccttttccgaagaatactactcgggaaaggatcttctcacggtgcgccgcaacgcctctgtccttcgatcgtttgccgaaaatttttcaaaggatacgaccgacaattttcttctgatcggtcccacgggcctcgggaaaacccacctttcgacttcggtcgcagttgttgtgatcgggcggggctttgacgttctctaccgaaccgcgcaggagatcatgtccgtatttgaaaagcagcgtttcggcagcggaacacaaggggacggcaccgaaagcgctttctacgattccgatctgctgataatcgacgatctcggcacggaaaccgtaacgcagtacacggtggcgtggctttatgacatcgtaaattcgcggatcaattcgagaaagcccaccgtaataaacacaaatctcacccatgaggagcttcgtcagagatacgcggaccgcataacgagccgcctgctcggcgaataccgtcctcttgtcttttccggatgcgatgtgcgactgcaaaagctgagccgctgagtttttccctgcctcgcgacgcaggcgcgaacttttatccgaaaacggcttgacatatcgcgtgcaacaaggtaaaatatattcgtttgaaactatatcacataaatgtgaggtaattgaaatgaaaatcggagtaatagttgaatccttccgccgccccttccgcgaaggagttgaggtcgctgcttccatcggagcagccggaattcaggcatacgccaccttcggaagctatctcgatgtcgagaagtcgagcgatgagcatctcaaggaagccctcgacatcgtaaagtcgaacggtctcgttttctccgcgatctgcggcgatttcggaaccggatttgcggatgcggaaaacaatcacatatacgttgagcgttcaaagagagtgctcgatcttgcaaagaagcttgagtgcgacgttgttaccactcacatcggcaccgttcccgccgaagagtgcgagaagaaggaagtcatgcgcaaggcatgccgtgagcttgctctttatgccgattccatcggttccgcattcgcagtcgagaccggtcccgagaccgcgaagatcctctgcggattccttgacagcctcggcgcaaacggtgttcgcgtaaactttgaccccgcaaacctcgttatggttgccggagaccgtccggaaaccgccgttcatgagctcggaaagtatatcgttcacacccacgcaaaggacggtatcaagctcgacggaagccttgacaaggacatcaagatcaccatcggagacgttgcaaagggtcacgacgagctgctcgcaatgggtcaggcgttcatcgagctgcccctcggacagggcggcgtaaactttgacacctacctccccgagctgaaaaagaccggattcgacggcttcctcaccattgagcgcgaggtcggcgaaaatcccgaagcggatgtcagaatggcagcggacttcctgcgcgaaaagatcgcaaagtacggtctctgatagaattccggtattgcggcagggcaaaaagcttattgctttttgccctgctttattgtataattgtttcggatcgggaatcaaaaaaacccggactcgaaagtccgggagattttgtttatttatccgcggcagccgcagccgtttccgcaattgctgaagctgatgaggagtacggcgataactataatccaaaggcactcgttatcaaaaagatcgcaaaggcagttcatattttattatccgcggttcgctcggagagcgaacccttccctttcataattatttatcaaggcattaaccgtcggctccggctgcacggcgcatattcacaacgcagatacggaccgcacggcttcgcccctcacttcagagcgtttccttcgctctgatattatgttatgcaaagggtaatgctttgtgaatcagtgaaggtcgagatgctccgcgttgaggaagtcgttcgcggcggtaaagctattcgcgggaatgtgcgcggacgcaccgcattttttgcatctgacggttatttcctcatcgtgtatttccgcttcgtagtcgccctcaccgtcctcgcagttgcaggagatctcgccctcgtcggaaagatcctgaataacgaatttcacgatctcgcggatctgcggatcggtcatgaaatctccgccgcggtgtgaagaaagctgatcgaacgtgctctcgccgagaagctcggcaagctccttctcgccttcctccgccgccttgagcaccgctttttcctcgcctatatagcagatatcaagtccggaatacgcgcacggcagcgtaaaaagctcccgcccgaaaaacatattccggctcacgaggaaattgtgcggcttcggacagaagaagcacgggacattaagccgcagctttttatccggggtatacactatggttatgtcgctctcgccgcacgggcatttcagccgcatcatatcggcgctgagcgtgaatgcgccgatcatgcttctgaccattgctccgcatccggggcagcgataggcgaccgttgttttcttttcgtcaagtatcatttgaaatctccgtaggcttttaactcatgcagaaccgcgcgcaccgcgccgatgcgcttcggcaggacgaatcccgtttttctgcatttgccgaatctgtcggcatcgatcggcaaagcttcatgccgatataattattatactaaatcatatacattttgtcaatcgataacgcccgaataaggaggtagcagcttgaaattcaaatattccgaagacatcggcgcagtgaccgtaagcgccgcgcagcttgcctcctttgcgagaaaacggcggagcgtgtcggagcgtatcgtgctccgtgaaatcgaacaccgtcccgcaggcgccgcacccggcgtaaaatatgcgtcagctgccgagcgaaaaggcacggtgcttgcggttgcggataccgcggatttcgtatatcccgatgccgtggagatcgtgcgcgagggaaagaaaagcgctctcaccgatgcggcgcttctcgccgagctttgcatatttggtcatctgttttgccgcgagcacggcaaaaagtccgtccgtcttattctcacgctcatctcaccgaagggggaagaaaagcattttaccgccgatgccgacgcggggtttctctcgggcgcatttgaagcgctccttgcgagagcgtttccgttcgccgagatcatcgccgcgcatgcgaaaaatctcccggattttgcgaacgcgccgtttccgttttgcgacatacgttccggtcagcgcgatttcataaacgatgcataccgtgcaataaagtcggggacaaggcttatggtatcggctccgacgggaatcggtaaaaccatgtccgcgctttatcccgcggtgcgcgctgtcggcagcggatattgcgaccgtatcttctgcctctgtgccaagaacgtcaccggacgcgcatttcggacggctgccgaaacgctgtctgcgtacattccggagcttcgctgcataaccgtcggcgcaaaggaaaaggtctgccccttccgcggcgaaatgggattttcgtcccagcggtgccgcctcggatgcaatctcatttcatccgtcggcgcggcatcatacgaagcaaggcgcgatgccgctctgctcgagcttctcggaaaagcgcacatattttcgcccgagctcatcgaagagtgcgccgccgactatatggtatgtccctacgagctttctctcgacctgagcgaatactgcgatatcataatatgcgattacaattacgccttcgacttttccgtccgcttccgcagatactttgaggatgtaagggaaaactacgtctttcttatcgacgaggcacacaacctcccgaagcgcggaagagacacatactcctcctcgctcgaccgaagcgttgcggacactctcaccgatcttatttccgagggggttcttcctcccgacggcgctctgaaaagcgcgatacacgcgcttgtgaatgcgtttgacacgatcggcggatacgccgacgcggaatctcagcttgacggcgatatgaaatacggcttttaccgaagcaccgccgttccgccggagcttacggcggcggtcacggtgctttcaaaggtgctgtccgccgtaatgcgcgaccgcgccgttatttcgcgcgccgcagaaaacgccgccgcctcggtacgcaaattcatctccgcgtgcggtcttttcgatgagcactacacctttttcgccgaaaaaagcggagacgagctttcggtcaaaatcatctgccttgatccgtcggagctgctcgaccgcgcaatgaactgcgcgcgctcatcgatccttttttccgccacgctctcgcccgaagattactttgcggacgtttgcggatgca

SEQ ID NO: 4061 - DNA, 2278 bp, Unknown
  16S sequences of unknown bacteria
ggcacaggcaaggggcgactcgtcaagaccgtcgatatcatcgacaaagcaggcctttttgagattttgcgaaaggggaagtcccacggcggcagaggtggggctgacgtgcttgaaggaggcggcgcaggcaagccccgttgcggccttcagctccttcacaagctgatagctgttaaacgcgtcgagaaaatttatatatcccgggcggccgcacagtatttcaatggggagctcgcttccgttttccataaatatttttgacggcttttggttgggattgcagccgtatttaagctcgaattctttcatgatttgtcctcccgatcacttgtttttgttgatgattatctcttcggtctcgccgctcgaaagctcgacgctcctcacaaaaagagacaccttgttttgctcgttgagattttcccaaaccgtgtcggcaagctcttttgccgtatcgggaagctccaccgcctcgggctcgccctcaaaggagggaatggggtcgccgtcgcacttatatgtgtgaataaagtggcccttgcccgcaacgggggaataattatagaaaaatctgttgcagaccgacggatcgccgtcgccgctttttaaaatcgacagcgtgtattcaaaagaggcgttttcgcagtcatagaaattcacgccggaaattcgtggggtatagtttggcgcgtcgggctcgaattcgcgggtgaaaagagcctcctcaaaggtcgagccgcttttgatatagtcataaatcgtgtcggtttggtcgccgtttgtgataatatccacattttccaggtttaaaaagggattgtagattataagactggggtcggaaagctttgactcgtcaaaggctttggttctcatcccgccgtcaaacatctcaaaaacacggttgcggctgttgacgcttctgcccatgatgaaataggcaatcagcgccttttccccgtccttcgacattccgatgacaatgccgcgaccgggataggaattttcacataaaagtttctttaaatcaaacattttccgacctcttttcgattatttcctttgatattttttcggcacaaaggggaagtatcttccactcggcctgttccattactcttttttgcaaaatttcgggcgtgtctccgtcctcaacctcaaccgcacgctgcataattatcttgccgccgtcgggaatttcattgacaaaatggacggtggcgccggtcaccttgacgcccttttcaagagcggctttatgaacccgcagcccgtaaaaatcctttccgcaaaaggagggaatgagcgaaggatgaacgtttattatgcggttttcaaatcggcgggtaaaattttcgcttaaaatgcacataaacccggcaagcacgataaggtcgattttttcatcctcaagggtttttataaggattttttcaaaatcctcccccgtttcctttttgcctacaactaccgacttcacgcctgcatttttcgcccgctcgagggcaaaggcttttttgctgcttgacacaacaagcacaatttcgccgcttttgataattctgctttgctgtgcgtcgagaagggcctgaagattggttccgccgcccgacacaagcacggctattcttgctttttcgctcatttttatcacctcagcaaagttcgattttgctgtctccctttacgatttcacccatggtgtagggcttttctcccgcctcctcgagggttctcagggcgagggtttcgtcctccttcgacaccacaatactcatgccgacacccatgttgaaggtgttgaacatatcgtgagcggaaatgccgccctttttcgcaatcaggtcgaatatcgggagcaccttcacctttgacaaatcgatttttgcacaaagaccttcgggaatgcttctcggaatgttttcgtaaaaaccgccgccggtgatgtgagaaatgccctttaccttcaccttttcaacaagagaaagcaccggctttacataaattttcgtgggggtgagcagcatctctccaaccgatttgccgccgagctcttcaactggggcttttatgtcggaatgttccacatcgaaaacctttctgacaagggaaaatccgtttgaatgaacgccagacgaaggcagagcgataataacgtcgccctccttcataaggctgttgtcgattattttatccttatccacaacgccggtggaataacccgcaagatcatattcatcctcgggataaaagccgggcatttcggcggtctctc

SEQ ID NO: 4062 - DNA, 3451 bp, Unknown
  16S sequences of unknown bacteria
gaagcgcccggccgcaggttcttttcaaaaaacgcatagatgggcttgcccgtctcggcaaataccatgccggtatcaaaccaggccgcctccgccgtttcggtgggcagcacctcgtcaaaccgccttgttaggtattccatcgggttcacctgtgtgccgcacagcgcgcccagcgtattgatcttgggcattgccaggtacgcaaaatcaaacagcttggggcccttatgcccatttagggcggcttgctcggcctgcctatgcacctcggcgcgcggccgttcggcggggttgtctctaaaatccacaaaaaaccagggctgcaaagcgcccggccgcaaattgcgctcaaaatacgcatagatcggccgccctacgctgcgaaaggtcagcccggtatcaaaccaagccgcgttttccgtctgcgtggggaggatatgctcaaaccgctccaccagatactccatcggtacgatgcgcgcgccgctcagtgtgctcagcgcgttcaccttgggcatcgccaggtatgcaaagccaaacagcctaggccccttgtgcccgtcctcaggcggcgtggccggcttctgctcggtgggcgcctgcgccggtctgccccgatccggcttatgcttaggcggggtatttgcggcctttggcaaatgcaccagcgtggccgccgccgcgcccggcaccggataggtatcctccagcacaaagccctccatcgcctccataaacagctttaatttgccataccccatcgccttgtaatccacctggcaggcgcgcagaaaattgcctacgtccgccatcagcaccgtttgctgcccggcaaaatgctgcaaaataccctgccgcgccttggaaagggccgcctcgtcgtgggcagttctttggccctgcgccttttcctcccttttttccggcaaaaataccaccgtatacggcgggctgtccggatctgcaaagcgatcctccagcgtaaacgattccaaggccagcatcaagtcccgcagctttttatagcccagctccttatagtcgatgtgttcctttctcagaaaatttcccacgtccgccataaagacctctttatggcctgcgaaattttcacaaatcctttccgtcaatgcttttttgttcagtgtctgcactgttaaccttcctcttttcctaaattctcccggcctggcaaagcataccccagcgggccgcgctttgcaatgcctttccccctttttcgcggctgtccgcctcgcttctacggcatttcgacgtccacgcacgcccggcctgtcacccagcttttcgccgtctgctggatatccaaatgcaggggatgctgctgataacgccgtaccgcctccatcgaatcaaattctgcgatcagcgccaggtcatacggccccccgtttacattgggcagcagccgcagcctatgcagcccctcaatccgcccgggcaatgcggcaaaccgccgctgcaaatacgccagcttttgcgccgcgccctccgccttggcctgctctgtaaactgccagagcaggatatgctctatcatcttcctcgctcctttccctgtttcttagattataccacctgccgccccgtcttgcaggaaagttcggcccggtggtatactttttctgtcattctatcgtaggaggcctttgtatggcatctcaacgcttttctttcaaatacgggaaagagcagctttccctttccattgaacacgcgcgcagcatccgtgtgctggagggcgcgcccctgcccccgcttggcgatctgccccaggccttcttgcacggcatcacggacggggccattggcgccccgctgaaggatcggctctgtccgcaggacaaaatcaccatcgtcatcagcgatatcacccgcttttggatgcggcaggataaaatcgtggcccttctcacctcctatctgacggatacgctcggcatcccccgcgaaaatatcgccatcctcgtggcgctcggcacccaccggcccatgacggaggaagagctgaaaaccctcgtcacgccggaggtctacgcccgctttgccgtttccaatcataattgcatggcggacgatctcgtttttgtcggcaccaccgcccgcggtacggaggttagggtaaacccgctgtgcgcgggccgcaaggtcatcgtcatcagcggcaccgtacaccacctgatgagcggctttggcggcggccgcaagagcatcctgcccggcgtttccgccaagagcaccatcgtgcagaaccatctgcactgcctgcatgaaaccgagccgcgctcggccgataccatcggcatggccaaattgcagcacaaccccgtgcacgaagatatggcagaggctgcctcgtttgtcgatcctgtctttggcatcagcatcgtttccaatgccgaagggcagcactgcgccctatgctgcggcgattttgccgccgcgtgggaacaaagctgccgccaggtgcacaaagcatttggcctgcccatcgaccatctggccgatgtggtcgtcgtttcctgcggcggctatcccaaggatctaaacctctaccaggccgtcaaatcgcttttgaacgccgcccaggccctaaggccggggggcaccatggtctttttggcccagtgcccggaaggcggcggcgcgccggactttttcgattggatccattcgctggatgccggcacgctggatcgcgaccttcgcgccgcgtttaccattgcgggctatatcttctatgcatccgtagagaaaatcgaccgctgccaggtcaagatgctgtccgatatcgacccttccatcgccagccgtatgcacctgcaggccttttcctctctggacgctttgctgcaaacggtggatttttcaggtaaggacgtttacgtcatgccgttcggcggctttaccgtgccctatctaaaaggcagcgtgtaaaattttttcgcccccctcttgacaaacctcccccgctgtggtttcatattgctaaaccgttgacgtggagataaaacaggacacgcgcttttagagagccggggatggtggaagcctggcagtaagcggcctggcaaatggaccaccgagggcgcggggaacggggctttgctccaagtatgccgcgacgcgtcgccagcgttacccggcggggagtgtgtcggcactccggcaaagtgggcgcgttttgcgccaaacaaggtggcaccgcagagcatcacgcatctgtccttgtatgggatgggtgctttttttattgccgccgcccgcttgtcatcatcgtccgacgaaaatatttagttggaaggaagacttcacatgaaaaaaatcaccaaaaccctcaccctgttggccctttccctctgcctcatgctaagccttataggctgcggcggcgcgcccgcggacggcgctgtggatgaaaagctta

SEQ ID NO: 4063 - DNA, 32759 bp, Unknown
  16S sequences of unknown bacteria
aagccgaatatccggtgggcgcggatctttccctttcgggaactatttacccaatagaagaaccaaccaacccaggacaatttaacagcagactatattatgcgggaaaagggatatcctatacattgtacgcagatcatgtgaatcatatgggcggaacggtgcatcctgtgaaagaacaactgttgcggcttcagaagcagatcgggcagatctatgagacagtgttggaggagccggaagacggcattctgaaagctatggtgctgggagataagacggaactggacagcgaggtgcagaagctttaccagcaaaatggcatctctcatgtgctggcgatctcaggacttcatatttcactgattggtatgggactttataaaatgctgaaaaggattacaggatatgggatgatatcggcaatcccaacgatggctttgctcatggcgtatggttggatgacaggtggttctttatcctcggtgcgtgctgtcggcatgtgcgccattgcgatcctggcagatttggtgggaaggacctatgatatgctgactgccatgggcgtgatgcttctggtgatcgccagaaccaatcctctggcagtgaagcagagtgcattcttgctgtcctttggtgcggtgctgggaattgcatggtttggtccgttatggacactggaagagaaaaagaagaaaaaacgaaagtggagggaagggcttcagaccagtctgtccgtgctattgatgacattccctgtattgctgcagtttttcagtgagtatgctttgtattcaacttttttgaatctgttggtgattccactgatgagcgtgttgatggcagcaggaattctctgcggtgcggtgggacttctgaatcttcaggcggcaagactgccgggactggtctgccatggaatcctgtcggtctatcaacggatgggaaacctgtgcctgcgattgccgggttcagtgttgactattggaatccctgatccatggaaagtgcttatctattacctgactctggcactggcgctttttcttctatataaagagaaacagcgtaagaaatactggagaaagcaagaatcattcaggatctccagacggatcctctgctggtgccggggaagcgtactttttacattgctgctgttgtgcgtgcattatcagagtggaatggagatctgtatgcttgatgtggggcagggggactgcctgttctgggaactgccggatgggacgacgtttttgtcagatggaggcagtaccagtgtatcagatgtaggaaattatcggatcgtgccattcctgaaagccagaggagtgcacaagattgattatcttctcatttctcatatggatcaggatcatatcaacggtattaaggaagtgctggaggatggaagcattcaggtggagcaggcattgctgccgggactgcagaggaaagatgatgcttatctggagatggaagcacttctggaaaatgcaaatgtggagaagctctgtctgaacagtggagatctggcggcgcagggagattattccatgcgatgtctgtggccgcctgtggaaggacagacggatgaccggaataaaatgtcattggtcatggaggtggaatacggcgaatttcgtatgctgctgaccggagacattgatgaacaggcggagcgtcagctggcagcaacgggacaactggaaacggtggacattttaaaggtggcacatcacggatcccgttattccagcagctctgaatttctggcacaggccaccccggcggtcagccttatctcctgcagtgccaccaaccgatatggtcacccagggcaggagaccctggaacgtctgcaaactgaaaaaagtgcagtcagaataacaaaaaattgtggtgcgatctgtttatggaccgacggaagtgtaattaaattgaaaactgtgaaataatttcaatttaagccttccatttgtgaaaaatttttagtataatgggggatgttacactggtctgaaaaagatcaggagaaaaaagaagaattgaggaaagacaaatggaaaacaaaacagacttcaaaccgtatattccggcagacaaagtgatgcctgaattttcggtgacggctgcagtgctgggatgccttctggcaattctctttggagcagcaaatgcgtatctgggactgcgtgtaggtatgaccgtatctgcatcgatcccggcagctgtaatctccatgggagtgatccgcatcatcctgaaaaaggattccattctggagaacaacatggtacagaccatcggttctgcaggtgagtccctggcagctggagcaatctttactctgccggctattttcatgtgggcagtagagggaaaatgtgatgctcctggtatcctttctatcgcactgatcgcactgtgcggaggaatcctgggtgtacttttcatgatcccgcttcgtcaggcactgattgtagacgagcatggaaccctgccgtatccggagggaatggcatgtgcagaggtacttctggcaggagaagagggtggcgaaaaatctaccgttgtgttcagcggacttggaattgcagctctctataaattcatcacagacggactgaaactgttcccgagtgaggtggcatttgatatcaaaacacctatctacaccggaggagttggaatggatgtacttccggcactggccagtgttggatatatctgtggaatcaagatttcaagctacatgtttgcaggtggcgttctttcttatctggtgcttattccggctattgtatactttggcggtgaaagcctctctgtagttatggacagtgctggaaatgccatcgcgttcaatgcactgagcccgggagcgatctggagcaactacattcgttacatcggtgcaggtgctgttgcggcaggcggtattttaagccttgtaaaatctcttccggttatgatcaaaaccttcgtaaaagcaatgaagggatttggtaaaaacgcagaaagcggaagcagaactgaggtaaatatttccacaaaaacagtattgatcggtgtgatcgcagtagcagttgtaatgtggcttcttccggagatcccgatcagcctttccggtgcattgatcgttgtagtatttggtttcttctttgcatctgtttcttctcgtatggttggtctggtaggaagcagtaataacccggtatccggtatggctattgcaaccttgatcgcaacaaccattattttcaaagcaatgggtgtaactggtgtagaaggaatggttgcagcaatcagtgtgggaactgttatctgtattatcgcagcaatcgcaggtgatgcatctcaggacctgaagacgggatatatcgtaggtgcaactccgaaaaagcagcagatcggtgagatccttggtgcagttgtagctgcatttgcaatcggtggtgttatgtacctgcttcatgcagcatggggatttggttctgaagcaatcccggctccgcaggcttctctgatgaagatggttgttgagggcgttatgggaggaactcttccgtggacactggtactgatcggtgtgtttgcagcagtgatcgttgaaatccttggaatcccggttatggcatttgcagttggtctgtatctgccgatctacctgagtaccccgatcttcatcggtggtgtgatcagatggttcctggagaataaaaagaaatttgcagatgatgcaagcagaaaagatttcattgaccgtggagttctgtatacttctggtatgatcgcaggtgagggtctggttggaatccttctggcagtatttgctgttgtgggactgaactttgacttctctggtatctatggtggaagctttgagacagtaggtgcaattgttggagtgatcgcatttgcagcattactgggaagtatgatgtatttctgtaaaggaaagaaaaaacagaatgcctaaaaagaaaaaagagtcagtaaattatctggatcagattccaaggatctccgtccccaaatgggaggtcctggaggatggtctggtggaagtgacggtggaaaataaaggatttttcaatgtgatcgcacagaaatgttttcaccgcccgcgaaccagctacattaagctggatgaatatggaagctgcgtatttcagcagatcgacggggagaagagcatctatgagatcggacaaatcctggaacagacccatgagggggcttccaatcagctatatgagcggctgtctgcatattttgagacgcttcggagactgcattatattcagtttcactgattgttcagagtccatgtaaatgggctctgaaattttctggggaaatattctggaaaacaagggattgaccagaagccggaaaacgagtaccatcaacatagacaggattatatgacaggaggacttacgatgagtatggtatctatacagaaacccgaaaaagtatttcagtattttgaaaagatctgttcgattccacatggttccagaaatgtagagaagatcagcaattatctggtatcatttgcaaaagagcatggtcttaaatatcgtcaggatgaaaaatataatgtgatcatctggaaagatggttccacagggtatgagcaatctgagccgctgatcattcagggacatatggatatggtggcagtgaagactgcagattgcgaaaagaatctggagaccgacggactggatctggagatagatggagattatctgcaggcaaagggaacttcccttggcggtgacgacggaatcgctgttgcttatgcgctggcgatcctggatgatgacagtctggcacatccgcccattgaagctgtatttaccgtagatgaggagatcggcatgcttggtgctgattatatggatgcttctgatctgaagggacgtctgttcctgaatattgactctgaggatgaaggtgtgtttactgtaagctgtgcaggtggtgtgatggcagtctgcacgattccgggaaagaaggaagatgcagagggcagtgtgatccgcatttctctcaaagatttccgcggcggacattccggtgtggagatcaataaaggaagatataatgcaaatatagtcatgggcagactgctgatgactgtacagaagaaggcagatgtgcgtctggtgacgatcaacggcggtgagaaggacaatgccattgcaaatttctgtgaggcaaagattcttgtggtaaaagagcaggagcagcaggtgtgtgactgcctgaaagagacctttgcaatcatcagcaaagagtgtcatgtgacagatccggatgcattgatggagctggaaacagcagagacagcggctcaggtatttgatgtagaaagtaccaatcgtgtgatccttgcactggtgcatatgccgaatggaattcagagaatgagcccggagattgaagggctggtgcagacttctttgaaccttggggttctgcagacggtggaagatcatgtggacttttcctgggcagtaagaagttcttccggagatgagaagcagtatgttctggataagatcatttctctggcaaagctgctgggcggcagtgttactacacagggcgcatatcccggatgggattatctggaggattccagacttcgcaagatcatgatcgaagcatacaaggagcagtatggagaggagccgatagtagaaggaatccatgctggtctggagtgtggactgttcgcttccaaactggaaggactggatgctgtgtccatagggccgcagatgcatcatatccatactacagaggagagattatccatctcttctacattgcgtacatggaacctgatcgtgcgtactctggaacttctgaaataggatacatgctatgaaaatgttgatggaagacatcaaaaacaagcagtttaaaaatatttatcttctgaccggagaggaagtctacctgcgcatgcagtaccgaaagaaactgaaagaagcgctggtggaggatggcgacaccatgaatgtagccatcttctccgggaagggcacagatcccaaggagatcattgatctggcagagacgatgcctttctttgcagagcacagagtgatcctcattgatgatagtggatttactaaaaatgcctgcccggagctggcggattatgtggcgcagatcccggagagcacctgcatcattttaaatgaggcagaggtggacaagcgtggaaagctctataaggccatcaagagtaaaggccgcgtggtggagttcgagagacaggatgagcggacacttatgcgctgggtactgaccgtgctcaaaaaagaagaaagaaatattacggaagataccatgaaagcatttctgggacgaaccggctcagatatggaaaatatttccaaagagctggaaaaactgatctgttataccatgggtcaggataccatcaccacggaagatgtatatgcggtctgcacggaacagaccgagaacaggatcttcgagatgatccagtcgatcacagaaaagaatcgcaggaaggccatggatctctatgcagatctgctggctatgaaggagccgcctatgcggatccttttcctgatcacccggcagttccagcagcttatgctgctgaagcagatgtcagcggaaggactggaccgttcagaactggcaaaaaaagcttcgatcccaccctttgcccttggcaaatatcaggcgcagtgccgaaaatttactttggcggatcttcgccaggcagtagaagactgtgtggataccgaagaacaggtcaagaccggccgcatgggcgaccagctgggggtagaactgctgattatgaagtatacagaaaagagctcagggcactgatcttcagttagccttttgtaatctgtgtgatatataaatatacaaaaaaacgactggcatgacggtaccagtcgttttatatttcatatatttatgctattttgattccagccttatgccattttgttaacagcagtctgcagacgggagatcttcctggaagtagtatttttgtgatatactcccttggtagtagctttatccagggtagagatagcagctttcagagcagcttttgcagcttcctgatctttggaatcgattgctgcgtatactttcttaaccatggtctttacttcagatttgattgctttgtttcttgcagttctggtctcagttaccaggattcttttttttgcggatttgatattagccaatttcgtgcacctccaaaattactttacatcccagacaaatatgccgggaatctatgatatcgtttctcttaagtcgtggttcctaaaagcgagacacggtggcttttcatggaaacacacagatattatagtaatcgaaagtatgacttctgtcaatacatattttcacttttttaggggaaaatataccgaaatataccatgatatttggaagggagcagatgacatggagtgcatgagagtaaggacagatctggcgctggaggcgaaggagagtttttcgggaagcgatgtggaggtacatggggttgttgtggaagaagagtatgacaaggaacagaatcttcgtctgaccagagtgaggatcgagtcagagcggggagcgcgggaaatgggaaaacccatcggtacctatctgacattagaagctcccggtatggcttcccctgatgaggattatcatcgggaaatctcggaaaagctggcagagtatctgaaagaattgatgggtggacagaagaatccgtctgttctggtggtgggacttggcaaccgggacgtgacgccggatgcgctgggaccgaagatggtttccaacctgttgatcacaagacatctgatccgggagtatggtcgggaggtcatgggtgtgggagactgttgtgagatcagcggtctggcaccaggagtcatggcacagacaggtatggaaacgtcagagatcatcaaaggcgtggtgcaggagatatctccggatctgctgatcgtgatcgatgcgctggcagccagaagcactcgcaggctttgccggacgattcagctgacagacacggggatccagccaggctccggtgtgggtaatcatcgggcagcactgacgaaagagacacttggtataccggtgatagccattggtgtaccgacggtcgtagaggcagcagcgattatttatgatgcgcagggaaactgtgaacagatgccgccccatctgaatggaatgtttgtcacaccgaaaaatatcgatgaactgatcaaacagttgagttttacattatccgaggcattgaatatggtgtttgcacatggagaacgttgagggttacgattctttatgtgagcaggcatattccacatatttataggtatgtgcatggctttgaactgtctcgcatataatatcaacggtggagatgcgaagatggatcgtttcatgaaggttgtaaatcgactgttatgggttatatttctgggaatgggaatttatttgctggcggcagggagcagccgtttctggaccgggagtgtgcaggaattgctggtgaaaggctgtcaggcactggagcgtgctgcctggcaaggggcggcacgcagtctgtatccggggctctttatggaatatgaggagacggatacgcagtctttggaggactggtacatagagtgggcattgtggatgcatccgcttacaaaattgtcaaaagcggcaggaaacagtcaggcactggagagtgcagctacctatgagatgctggtcagtggcggtgtgcatgatgaaaatgagactgatgcttccggggaggcttacgatctggaaacactggctgaaaaggaaaatgagcaggcagcaagcgaggcagatgtgtacgtacccgaagaagttccgcaggagacggaagatatcgcacaggcagaaccgaagccagatcttatagaaggcggaacaatttataatctggaagaactgtcagattttgattttctactcagtcatttttacacggtggaatctaacaccagtatttcagcggcagagcttcatgcggaaaagttgctggataaggatatgaccattgactgtgatgtggatggaccgcagattctgatctatcacacccattcccaggaaggttttgtggattccgtgccgggggataattccaccaccattatgggagccggggagtatttgtcggagctcctgcgggagaagggctttgaagtgatgcatgtgaccagtgtctatgatctggtggatgggaaactggacagaaatgaggcatacagcagggcagagaaggagatcagccaaattttggaagaatatccgtctattcaggcagtgatcgacttgcacagggacggagtcaatgaaaatactcatctggtgacggagatcaatggcaagcctatggctcgttttatgttttttaatggtctgagccgcacgaagaaaaatggtcctattgattatctgtacaatccttatattgaagataatctggcattgactcttcagttgaagctgctgtgcgatcagtattatccgggcctctccagaaatatttatctgaagagcctccgatataatctgcatctgtccgataaggcattgttgatcgaggtgggcgcgcagaccaatacccttcaggagatcctgaatacgatggaaccattgtcagtgttacttgcgaaggttttcggagtatgatatattacaagcaatgagcagtgcatggatgcacgaaaacatgggatcgtcgcgcttgcacgtaagagactatgttttcgtgcagacatatggggcgaatgccccatagcgagatggagcgtcagcgaaatcgagcttatgcactgcgtaagaggcatatacgcagtacactgcgttttgaagagatacaacggaggataaggaatggcagaaatagatcagagcaagatccgcaatttttgtattgtggcgcatattgaccatggaaagtcgacactggcggaccgtattattgagatgacaggactgctgaccagcagagagatgcaggcgcaggttcttgacaacatggaactggagcgagagcgtggcatcaccatcaaagcgcaggcagttcgtaccgtatataaagcagaagacggcgaggagtatattttcaacctgatcgatacaccaggtcatgtggactttaattatgaggtatcccgcagtctggcagcctgtgacggagcaatcctggtagtagatgcggcgcagggaatcgaagcacagactttagccaatgtatatctggcgctggatcatgatctggatgtgatgccggtcatcaacaagatcgatcttcccagtgcagagccggagcgagtgatcgaagaaattgaggatgtgatcggaatagaggcacatgatgcaccacggatctctgcaaagaccggacagaatgtggatcaggtactggagcagatcgtaaagaagatcccggcaccaaagggtgatccgaaggcaccgctgcaggcattgatctttgactctgtctatgattcctacaagggagttattattttctgcagaatcaaagaaggaacggtccgcaaaggcatgccgatccatatgatggcgaccggggcagatgcggatgtggtagaggttggttattttggagcaggtcagtttattccctgtgaggaactgagcgccggcatggtaggttatattaccggaagtattaaaaatgtaaaagacacccgtgtgggtgatacggtcactgaccggaacaatccctgtgcagagccgctgccgggatataaaaaggtacagtccatggtatactgcggactctatccggcagatggagctaaatatccggatctgagagatgcattggagaagctgcagcttaacgatgcatccctgcagtttgaaccggagacttctattgcactgggatttggtttccgctgcggattcttaggactgcttcatctggagattattcaggagcgtctggagagagagtacaatctggatctggtaacaacggcaccgggcgttatttaccgggtacacaagaccaacggtgatatgatcgagctgaccaatccgtctaatctgccggatccgtcagagatcgaatatatggaagagcctatggtcagcgcagagattatggtaacgacagagtttatcggtgcaataatggatctttgccaggagcgccgtggcatttacaatggtatggactatattgaggagacccgtgcgcttctgaaatacgacctgccgctcaacgagatcatctacgatttctttgatgcactgaaatcccgttccagaggctatgcgtcctttgactatgagttcaagggttatgtacagtcagagctggtgaagctggacatcctgatcaacaaggaagaggtggatgcactttccttcatcgtgcataaggattccgcttatgagcgcggacggaagatgtgcgagaagctcaaagatgagattccgcgtcatctgttcgagattccgatccaggcggctgtaggaggcaagatcattgccagagagacggtcagagccatgagaaaagatgtgcttgcaaaatgttacggcggcgatatttcccgtaagaagaagcttctggaaaaacagaaggaaggtaagaagagaatgcgtcagatcggtaatgtagagatcccgcagaaagccttcatgagtgttctgaaactggatgataaataacatgacaaaaaaaccattggaattatacattcacattcctttttgcgtaaaaaaatgtgcatattgtgacttcctttcagggccttccacacttgaggtgcgggaggcctatgtcaactgtctgatcgaggaaatctgtcattgcaaacatgcaggggtcagggattctgataataagtgggcaccctgtgatcccgaaaactatgaggtggtatctgcattttttggaggtggtacgccaagtattctgaagcctgaccagatccgccggatcatgacggcattgaaggaagtcttctgctgggattcagatgcggaggtgactattgaggccaatccgggaacggtggatgcggaaaaactgcggaactatctggattgtggtatcaatcggatcagttttggtcttcagtctgctgacaatgaagaactgcgaaagttaggacggatccatacctgggaggaattcctggatagttttcatcaggccaggattgccggatttactaatatcaatgtggatcttatgtcggcacttccaggtcagacagtggacagctggagaaagacccttgaaaaagtgttggaacttaagccggaacacatttcggcatacagcctgatcattgaggaaggtacacctttttatgagaaatatgaggatcacccggagctgctgccgccggaggaagaagagcggcagatgtatcatgatacgaagaagatccttcatgaacatggttatgaacgatatgagatctccaattatgcccgggcgggctatgcatgcagacataaccttggctattgggagcggagggaatacaaaggatttggactgggaagtgcatctcttctggaaaacaggcgttataccaatacctgtgaactgaagcagtatctacagggacggatcagaggaacagaagaagaactttcagagcaggatatccgggaagaaacatttttcttaggcttgcggaagatggaaggcattgatccgggtccatatcgggcacattatgaaaaattattggaaaagttgcaaatgcaacagcttttggaagagaaaaatggcagaatcagtttaacagagtatggaattgatatcagtaattatgtgctggcgcagttcctggaggattgagagtacgataagaggagtttatatgcagaaagaattacagtttttggaggagcaggatataagtccaacccttttggcacaggtggaagcattccggcaggaatatccggcggatgaggcagcattgcagagagtgaaccgcccaaacattccgttttatggaaaagagatcctggagatggccatggcagctctgcttcagggatcgaacctgctgctgtcaggagccaaggcgaccggtaaaaatattctggcggagaatctggcatggatcttcggcagaccttcttataatatttccttcaatgtcaatacggacagcagtacgttgataggaactgacacgttccgcaataatcaggtggaactccggaaaggaagcgtataccgctgtgcggaagagggcgggtttggcatctttgatgagatcaatatggcaaaaaatgatgcagccagtgttcttcatgccacactggatcatcgacggatgatcgatgtgccaggctatgaacggatcgatctgcatccggctactcgttttataggaactatgaattatggatatgcgggaaccagagagttgaatgaagcattggtatcccggttcctggtgatcgatatgcccgcacttaccaaagaaaatctttaccggatcattcgtcatgactatccaaagatcaaggaagaggctctggatgcatttggcggactgttcctggatctgcaggaaaaggcagataatagtgagatctctaccaaatgtatggatctgcgaggcttgttatccgcactgggagcagtaaagatcgggcttacgccctggcaggctgtgcagatgggcattattaacaaagcatttgatatttttgagcgggagatcgtgtcagatatggcaatgaccagaatccccgaggactggacaagggagaatgtattttaatgcaggacagatcgcagatatacagcgaggaagaatatcgttacgaactggaaaaccgtatgaagaatctgctgtggacagtgagtggggactatgatctggatgtgaacctggatcttgattcctttcgggaatctcagtatattactctctatgatgcggtcaaacaaggggcatttgcgcgttatttttccaaggacgagtttggcatgtatctggtgaaaaagctttatatgggtgcggatgagccatcccttgcaggactggcacagatgtgtgtggatcaggcggtattacagaagatcacagctgagcgtaggggtgtgtcaactcttcggaaaaaagcttttggagatattctggatcgggattttgaccggctggcaagacggaatgacccggtagcacggatgaagatcgctatgctccagcaaggacttgatgggacctatacagctggtaaaatggtccgggagcaggtggaagagttattttctctccagaatgcagaggatacgatggatgtgatccgaaaagtggacggattttacaatcgtctggtagacccgcattttgaaaaggaacatggaacgctggaacaggttctctccgtcagggaagcagatctgaaaaaattcgactggcaggatttcctggatgaaaatgccacagaagcctcattggaagagatgatgcgacaggcaaacagcagtacattgccggaggatgaagaagaggcggaggagaaaaagtatcgcgccggaaagatcctgatcactgaggaagacattaaaaagatgtattcctatatagaactgcattttggtacatcctatatggatgcaagggaacaggaacggctgaatcgacggatctgccgtggaattcatgcggactgtaagctgtattttacggagggcattctaaagggctgtgtcagggaaaataatacgtatgtgctggcgaaacggaccagtgagatgaatgaacggttttaccggcagaatcaaaggatctcccggcataatattgctgcactgggagatattctgaagcggtccctgcaggcacggaatgaagatgatacgcagatatctgactatggaacagtgattccacagaagctgtggaaagtgggacggaccagtgatacaaaattatttttaaagcagtttaagaaaaataattcggattttgtagtggatgtgctgatcgatgccagcggttcccagcgaagccgccagcatatgatcgctctgcaggggtatattttgtcagcggcacttacccgggcagggatcccacatcgggtcttgagtttctgctctttctgggactatacagtcatgcggagattccgggaatataatgatccggcagaagcagactggaatctgatggaatttacctcttcgtccaataacagggacggactggcattacgggcggcagcagatgggctgctggcaagaccggaggagaacagggtattgatcgtgttaagcgatggacgccccaatgatctggtggtgaaccagccaaatgcgaagaatccggcagtctataccggcgactatgcggtgaaggatacggcatcagaagtgcggcgtctcagaagtcagggaatctctgtgctgggtgtctttgcaggagaagaacaggatctgcaggcagaacgtaagatttttggcaaggattttgcttatatcagggagttgtccacttttgcccatgtggtaggacggtatttgagaaaacagctggatgaacaggactaagggggaaatgagtatgaaagaatatgaagtggtacatgagatcttcaacgaatgcgccaacaatcagatgcgggatgtattttttgaggaagtagcgctggatgatccggagcagtatatccggagccgtcacaaagacagagaactgaagatcgagcgggaagacctggaggatggaaccattgtctatcatgtggagacttccgggatcgcgcagaaatataccttcacggagatctgagggcaaatctgctgtgctgaaaatattaaagaaataaaacttacaggatattaaaatgtatactaaacagaatgttgttattgtaaaactaaaatgtatatgatattctgtaaaaggaaaacaaccgtgttacagggtggctgacctctattctacatagaatgggggtggtgctgatgaaacattttgattttaaagaccttatggcctttggaatgttcattctggcattactgacattcgtttttacgtttatcagatagtgtttttggcatagaaaaaccaccccaaaactttggccgagtgcggggtggaatttctataattcatttaccaatcgaggtcaaccccttgtgggcggttgtttttcctcttttatattttcaatatagcacatctgtttttaagttacaagatgttttatttgcttagattgccgtgtggttcaggtaatattaattaaggggattaagtatattgaattttgatattctgtttggctaaaaatatattctgagggagtggaggactcttacgaatcccccaagtgttatgaatgaaatacggatatgtcgttcttacaaatactatcatatcaggaaaatatgtccaaattatggcaatgttctaaaagaattataaaataaataaagaaactttgaagcatttcttaatgaactctgacataagatggaatgatgcaggatctggagaatggcatatgaggcgatggtgtactgcactgatcataatctgtctgatggcagggtggatagctctgtggcaggaagagaaggtgctgtctgtcagtactgcttttgtggagacgaaaaaggcagcactgacctttgatgacggtcccagccccctatatacagaacggctgcttgacgggctgaaagagcggggtgtagtggcgacgttctttgtgactggtgaaaatgcggaatcctgcccggatctgatccggcgggagaaggcggatggacatctgatcggcaatcatacctacagtcatatccagctgacttctgacaataaagaggtatttcgggaagagcttgtaaagactaacgagatcctggaagatatcactggggagaatgtgacctatatccggccgccttacggaagctgggataagagtctggaacaggacctgaacatgtttccggtgttgtggaatgtggaccctctggactggtgcacaccagatgcggggcttgtgatgtcaagagtattgcagcaggtggaggacggggacatcattctgcttcatgattattatgacacatcggtgacggcggctctgatgatcgtggatgagatgaagaagcaggggtatgaatttgtgacggtggaagagatcctgttcgattgaaacagtggaattgtcgaaaaaagtatgctatgatgaatcaaagtctagaaaattcagaagaaagagattacagagatgataaaagcggcgttttgcgatgatgatttgtctgtattgaacgagctgcatgttctgatggataactatcgggtagaacgaaatcaggaaattacatatactgcatttcacagtccgctggagctgatagcgcagatcgagaagggaatgcggtttgatattctgtttctggatgttctgatgccaggggtcaacggaattgagacggcacaggagatccgggaatatgacagtgccatgaagattattttccttacctcttctgcggagtatgcagtggaatcttatacggtcaatgcatatttttatcagttgaagcctatctggccggagagtttttaccggctgatggattctgtgctcaaggaatgcgcgcaggagcagagaagaagtttgatcctcagatgcaaaagcgggatcacccagatcagtctggacaggcttatgtactgcgaggtccagggacggacactggtctttcatatgcagaacgacgaacagctggagagtgtgggaagtatggatgatctaagcagacagcttgcaaaatacaacaactttcttcgggcacacaggtcttatcttgttaatatggaatacattaaaactatttcttccaaagcaatcctcatggtaaatcaggacgagattccggttccccatggaaaatgttcagaaatcaaaaatcaatatctggaatatgcattcagtaaagatcaggtggtgcttgcctgatggtcgattcaatgcattttttggtcggtttgtgtcgaaccggccatttttttgcttttctcctgtacactggagacaacaggtggaacttaataaccacaaaacaatgtgacgaaggagaaagaatatgaagagaaaagtacttgcaatgatgatgagcctgacactggcgatggcagtaactgcatgtggaggatctgatacggagactgatgctgcagatacagcagtggaagaaactgttgatgatactgcagaagcagatgaggcagaagcagaggatgtagcagcagaggatgcaactgaagaaacagaagaggatcttggaccgttgtactctatcgaagcagcagtggcaccggatgttgcaggaactacctggcatttcgtaggcgctatgcttgacggtgaggagcttgatgcagagactgcaaccggcgttctggatcagaattatggcggaactcttgatatggtatttgatgaagatggcaatgcaaccatggagcagggaggcggaaaccttactggtacctatgagtatgtagatgagtacaccttactggtatctctggacaacagcggaagcacactgaactatgcatgtgcatttgctgaggacgaggacggagtgaccatggtacttatgaatgatgatactggatataacggaatctatttcatgcagtaagatccacagataaaattgaatcgcgacagcggatgcggggtgatccgcatccgctgtttttatatggaggagtctttgatgaaaagcctggtgatcgtaattttacttctgatcctgctgatgatctggattcttatgacaaagaaaaaactggtggtaatggatgagaacgtgaaccttgccatgggacagcttggtgtgcaggtttcctcccagtttgatgctgcaatgctgttggtggatctggtggaatcttatacagagaaagatggcagtcggctgaagaaaatgattcagacagaatatcggatccttacagccagatcaatgccttcggatgtgttgaaacaggagcgtgtgatccagaaggtcatggatgaaatttctgatatttccggaaaatatccggaactgaaagaagacagaggatatgtaaaatgcctggatgcggtggaaagttataaaaaaatggtgcggaccagcagattgatctataatgatattgtgacaaaatacaaccaggcgattcgtatggttcccacctgtctggtcgctggcattcttggttttcataaaagagaatatctggaatcgggagaatattaggaggatatgaatatgggattattcagcaataataaaaaattatgtccggtctgtggaaagccgactccaaggcttctggcaaccaaggtggaggatatgcccatctgtaaggactgtgaccggaagatcgacctgcctaaggggctggtggataagatgacactggataaattcagcaaatacatttcctatcatgatcagcaacagtctttgagggacaaatttacagagacataccgctttgattttgggttcggaaaaggaacatttgtgatggatgcatcccatggattcttcaaactgaaggatgacgaaaatgcactgatcatggaaatatccaatttcaagagtctgagggtgctggaggatgacaagcctctgtatgaaagccagggcggcacgatcaaatgttataagagtatgatgccatcaaaaatcagagccatgtccacccagatcacgcagtatgaggcgcagagacgggaatatgagatggtagaacagatggaacggatgcgggatgaacgggaccgcctttatgatgagcgagaccgtcggcttggcggcagaagattggatgagcgagaccgtcggatggatgatcggcgatttgacgagcgttccacgagaacttaccacagtgaaccgacttttgatgtgaaaggcccattccgctacttttatgtggaacttgccatgaaacatccgtactggggttcgatccgctggccgctggttgcaccggaatttgacaggtactatccaagtgtgaatacctatctgcaggagtatgaggataaggtggatcagcttcatacactggtggtcaatctgatccagatggtaagcccgggggcaaaagagattcagatgtctgcggcaggaagtgcaggtgcggcagccgctcagccggtcaagagcgtgctcggcaataagaaaccagctgctgccacaggaacaagcgccgtggaggagatcaagaaatacaaagaacttctggatgcaggagttatcacacaagaagaattttcagcaaagaaaaagcagctgatgggaatctgagtttacatgggagggatgcgaatgaaaaagagatttctggcagcattcatgattctggtgatggggtgtgctttgacagcctgtgacgaagaggaggcggcagacggacagactgcggatactgcttccgaagcagaagagggaagctggtcgatctactggtatctctgtggaagtgatctggaatctggtggtggatttgccacctatgatctgagtgagcttatggaggtggagcttccggaaaatgtaaatgtggtcattgagacgggtggatcttccgagtggcagaatgatgtggtcgatgcagaccacctgcaaagatggctgtacagcagtgaaggactggaactggtggatgagcagccttctgcaagtatgggagaagcagagactctggcagatttcctgcagtttgcaaagaacaattatccggctgaaaagacagctgtggtattctggaaccatggaggtggttctgtgtcgggggcttcgtttgatgaactgtatggatttgattcattgaccctggatgaaatgtacacagcatttgccagtgtatgggagccttcagaagaagaacagcctctggagctggtaggatttgacacctgtctgatggcaacagtggatgtggcatatacgttttctgatctggcacactatttggttgcatccgaggagacagagcctgccaatggatggtattattcccagtgggttggtgcccttgcggatgatccttccatggatggagaagagctggggcgtgtgatctgtgatgcttattatgcaggctgtgaggaagtgggaactcaggacaacaccactctttctcttacagatctgacaaaagtgggaccgcttctgacggcttatgatacctttggctcagaagcactggcggcagcctgcgaagatcctggattcttctcacagttcggccgtgtggcggcaaagagtgagaattatggaggtaataccagagagcagggttataccaacatggtggatcttggtcatatggcaagacagagttctaatatgttggggtctgccaaggacgtgctggatgcactggaggactgcgttctgtatcaggtaggaggtcagtatcggacagaagcgaccggactttcctgctattattcctacaatggtgatgtggatgatttctggggctatgccaatattggcacaggagctgcgttcaaatatttctatgcctatgagctgaccggagagttggatgaatccggcatggaatatattaaagatatgcagtttgaggaactgccggaagtgaagaatcttctgtctgtggactgggatggggcaccgctggatgtgacggatgatggtatctcctatctgacattgggaccggaagccaatgatattctggctggaattggctttagtctttattatgtggatgaggaagatgacctgatgctctggctgggaaccgataatgatatgaacgcagactgggaaaatggagtcttctatgacaatttccgaggagtctggggaagcattgatggcaacatggttttcatggagctgagcgacgaaagcgaagattatactatgttttctgttccgattctcctgaatggagaggaatataatctgcaggttgtctatgatttcactactgaagagtggagcatccttggcgcacgtcagggcattgatgatacgggtatggctgacaaggaactgcggcttctggaggaaggtgatgagatcacaaccatctggtatgcagcaaccgcaaccggtgatgatgattttgaagcttacaccgcagataccttcacagtgactgcagataccagctttgatgagatggaacttccggatggaagctattccatggtatatgagatgcgtgacgccatggataattacgcatactctgatgctgtgatctttgactgcgcagatggtgagattcagacgacggtatttacagagtaaaatgctgacatagaagccaatgccaatgcaggtggaggctttacgtcctcctttcagggcagccttatggctgcccttttttgtgctacattgctgcacggctattatttatcgtaaaacaataaaaatatattgacaaatacaggaagcacaagtatactgaagccacaacaaggaaaaaggagaagaaaaatggaacagcgtacattggtaaaatggttgaagatactggtattatttgcagcggtctgtggactgggactggcaggaggtgtgctgccactggcaggacagtggctggtggagagctatccagaattttcctattgcttctggccgtggctcatctttctgtgggttttgtcgattccttgcttttgggctctgtatctggcgtggaagatatttggaaatattgaaaaggatcatgcatttactacggaaaatgcggagtatatgggacgtatctcctttctggcggcagcggatgctgtggtgcttctggtaggaaatgtgctgttctggctgattggcatgaatcatccaggaatattgcttttgtgctttgtggtcacactgatcggtattggattttctgtagcggcagcagcattgtctcatctcattcggaaagcggctgatctgcaggatcagagcgactggaccatctaggagggcgaacatatgtcgatcattatcaatatagatgtcatgcttgcaaagcggaaaatgagcgttacagagctatctgaacgggttggaatcaccatggcgaatatttccatattaaaaaatggtaaggccaaggcaatcaagctgagtaccttaaacagcatctgtaaagcacttaactgtcagccaggagatattctggaatatgtggaggatgaggatgatgaatgcatttgatcgtgtaaatggaatggatcggatcttctgcggcctgtatctgctgcttggttatggatttatttggatgttcacgaacagtacttctgcctggtgcctgcctgtctacaccgttttttatgcagcagtggtgctgttgtatgccagaactttgggaatctgccctgtgaaggaaagctggttctggtttgtgattctgctgatgctcggaatttctcaggaaatagacaatggcatgatgatcggacggtttctggcattactgctggtggctgcttactggacattcgcagtatcagggagactgctggatcagggacgaacatccggctggatcttattcgatggatggaatgcattgggaatggtaccatttaccaatatggatgccctgatccgggtgttgtttcaccagaagagcggtgacggggagcaggacaaaacatccctgccagaaatgaaagcggtggctctgggtttggggatagcagcagttctcctgtgtatcctgctgccgcttctgtctggtgcggacgccggatttgagatgctgacaggagatgtggcagactggatcacggcgcatctgctgggatttgcccttcgtatgtgctttgcaatacctgtgtcattttatctgtttggtctgacttttggaggactgactggacggcatacagactatatcaaagaagatatgctgaaaaagacaaaaaaccagattcagatcctgccggtaccggcagcggtcacaacttttgtgctaatctgtggtgtgtatatattatttatcggactgcaggggtcatacctgttctcggcactggctggaaagctgccggaggcatttacctatgcagaatatgccagaaggggattttttgaattgtgtcaggtatcggtgtggaacctttgcattttgatcatgtcagatctgttcaccagccggaaagacaaacagttcatgtgtctgaaaggaatgaatgtctgtctgtcggtgctgacactgcttctgatcaccacagcgattggaaaaatgttcctgtacatcagtgcctatgggctgactgcttaccggattctgtcacttacctttatgctgtggctgacgattatatttgtgggatggatcatccgtcagtggaggacatttcctctggcgagaatcagcattctgacaggagcagtgttctacacccttctttgtgtgcttccggtgagcagtctttgcagatattataatctatgggcacagacgcatggatttttacactgaaaagtgctatactggtaggcataaagggtgattgacccgaagtcagaaggaggaaattcgtatgatgttggaagagtcggttaaagttttgaccatgcaggaggaaatacttcagttttctcattttacgaatgaggatgcatgggagcttggcagctatatggttgaagaagcagccagaaatgatctgcctgtggcggtcagcatccgtctgaataatggttacacagtgtttcagtatggattcagcggaaccaactgcagtaatgaattgtggatgaagagaaaagaaaataccgtccgcatgatggagatgagttccctgcgtttatatatgcttcttaagctgaagcaggaaacactggaagacaggggattaaatggaaaagattacgtagccagaggcggcgcattcccgatccgtgtggaaggtgtgggagtgatcggaagtgtgatcgtatcgggacttgatcatatggcagatcatgattttgcagtagcatgcatcagtcagtacctgcggattgacaatatcccgcgtctgccggtgaattattgacacatattttttgaatatttgcatatctctgaatgaaattcacaaaacacttgcggaaaaaccatattttatgtacaatattcctatataaaacggcggggaggggattcgtaaccagccgaataaagggggatcagatatatggaagatcgtatgttaaaaattatttcacctgctgacaaaaaagtagccctgaaggttatcccgggacactttgtgacttctcattctcatatcactcattatatagatatgactacattaagagcccgtcagaatgaggcagaagcggcagcaagactgttggcagcaaaatatgccaatacaacgatggtagatacgatcatctgtctgaacggatgtgaagtgatcggtgcatacctggcacaggagctgagccgttctggtatccggtgtatgaatgctcatgaaacaatttatgtgactgctccggaacaggacatcaacggtcagatgatcttccgcgacaacacgaagctgatggtgcagggaaagaatgtattgatcctgtccacctccatcacgactggtgtgacacttgacaaggcaattgacagtgttgaatattacggagggcatgtgcagggaatcgcttctgtcttcagttttatcagcaaagcaagaggcgttgaggtcaacagtattttcggtgccaaagatatgaagggttatgcttcttatgatgcaagagtgtgtcctatgtgtaaggcaaaacagaaaattgatgcgatcgtcaatggatttggatacagcaagatgtagcaacggaaagttttttgaaaaacattgggggaggggcttgccaacttccccctttttgtgtataataacgacaatttgggtatttttaagacaggaaaggacaaaggtgaaaagatgaaagcatttcttattctggaagatggccatgtctttacaggcagaagcatcggttccacccgcgaagcggtcagtgagatcgtgttcaatacgtctatgacgggatatctggaagtcttgacggacccctcttatgcagggcaggcagtcgtaatgacttatcctttaattggcaactatggaatctgttatgaggatatggagtcagaaagaccatgggttgatggttttattgtccgtgagttatccagaatgccgagtaatttccggtctgaggatacaattcagaattttcttgaaaaaaatgacattcctggtatctgcggcatagatacgcgtgcacttaccaaaatcttacgtgagtctggtaccatgaacggtatgattaccactgatgaaaattataatatggatgaagtcatgaagaagctgaaggcttattcaaccggggatgaagtttccaaggtgagctgccgtgagaaaaaggtgctgccaggtgacggctataaagtagcacttcttgatcttggtgcaaagaaaaatattgccagatcattaaatgagcgtggctgtgaggtgacgatctatccatcttccacaactgcagaagagatcattgcatccagaccggatggaatcatgttatccaacggccctggagatccgaaggcctgtgtgcaggtgatcaaagagatccgcaagctctatgagacagagattccgatctttgcaatctgtctgggacatcagctcatggcacttgctacaggtgcagatacttttaaactgaaatatggacaccgcggcggcaatcacccggtgaaagatatggagactggaagagtttatatctcttctcagaaccatggttatgcggtcgatcctgagagtcttgacccacaggttgctgtgccggcatttaccaatgtgaatgatggaaccaacgaaggtctgaaatatgtaggaaaaaatattttcacagttcagtaccatccggaggcatgccccggaccgcaggattccagttacctgtttgacagatttttgaaaatgatggaggaaaagaagaatgcctaagaatccggatattaaaaaagtactggtgatcggttctggccctatcgtcatcggacaggctgccgagtttgactatgcaggtacacaggcctgccgttctctgaaggaagagggacttgaggttgttcttctcaactctaacccggctacgatcatgacggataaagacattgcagaccgtgtttatattgaaccattgacagtagatgtggttgaacagctgatcctgaaagaaaagccggacagcgtgctgccgactcttggaggacaggcaggactgaatctggcaatggagctggatgagagaggattcttcgagaagactggtgtaaaactgatcggtacgacttcccagaccatcaaaaaagcagaggaccgtctggaattcaaggcaaccatggagaagatcggcgagccggtagctccgtctctggttgttgagaatctggaggatggtatcgcattttccaataagatcggttatccggtagtgcttcgtccggcgtatacgcttggtggaagcggcggtggaatcgcacacaatcaggaagaactggaggagatcctcgcaaatggacttcgtctgtcccgtgtaggccaggttctggttgagcgttgtatcgcaggctggaaagagatcgagtacgaggtaatgcgtgacggagcaggaaatgtgatcaccgtctgcaacatggaaaatatcgaccctgtcggcgtgcataccggtgacagtatcgttgtagcaccttcccagactctgggggataaagaatatcagatgctccgtacttctgcactgaatatcatcagtgagctgaagatcaccggaggatgtaacgtacagtttgctcttcatccggagagctttgagtactgtgtgatcgaggtaaacccgcgtgtaagccgttcttctgcactggcttctaaggcaactggttatccgattgcaaaggtggctgcaaagattgccatcggatatacactggatgagatcaaaaatgcaattaccggacagactatggcaagctttgagccgatgctggactattgtgtcgttaagatgccgcgtctgccatttgataaattcatcagcgcaaaaagaacattgaccacacagatgaaagcgaccggagaggtcatgagtatctgtgacagctttgagggtggccttatgaaagccatccgttctctggagcagcatgtggacagccttatgtcttatgatttcagtcatttggacagagaaggactgttagagcagctggcagttgtagatgaccgtagaatctgggtgatcgcagaggcactccgccagggaatttcttatgaagagatccatgatattacaaagattgatatctggttcattgacaagatcgcaatcctagtagagatggagcaggctctgaagacacaggaactgaccgttgatcttctgaaagaagcaaaacggatcgaattcccggataacgtgatcgcacgtctgactggtaagaccgaggatgagatcaaacagatgcgttatgacaatggtatcgtggcagcattcaagatggtagatacctgtgcagctgagtttgaagcatccacaccgtattactattctgtattcggaagtgaaaatgaagcagttgagaccaaagaccgcaagaaggtcctggttcttggttccggtccgatccgtatcggacagggtatcgagtttgacttctgttctgtacattgtacctgggcattctccaaagaaggatatgagaccatcattatcaataacaacccggagaccgtaagtacagacttcgatattgcagataaactgtattttgagccgctgacaccggaggatgtggagagcattgtccgtttggaaaaaccggatggagcggtagtacagtttggtggacagaccgctatcaaactgaccgaagctctgatgaagatgggtgtgccgatccttggtacttccgcagaaaatgtagatgcggctgaggacagagagctgtttgatgagatcctggagcagtgtcagatcccgagaccaaagggaggaaccgtatatactgcagaggaagcaaaagaggttgccaaccgtcttggttacccggtactggttcgtccgtcttatgtacttggcggccagggtatgcagatcgctatcaatgatgaagatgtggaagaatttatcggcatcatcaaccggatcgcacaggatcatccgatcctggtagataaatatctgcagggtaaggagatcgaggtcgatgcagtatgtgatggcgacgacatcctgatcccgggtattatggagcacattgagcgtgccggtatccattcaggagacagtatctctgtttacccggcaaagagcatcagtgaccatgtgaaagcaactattgaagaatataccaaacgactggcgcgttctctgcatgtcatcggactgattaacattcagtttatcgcagtgggcgaggatgtatatgtgatcgaggtgaacccgcgttccagccgtaccgtgccatatatcagtaaagtaaccggaatcccgatcgttccgctggcaaccaaagtgatccttggtcataagatcaaagatcttggttatacaccgggactgcagccggaagctgattattatgcagtgaagatgccggtattctccttcgagaagattcgtgacgctgatatcagccttggaccggagatgaagtctaccggtgagtgtctgggaattgccaggaccttcaatgaggctctctacaaagcattcctcggtgctggtatctgcctgccaaaatacaagaacatgatcatgaccgtccgtgatgaggacaagccggaggctgtggagatcgccaagagatttgaagctctgggatacaacatctacgcaaccaaaggaactgcccgtgcgttgatggatgcagatgtacaggttcgtctgaccagaaaagtagagcaggagtctccgaacattctggacctgatccttggacatgagatcgatcttgtcatcgataccccgtctcagggcgtggagcacagccatgatggatttgtgatccgccgtcatgccatcgagacaggtgtaaatgtgctgactgccattgatacggcaaaagcactggttacttctctggaagataccgatcacaaaaatctgaccctgatcgatattgcaagactgtaaataactgaaaaatatatagaaaagaacggttcattgcagccgttctttttatgtggttctttgcatgtggactggatggcataagtttgatgaatttcatctttgcagagaagacttttcagatctgatgcgtacatcagcatctcatctgaagatcggatttaccatgggttttcagatgtcagtgatgtgtattggacagctttccatgcagagtgcagtcaatgcgctgggttcagtggcagtggccggatatacggtagcaaccaaagtagatcaggtatctgtactggtcaacaatgctatgatctcagctgtctccgcatttgtatcccagaattatggtgcagggaacagaaagcggatccgtcagggagttcgtgtgggactgattcagacacaggcattgaatgtgctgatgggtgtgggaatcctgttgctgcgggaacctatagtggcattgtttattgaacatccgacaaaagagatcatagtatattccaacgggtatctgaactgggtggctccgtgctatctgcttcttggatttctggctatctatcgttgtgcagttcaaagcatgggaaataccattgcgccttttacggcttgtattattgaactggtcatgagacttggaagtaccatcggactttgcgcagtagccggatacctgggtgtctgtctggcgagtccactggcatggctgggtgcgtgttcactgcttgtgccggtatattatcatatggtaactattcagagccatgcgcatgttcaataaatatgcggttcatgcttgcatgacagagcatatttatgaacatgtatatggcgagaagccatacatgagcaaaagtcgctagatgtccgggggacatctgcttagcgaggaccgtagtgaaacggagacagcctcgtagaggcggttttgcgaatgtggctctgaatagttacatcatataacacaggaatagaaagagtgtgaaaatatgaatcaagattatttgataaaaaagaagcctatgtatgcgctggcgttgtttgcgctgcctatgatcatcggaaatctgtttcagcagacctatacgatggtggattcagccattgtcggccgttatgtgagtgagcaggcactggcggcggtgggggcttcttattcgctgacaaatgtatttatctgtgtggccatcggcggcggcatgggggcatcggtagtggtgagccgtcattttggtgcgaaagcttatgatcgtatgaagacagcagtctatacggcactgcttacttttcttgtcatcagtatcctgctaggaagtgtggggctgctctgcggaaaatggatcatgaatctgttgcagacaccgtcagacgtgctggatctgtctgtggtgtatctgaatatttattttctgggactgccatttctgtttatgtacaatgtgttgtccgctatgttcaatgcccttggcaaatcccggattccactgtattttctggtcttttcgtcaatcttcaatgtgggactggatatttttatggtaaagtctcttcatatgggagtttccggtgtagcctgggccacgctgattgcacagggaatctcagcagtactgtctttcagcgtgctgttgctgactttacggggaataaaagaaaaccaggatgttgcgctgaaaacagggacgggcagcggctggaaacatattttcagtatgacggaacttcgtactatgacaggcattgcacttccgtcgatcctgcagcagtctaccgtgtccatcggtatgatgctggtgcaatccgtggtcaacagctttggttctcagatgctggcaggttattcggctgctatgcgtgtggaatccatatgtgttgttcccatgtctgccatgggaaatgccatttcttcttatacggcacagaatatcggagcagaacagaaaggccgggtcagagagggatatcgtgcggtgaccattatggtccttggctttgcagcagtgatctgtctggccctggaactgtcaggagacagccttgcttatctgttcctgggagcagatggcacgccagcagctatgcagacagctgtgaactgcatgatgttcatgggctggttttactgtctgatcggttttaagatgactgcagacggtgtgctcagaggagctggtgatatgaaactctttactgtggcaaatctggtaaaccttggaatccgtgtgatcgtagcggtgactatggctccgagattcggtatcttcatggtgtgggcggcagtgcccgtaggctggactgctaactggctgatctcataccttaggtatcgaactggaaagtgggagaagcggtgaaaaaccgtgaatgcctctctgttcaataagatttttactaacctgccaattagcaacccgcgggctag

SEQ ID NO: 4064 - DNA, 16470 bp, Unknown
  16S sequences of unknown bacteria
cgcccattgccttggtggcaacgggcggcgcgagcgggccgcaattgcggcgctaagatttgttattcagccgcgggctcctcggtctcttcgggctcagccgcgggctcctcggtctcttcgggctcagccgcgggttcttcggtctcagtctcggtctcggccgcgggttcctcagccgccggttcctcagcggtgagctccacccacgcgtcgatctgggtctgcgcttcggcaacgatctcgtcgaagccggcggcgcgcatctcttccatcatctgcggaacagaggtggccggatcggtggtgccggtgagcacttcgttcttatagcggttgtagatctcgatgcagctggcgagctgatcctgcacgttggtggtgtcgaagaagaagcccagcatcacagagggaaccgcgttgtcgttgagcggacgcacttcttcttcatactggttgtactcggtttcctgcgtgaggttgaagaaggtgccctgcgtgtaagcggggatatcccacgccggattgtggcgggtgatgaggccctgctcgttgtactcccagtccacgccgtcctcgccataggcgaacaggtcgcgcacatagctgtcggtgttgatcaggttgaggaactcaagcgccttgtccggatgcgcgcagttgatggagatgctgttgagcgagccctgcaccgtgacgttggagaggatggtgtcgcccagctgcaccgcgatggcgttcacgcccatgctcgggccccaggtgctcacagcggcgtacggccagccctgcgccacatagaacgggcggtaggagggaacctcagccagcacagcggcgtcggcattgatgatgccgtcgttgaaccacttgtggaacatggtgagggtttccatgatgtcttcctgctcgaacacggccacaacctggcggctctcgtcatccacgcgcacgcccagggccggcaggccggagctcagggagtcgtaattggcaaggatgaagccattgccgttgccgttggtggtgaagggcgcgatattcacgagatccttgagggcgtacagcgtctcttcgacggccgccagatcgtgcatctcggtggtgtcaatgctgttggcatcgagcaggtccttgtcccacacgaagtagttggtcatggagctgtccttataggagggcaccgcgtagatcttgccattcacgcgcacggcgtcccaataatcggcggggatcagctcgagcaggccgggggcataggtgttgagatcttcgtcggtgatctcatagtaagcgcccagttgcacgtcgttgttgtaggtgccgtcgttgccgaagatgatgtcatacggctcgttggtgttgatgatgacgttgcggcggttgtcccagccgccccagtcgatgacctgcatctcaatgttgacgccgatcttttcgcccacatactcgttcacctgggcaatccaagaatcgtagttggcgggcatgccgttgccgacggtgacccacctgagggtgacgatttcttcctcagcggttgccatgccggccacgcccagcatcatgcacagcgcgagaagcattgccagaacctttttcataacaagcatcctcctaaatgatttatcgaattcgcatccgcgaatgtcgaacgatggtagccttcccttagcccttcaccgcgccgatcgtcagaccggagatgaagtacttctggaagaaggggtacgcgcaagcgatcgggatcacgatgaccacggcgatggccatgcgcacggattcgctgggcatggagttgcggtattgctgcaagctcacgcccacggtggggttgttggcgatatattccaggttgcgcatcatgttgttcagcagggcttgcagcgagagcaggcgcgaatccgtgatgtacaacgaagattggaaccagtcgttccagtagccgaacaccaggaacagcgcgatggtcgccagcaccggcttggagatgggcagcacgatctgcccgaagatgcgcagctgggccgcgccgtcgatcttggcggactcgatgatcgcgtccgggatggtggagcggaagaacgacttacatacgatgatgttgaacgaggaaaccgccagcggcaggatcagcgcccacaccgtatcggacaaacggagcaggttggtgttgatcacgtaggaggccaacataccgccgttaaagatcatggggatgaacaccacccaggtgtagaaccccttgagcttgaacaccgggcgggagagcacgtagcccatggtggtggtgaggaacaggcccagcagcgtgcctaccccggtgacgagcaccgagatgcccagcgcgtttaagatggtgccgcgctcgttccacaggaacttataggcggtgccagaaagctcagacgggaagaagctgtagcccacttcgcggatggaggtttccgaagagatagaaacgacgaacacgaagatcaccgggatgatggccatggccgccagcaccacgaacagcgcgacaaacagcgcgttggtggctgggcgcacgcggttcatcttctgggaatcgggcacaaaatcctgcgttttgcgctttgccgtatcggtaaccatttttgcttcctcctcccttagatgatggcgctttccgggtcaatcttcgaaacgatgaagttggccagcagcacggtcgcgcagcagcaaaccgactggaacagcgaggccgccgccgtgcggccgatgggcgtgctgttctgaatcgaggaataaatgaaggtatcgaacgtggaagcgacgttgtacagcgagttgggcaagccctgcgtcacctgccagaacaggccgaagtccgaatagaagatgcggccgatgttcaggatgaacatggtgatgaggatgaacttgagcatgggcagggtgatgtagcgcgtctgctgccacttgctggcgccatccagcatggccgcctcgtacaggctgccgtcgatgccggtgatggaggccaggtagaccaccatgttgtagcccgtgcccttccacgcgttcataaacaccaggatgaacggccagtactgcggcgattgataccacaaaatccgcttgccgatgatggagttgagcaggccgcgatccggattgaggaaggcgaacacgaagtagctcaccacgacccagctgaggaagtaggggaagaacatcatcgtctggaacactttgctggcccgcttggagaacagctcgttgatcatgatggccagcgccaccgggaggatgatgcccagcgcgatgaacacgaggttgtagaggatcgtgttgcgcagcagcatgccgaacgtattgttgttgataaagaatttgaagttgtcgaacgcgacccactcgctctggaacaggttgctcaggaacgaaccgcccgcagtgatcctgtaatccttaaacgcgataatcaggccgaacatcggaagatagctgaacagcacaaaccacaagaatgtggggaaccccagcgcgcccaattccacatcgtcgcgcgtccagcgccagttacgcttggccgcaggaaccggtgcggccgaattcatcttgccagtcataacagccctcctgtcctttatcaagccccatttttgttgccggaatgatattaacatatttccggggaaaaatcaatactttttgccgccaaatccaaaaatcaccggaatttaaccgtgtccgcgaaaataatatggaaagttgcacaaaacggcccgcgaaattaacagaccagccgcttgacaacgtttccgcgcggtgttaacatgttaatgtacacgtggaaatatcccgcgcgcccttccggtccatttgcccggcggcgcgcgttgcaaaagcataaaggaggagtgattgtgcaaaaactgaccatgcaggatttggcggatatggcgggtgtctcccgcataacggtgtggaaagtgctgaacaatcgccccggtgtttccagcgcggtgcgggacagggtgtgcaaggccgccatcgaatgcggaattcccctgcgcgacgcgcccgcgcccgaaggcgaaagcaaaaagcgcgtgttcgccgtgaccgtggcgcggccagagtcgtccactttttggatgcagatcattcaccacctggcgcaggagctcagccgcttcggcgctggcttgatgtacatttatatgcccgcagcctatcaaagcggctttgtgctgcccagctcgctttccccggcggaaatccaggcgtttgtggcgctcaatgtgtacgacgccacgcttctgcgcatgctctcgggctgcaagatgcccaaggtgtttttggatacggtgcccgcgctgcctgtgagcgcgctacagggagatctggtgctgctggaagggcgcacgcgcacgcgcgaaatcaccaaatcgctgctcgcctccgggcgcgcgcgcctgggcttcatcggcgatgtgaactattcgcaaaccaattgcgaccgctataagggctttctcgacgcgtacaaagaggccggcctgatgagcgaccccgccctgagcctcacagaacacctggacctgcacagccactacgagcagattcgccgctttctggacgccctgcccgcgctgccggatgggttcgtgtgcgccagcgatttcatcgccagctttgtgcgccgctattttgaggaaacgggccgcaaggcgggcgaacgctttttgatcacaggctttgacgacagccgcgaataccccaatgtctccggccagatcaccaccgtgaacgtggccacagaggaactgggcaagatgctcgcgcgcaaattgatgtaccgcgccgattatcccgacgcgccctttgaggtgagctatgtttccacgcagatcctctaccgcggcccgctgaaaaaggcgcagtagggctacagagcaagtcagcgcccaagcatgataaaaacccctctcccgaaagcgttgtcgcagggagaggggttttcgctatctgcgcgtcatttttggcgtgcaggcaacgcgcggaaaaacacggccaccaccgcgatggccagcgcgatcgcgcccgcgatgagcatggtctgcacgcccgtggacagcgccgcgctatagtcgtccatcaccagggccagcatggtctggtacaggccgcccccgggcaccagcggcacaatgccgatcagcgagaagatgttggccggcgccttttggcggcgcgccagaatttccgccgccagcgccaccgccagcgcagccacaaaattcgcgcccacggcggattgcagcagggccagcgccgccagatacacgccatagcccgccatgcccaccagcgccacgctcacgagcaggcggcgcggaatgtgaaacaaaatgccgaaaaacgcgctggcgcccaggctgcccaccagtcctttgatcacatccaccatgcgattccgccccctatgcgcaagaatgcgagcatggcaatgcccgcgcccgtagccaagattacggcgcgcatcaccgcgtcgcaaatgcgcgcgccgcccgaaaccatatcgccgtgcatggaatcccggatggcgttggtaaaggccaggcccggcaacagcggcatcatgttggaaaggatgatgcggtccgcgtcgcccatgccgcacagcgaaaccaccgccagcgaaagcgccgccaccagaaagccgccgatcaggcaggtgagcggcatgccctcctgatcgggcaaaaagcacagcacggcctgcaccgccgcgctgatcaggcccgcagcgagcatatcgaagccatcgcccaaaaacatcagtgcgaacatcgccgccgagccgccgcccgcggccgcgctcaggcccacgcgggccgccgcgggccgggagagccgctcgagttctcgccgcgcctcgtcaagcgccatgtcacggctttccagcgcgcgcgaaatcgcgttcacccgctccaggcgggccagatccgtcgtgcggcggctgacccgggcgatggacgtcgcactgtccccgtcgcgccgcaccgtcatcgtcaggcccgtgggcagcgcgatcacatcgatctcgcaaccgaacgtgcggccgatgtgtacggcggtttcttccgcgcgataggtctcgccgccgttggacaaaatcaggctcgccgccatccgcgcgacggcaatgacctggtgcatttcttcgttcatgggccggttcctttcgttttgacaagtgcgcctcccgtcatgggcgggaggctgaaagcgttaacaaagtcaacgcgcaggctgtgtagggcaatctggcaacccctcagtcagcttcggtgacagcaagatggaacaatccctcagtcagcttcgctgacagctccctttgcacaagggagccttttggctagtggcactatcgtaggaagtagccctgccaaaagcctcctttttcccggagggaaaaggggcgcacgaagcgcgcgcgctgtgcgcgaagcagcgcgaagtaagcccaatgagcaagggagtactgcaagccgctaggcgcagcaggacgaccattgcgaattgtggaatggtgtcacggcgttagccgtgacggagggattgatacccctcagtcagcttcgctgacagctcccctttgaaaaaggggagccttttggcgcggcgcagccgcgacggagaaatcggaaacttaagcatgcatccatactatctatgaaagcaaatcccgcaatttccgcgcacaagcggccggacgctttcgccagcctgcgtttttattgctgctgcttgcgctggagcagcacggctgcgatgacgatcgcgcccttgaaggcatccgtgaggaaggaatccgcgcccagcaggatcaagaggttgttcatcacgccgatgatcaacacgcccagcaccgtacccagaatgtgcccgcgtccgccggacatgctggtgccgcccaccacgacggcggcgatggcgtccagctcatagcccaatccagcgctggccacgtccacgccgcgcgtgcgcgaaacctgggtgacggccgccagcgccaccaccacgcccatcagcgtgtacaccaggaacttcacccgatccacattgatgcccgaaaggcgcgtggtgcgttcgttggaacccacggcatacacgtagcggccaaagcgcgtgcgcttcatcaccacaaagaggatggccgccagcgccagccaatacagaatgggcaagatccggtagccaaagatctgcgtgttcgccagggcggtgaattcatccggcaccttgggcgaatagctcttggtgaaatactgcgccaccgagcgcaccacgttcatggcgcccagcgtcacgataaagggcggcacgcggcccttggtgaccgccaggccgatcagcgcgccgatcagcgcgccggagagcagccccgccacaatggcgagggcgaagccagccggcccggaaatgcccagccgctgcagcacgccattggcggaggtatcgatcatcaccatcaccacggtgcccacgcccgccagcgtggagcccacggccaaatcgatgccgccggtgatgatgaccagcgtcatgcccagggcgatcatgcccacggacgaattcgcgcgcagcacattgagcgtgttgtccacccagcggccgcaccattcgccaaaggaatccacggagaagcccatcgcgtacgcctgcacgagcatgatcaaaatcagcgcgatgagcgtggagaacaggggcgactgcttccagcgccgcaggaacgcgcctgcaaagaacgcaaacaccgcgcccaaaatcagcgccacggccgcggtgaagcccagcgcgatgcggttgtccgccaggaagacgaaaaacgcattcttgcccgccagttccgccgccgccgcgcgcgccgccgcttccccggtgagcgtctccgcccgcgcggccaaagcgtccgcctgcgcgctcaagtcttgcgcgacctgctgcaggcgcagcgcttccgcgcgcacgtcctccgcgctggcatacccggcggacgcttccatcgcggaaaattccccgcaaccttccagccccaggcctgcggcgacctcgtcgagggccgcgcgcgcttccgcctcggcttcgatggcactatccacgtcttcccgcaattcttccagcggttcggcgagcgagcgcagcagcatcgattgcaccgcctggctgatctgcaaaagggaagcgcccatttcacccgtggcgtccgccacgccgtccagcgcgttttgcaacgcgccgccttcgcccatcagcgaacccaggatgctgcccagcagttccacggattcttccgaagaggcgagggaaacctgcgcttcctgcagcgccgcattgagcgccgataacgcctggtcgtccagcgcgccgctttccagcgccgcgatcccttcgtccaccgccgcaatggcctcctgcgccgtttccatggcgctctgcgcccggctttgcgccgtgcccgccttgcgcgccgcgctaagcgcgttatcgctttgcgcgtttaacgcgctcacttccgcctgcgccgcgcgcgcctcgtccatccacgcgcccagcgcgcccacgcgcgcgcccagcgccgtggcgaaaatggcgctcagcaggatgaccacgcccaacgccaggcacacaatgcccactccgcgcaatcgcttcataccgcttctcctcccgtcgcgagcaccataatgccgtgctccgtcatgcgttcgcccgccagctcgccggcgatgcggccatggtacatcaccagcacgcggtcgcacaggcggatgatctcctgcgcctcgctggaaagcaccgcgaccgccacgccctgcgcggccaggcgcaggatgatttcgtaaatttcttccttggctcccacgtccacgccctgggtggggttatcgaagatcaggatgcgcggatgcgcgctgagccatttggcgagcaccaccttttgctggttgccgcccgaaaggctggtgatggggtcgttttcatccgccaggcgaatggaaagctcctgcacattgcgcgcgaattcggcccgctcccgcttgcggtcgagcaagaggaaatggctcaactcgcgcagcgtgacgatggaggcgttctccaggatgctcatgtccttgagaatgccgttttccttgcggtcgcgcggcacatagccgatgcctgcgcgccgcgcctgcgtggtattccccagcgccatctcccggccaaacacccgcacgcggcccgcgtcgcgcttgcgatagccgaacagggtttggaacagttcgctgcgcccgtcgcccaacaggccggtgacccccaaaatctcgcccgcgcgcagcgagaacgaaatgtcctcaaacgcgcgcgcctgcgacagaccttccacttccagcgccacttcacccgcgccgccttcgcgcgccagccgccgcgtgctcacctcgtgccccaccatgtgccgcgccaactccgcctccgtggtctcgcgggtggcgcccgcggccacgttcacgccatcgcgcagcaccgtgtaggtatcgcagatttccagcacctcgcgcaacttgtgcgaaatgaacacgatggaaaccccctgttccttcaccgtgcgcatcatagagaacacgcgttcgatttctggctcagtgagcgaggtggtcggctcgtccatgatgatcacccgcgcgtcaaacaacagcgcgcgcgcaatttctaccacctgcttataggaagcatccaaatcgcgcaccatggcgcagggatccagcgccatgcccatccgctctagcacggcgcgcgcttcctcgcgcatgcgcgctgtgtccgtaaaagcgccccgcacgcgctcccgcccgagaaacaggttttcgtacacgttcaaatcgttcaccaggttgagttcctggtgaatgaaggcaatgcccgcggccagcgaatcgcgcggacttgcaaattccacgcgcttgccatccagctcaatgacacccgcgtcgggacgcaatacgccgcctaggatgttcatcagcgtggttttgcccgcgccgttttcaccgatcaacgcccgaatttcgccgtcttccagcgcgaaatccacgccttttaataccgcgttgctcgaaaatgatttggtgattgcgcgcatggaaagcgacatttgttactcctccttcgcaccgccctgcgctaacgcttgcgcggtgttccgcccctgcggactccgcttcgctccgtgtcctcggggctccagccgcttcgcggcctccgggttcgcaccgtgctcgcctgcttcgcccgcgccctcgcctttggcggcgcgcgggtacggcccggcatattttcgcctacgcactggtcgcgccttcggcggcccagtgttccgtgtctgcgcactacgcttcgctccgtgtgctcgacactccagccgcttcgcggccttcggctccaaattgcctgggcctagtcggccttcggcctccctcataacggcccggtgttccgtgtctgcgcactgcgcttcgctccgtgtgctcgacactccagccgcttcgcggcctccgggttcgcaccgatcctcaattcagcatggtcgtcccactgcgctcacaagctcgcttgtggcactccctgcttcattgggcttacttcggcctgtttcgcgcactgcgcgcggcctccgtgcgcccctcgcccctccaccccttcgggccttcgacggctacggcctgtttcgcgcactgcgcgcggccttcgtgcgcccctttacacaagggaggcgtttggtagtgcaacttccggcgatgtagcacttcccaaaaggctcccctttcataaaggggagctgtcagcgaagctgactgaggggttgcctcatcacactgtcgtcgttaaccaactgaagggttgtcacactatccgcgaagccgactgagagattttcttaccgcagcgtcaatgtacgcacacacgccttgaaaattcccgttgacttcgttgttggcaacgcgaacgactgtcaatccataattctcaaggaaagccgtgcgctgggcatccttttccttattagcttcctcatagtgctgagagccgtccagctcgaccaccagccgggcttgcgcgctataaaagtccacgatatatttcccgagcaccttttgccgggaaaaacgaatggggtacgtgcgcagaaaatcgtaccacagatgccgctcttcctttgtcatttctttgcgcagttgccttgccaaaggaactagctgtttgttatgcttgggttgcacggcaattcctccgttgtataccgtggtgcctaatcaatccctccgtcgcggctgcgccgcgccacctccctttggtaccaaagggaggcttttaggtagggctacttcatacggtggtgccgcttcccaaaaggctcctctttcacaaaggagacgcacgaagcgcacgcgctgtgcgctccttcaccccttcggggcttggcatattggcgcgcgggtacggcccgatgttccatttagcccgcgtccgccaaagcgggcgcgggcatgcttttcatccatcttaatacggcgaatcaggattgaggaattcctcgacgttatcgcggtccacgatggtggtggagatcaccacgttgtgttccacttcttcgcccgccaggatcttcgccacgttttccacgcagtgggtgatcatatccggcgaataggtggccgagcaaacccagatgttctcgtattcgggcatcatattgaagtattcctggcagccgccgccaccggtgatgaccttcacatccgtgcggccggactcgtcgatggcctgcagcgcgccgatggaggtttcatcgtccagcgagaacacggcgtcgatctccggataggcggtgagcgcgtccgtcatatcggcaaggcccgcctcgcgcgtgaaatcgctggccacttcggcgatgatttcgatttcgggcgcgatttcggcgatggtgtcctcaaagccgcccaggcggtcgtcgttcacgttgcccgcgcccggcttgttcagcaccagcactttgccctggccatccagcttttcggcgatgtagttggcgccttccacgcccatgccgtagttgtcgcccgtgagggtgtacatcaaatcggcatacttctcatccacatcgatgatcatatcgaagttgtagatgatgatgccctgttccagggccatttccgccgccacttccacgccggtgaactgcggccacacgacgatggccttcgcgtccatggaaatgagctgttcgatctggctggacatctcgtccgccgtggaggaagtgagcatcacgtagttcaggtccagttcttctgcggcctgctcagcaaagtaggccacgccgcccacccagccgtgcgtcgtcgccggggcgagaatgccgatcaagggcttttcttcctcggccattgcgaaggatgcgcacccgagcgcaagcacgagcgcgagcgccaatgcaaggactttcttcataaagaagcctccttctatattcgcgccgcttgggcggcgctgttcaccacaattataccagatttgcgccaaaatgcaagaacacatttctcacccgcgcggcggcgcaagcgccccatttgcgcttgcataccgggagataggcaagcaaaactttcattccaagcgcattttgcggccttttttatcagaatttgcagaaatccatgtaaattcctgcaaatctgcattgacagcgcgggcgcatgggagtataatcattgcattcagattcgaaggaggaagcccatgtcttacgtaaaagaggtttatgaaagccttgtcgccaaccatccccacgaggtagaattcctgcaggccgccgaggaagtgctcacttctatcgcgcccgccgtggaaaagaacccggcctatcagcagcaagccattctcgagcgcctcaccgagccggatcgcgcgatccttttccgcgtgccgtgggtggacgataagggcgtcgtgcgggtgaaccgcggctaccgcgtgcagttcaacaatgccattggcccctacaagggcggcctgcgcctgcatcccagcgtaaacctttccatcatcaagttcctgggctttgagcagatcttcaaaaacgccctcactgggcttcccatcggcggcggcaagggcggcagcgatttcgatcccaagggcaagtcggaccgcgaagtgatggccttctgccagagcttcatgaccgagctgtaccgccacatcggcgcggatgtggacgtgcccgccggcgatatcggcacgggcgcgcgcgaaatcggctatctctacggccagtataagcgcatcaccagcctgtacgaaggcgtgctcacgggcaagggcctcacctatggcggctcgctggcgcgcacggaagccactggctatggcctggtgtacttcatgagcgaagtgctcgcctccaagggccagtccttcagcggcaaaaccgtggtcatctccggctccggcaacgtggccacctacgcctgcgaaaaggcgcagcagctcggcgcgaaggtggtcgccatgtccgattccaacggctgggtgtacgacgccgagggcatcgacctggccgcgatcaagcagatcaaagaagtggagcgcaagcgcatccgcgaatacgtttcctaccgcccgaaggccgagtaccacgagaccggccgcatttgggacgtgccctgcgacgtggcgctgccctgcgccacgcagaacgagctgcatttggccgacgcggaaaccctgatcaagaacggcgtgttcgccgtgggcgagggtgccaacatgcccaccacgcccgacgcggcgcaccgcttccagtccgcgggcgtgctgttcgccccgggcaaggccgcgaacgcgggcggcgtggcggtttccgcgctggaaatgagccagaatagcctgcgcctctcctggtcgttcgccgaggtggacgagcggctcaagggcatcatggccggcatctatggccagatccgctccgtgtgcgaagagttcggctttggcgacaattacgtggcgggcgcgaacatcgcgggcttcaagaaggtcgccacttccatgctggcgcacggcgtcgtgtaaggcggaccgacggttatttatgcttcgcgcggcgtttttggccgggagccgcgcaaggccttatgtttatccccggccggttttgaaaaggggctgccgcgcctgttttgcggcagccccattcctcttaacgggcgttgtccatattttgaggagatttttatgaacgaatgggcgcaaacggcccttgcggacgcaaattccgcaagggccgtagactattgacaaagtctcgaaagaaaaaaggttctaatcagaaatgacggcgtgtacgtcatttctggtatttttcgggagcaaatgcttgcatttgcggagaaaaatacattcccgtcccggtcgctggccgcaaatctttgatttgcaagcggccgggtaatccctcgttgacaaaccaaaggtttgtcaacgatcagcggcccttgcggacgcgaattccgcaagggccgattttttgctctctttagtccttaagctcgcgttcgagcacggcgcgggcggtgcccgccagcatatcctgggcgtaggccagcacgcggtttgccaggccggcttcttccagatcgaggccgaagatgctcgtatcgcgcagcacgggcgggatcaggcggccggcgttttcggccgtgagcggctctgcaaacagcggcaggcgcggatccgggctgagcgcgaagggcgcgccatcgtcgcccacgccggaaaggtacttgaaccagccggccagggccagcgggatgcccaccagagcgtccacatcgccgcgcgccacgtgcgccttgatggtttcgccaaagcggatggccagcttttgcgaagtatcggtggcgatgcgctggggcgtatcgggcaggaacacgttgggcaggcgctcgttgacgacttcgtcgataaacgtcttgggatcgatgatgccaggggagaccaccacgggcaggccctccacatagccgatgcgctccaccagctttttgagcagcggatcgcccatttccgcgcagatggtttcgtagcccatcacgcagccgaacacggccagcgcggtgtgcaacgggttcaggcaagtggtcaccttcatgcgctccacgttggaaacggtttcgcggccggcaaaatagatgcccgcggcttccagcggcggccggccgttggggaaattgtcctcaatcacgaggtattccttttcctcggcgttcacgaaggcggcggtgtaggtcttgcgcgcggtgatgatgagttccgtgtcctcaaagccgtcctggcggagcatttccgccacgcgcggatccggacgcggcgtgatcttatcgatcatcgtccaggggaaggtgaccttctcgcgcagataggcggcgaattccgcgtcgccctcggcgagcatttcgatcacgttttgcagcttttcgccgttgcgggagcaattgtccatgctcaccagggcgatgggcgcggcgctcgtgcgcatgcggtgacgcaacagatctgccagcgtgcccatcagcgaaccaggcgcatgggcgaacttgggatcgtagcccttttccgtgatggtgaagctggccatttgtagcgcggggctggcgaagatctcctgcaggcgcgccatatccgcgaacgtgagcgattccaccaccgaggcgaccaggcgcttatcgatgccgccgttcgccttgagggaaacagcgacgctcaaattgtcgaacgggcggtacgcgcgctcgacgatttccggatcgaaaccttcgcacaccacgatgccatggtcgcacaggcccttgtccaaaacggtttgctgcgcgcaggcgataaacgagcggaaaatgttgcccgcgccaaagtgtacccagcgcggcgcggcggcgcgcacgcgctccacatcaaatttgggtagatcatatcccttttgcgcccactcgggagcgtgcaattgttgcaaattgagatgcatggcaattcctccccatgatttgtgctaccatgataccacacgtgcgccgatagttcaagactaggggctgtgaaaaaacaacagaagatttttcgcagccccagattcaacagggaaaaacgcaaggcaaaggaaaaaaggcgcaaaaccctccttgcccccaagaaagtggcaaaaggggtgcacgaaagcaacccctcagtcggctaacgccggcaacgtgatggaacaatccctcagtcagcttcgctgacagcgttccacagttcggcatagtcgtcctgcatcttcgcaccgcccacgccttacggcggcgcggtgttccgcccctgcggactccgcttcgctccgtgtcctcggggctccag

SEQ ID NO: 4065 - DNA, 2784 bp, Unknown
  16S sequences of unknown bacteria
ttccttcctgcatcgcaacaaacttatctgctttggcatggcataccggacattcttccggaattttgccctctgctacgtaaccacaaacggaacatacgaactttttcatttctaagtacctcctctaatcattaataggaataattcttatttgtgtttttattataacaccgtttccaaaaattgcaagcttttttcaaaaaaagacgatgaaatttttttcatcgtctttctccttgctaaaaaggttatgccagctccctttccataatctttgccagggctttggcatcggcttcaattgctgcctggttttctccttcgatcataatgcgcaccaagtgctctgtgccgcttgggcggatcagtaagcgccctttgccctgataggcagcctccatcttacgtatctccttggccaccacagcatttttcatatactccgttttatactgcggcgccaccggcacattgcgcaagacctgcggataaatattgattttttttgcacactggctggccttttccccgctgcgcatcagtaggctggccaaatgaatcgcagactgcatgccgtcacccgtcgtggattgatctgtcagcaaaaggtgcccggactgctccccacccaggttgtagccgccgtttttcatttcctccagcacatagcggtctcccaccttcgtggtggcaatttttatcccgtatggttcaactgaaagcgccaggcccatattgctcatcacagtcgctaccagggtatcctttttcaactgcccgtttttcttcatatcgatggccagcagacccatgattttatccccatccatcaacgtgcccgtttcatcgcaagcaatcaggcgatctgcatcgccatcaaaggcaaagccaaaatccgcggccttttcacgcaccgtttggcacattttctccgggtgtgtagagccacagccgtcattgatattctttccatccggctgattgtacaaaacgataacctttgcgcccagcttttcaaatacacgctgtgctaaattgctggaagccccgttggcgcagtccaatacgatggtctttcccgtcagctgtacatctgcctgtgctgttagaaagtcgatatagcgctgctccgcatcccccatcgcccgtagcgcatctcccgttaatttagcaggcacctcgatatcttccagcatcgcttcaatctcatcttccaacgcatccggcaacttatacccaaactcatcaaaaaacttgatgccattatactgtgcagggttgtgcgaagccgagattacgactcctgctttaaaatacccactttgcaccaaaaaggcgacggccggcgtaggcacaacacccgccgaaacggccgcgccacccgccgcaacaatgccctcagccaacgcattttgcagcatgggtcctgagccacgcgtatccataccaatcaaaatatgcggctgctgctgtgtttttgccaaaacttttgcaccagcataacccaaccggtatgccagattttctgttagctcttctccaacgagacctctgaccccatccgtcccaaacaatctagccatttgataacccccaatttcggtatcctctcaaagttaatcttcagacaaatactgctctgcgctggccactgccaccgcaccatccgcacaagcggtaacgacctgccgcagcggcgttgtgctgatatcccctatggcatatacgcctggcagattggtccttttttttgcatcggtctgaatatagccagcttctgtcagcgttacctgtccctttaccatctcgttttgcggcagataacctgcggcaatgaagatgccgttacaatcgatgcgcttctgctccttggtttccacatgctctgcaatcagcccggaaaccatgccctccttctgctcgattgacaccggaacatacggcgtcatcatcgttacatttgaaagcgcccgcgctttatcctgcaatcttttggccgccctaaactcatttctccgatgaagtattgttacgttttcacacagattagaaagatactgcgcatcctgtaaagcggtatccccgcctcctatgattactgtgcgtttccccttgaaaaagaatccgtcacaagttgcgcaatagcttacccccctgccgcgcagcgcttcctctcccggcagccccaatgtcctaggctgtgcgcccatagccaaaatcaccgcgcgcgacgtataggtattttgtgcagtgatgattttcttttccctgcccgtcaattccattttctccacaggctcatacgcaaatacagcgcctaggttttgcgcttgcgcctgcatggccattgccaagtccaccccgccgatcccatcggcaaagccaggataattttcaatgtgatgggttgttgctgcctggccgcccggcgccatctgctctaaaattgtaaaagacataccagcacgcgccgcataaatggcggcagaaagccctgccggcccggcgccaacgatcaaaaggtcctgcattgttttctccttttctatgtctaaaaagtttctttatgttttttattattataccccaaatacaaggagaatgcctagggaaaacggtttcacccaattctctggcaaaaagaaaactccgccaaagatttggcggagtatgaacgtactgattagcgtttgctgaattgcggtgccctgcgagccgctttcaagccgtatttcaatcgtctgagcgatgattttccttgatattccgggcttttttgag

SEQ ID NO: 4066 - DNA, 10287 bp, Unknown
  16S sequences of unknown bacteria
cgccggtgagcagggcatggtactgtccggcgtccgtgtcataatacgcagcctgttcccggaggaaggccgggtccgcagcggtgaacgactcccgcagggcgttttccaggtcatcagcggcaatccaggtttccagactgccgtcccgggaagcggtgggcagtcccatgcgctggtaccagttcagcagggcatggggctccagttcgctggggtcctccggggagagcggctctgaagcagaggcggtccgggactcggaaccggactccgaagacggctcccggctggtgcagccggacagcatggtcaggagcagcccgcccagcagaatgacacacaggatacggcgcatgatgattccctccttataaaagaacacagcccgccccggagggcggactgtgattggttcagatattctggctctccgccggcagccaggagacaaactgatagctcttctggtccggggaaatgcggatggtcagttccatgcggcggtcttcccccgattcatagtccataaagaccggaatgatgcgcaggtcgccgtccggacgcacttcgcccagttccagccggggctgtatgccgatgcccgggccggagatggagcggtagccgtgatgctcggcatcatagaagttggaatccgctcggaactgttccggggtcacgccctcgaaccaggcggacatggtgctctccagttcctcttcggggaagaaccagccctgattttctcccagtggggaggcatagcgctcctccttctcctcctgggggaggtcgtttacaaagctcaggaaccagcagtaggcatcgccggcggtgagttcgctgccgtctttccagccatcgccatagaacaggctcacatgcagcggatggagctcctgtgtttcggggtcctcagcggcgccgtacatcatcagcacctggacatagaagtccggcacttcctccaccgactcatacgactgttcaggcagcgacagctccgggctggaactctccaccccggaactctcctgggaggaatgttccccctgttccggcccgcagccggtcagccctatggtcagccctgcggtcagcagcagcgcaagcagtcgtttcatgtcttttctggctcctctcgatattcttttaccagtataacacagtttgccggcgcttcctatgggaaaatcctccgccggggaaattttctccccggaccgctcagacaccaggggtcagcatggggagggtctggtccgggccgggagcttccgcaccggtctggacagccagggcataccaggcattgttttcgccccagtagacattgagcagcacggcagtacagctggggtcattttcaaattcgggcagggtgaaggtcagggtgccgtccgctgccagatcggtttccagggtgagcatctcgccgccttcgcccaccggcatgcccagggtatcccgggcttccgccatggcgatcaccttttcaggccgggcgccttcggggaatttgacggtgatggtgctgcccgcggcggcggcggggatctcatcataccgcttttcgatgaggccggtggcaagatcggtgccgcacatgatggcgccgttccagtgttccggacgcatctcccagggcagagcagtgccggagaggtcagcggtgatctccggggcctcctcggggtcatcgaactggacttccagcccggaggtgacctccggctcggaggacgggacggaggagggagagctctcaggggcgcaggcacacaggcagaggctcaggagcagggcagaaattatgatacgcataagcgggttcctttcttgatacagggcagtccgggagatccggacagaaaacgggattttatcgtgcaacagaacagtgtggaaaaaccagttatttactgcatggggaaggggaaaactttgcgggaaaaagaaaaaaggatcttcccggttcggggaagatcctttttgaaacgtacagatgaagtatctccgaaggagaagaagttatctcttggagaactggggagcgcgacgggcacccttcagaccgtacttctttctttccttcattctggggtcacgggtcaggaagccggccttcttcaggatcgggcgcatctcatcgccgttctggagcagagcacgggcaacaccgtggcggatcgcgccggcctgaccggaaacgccgccgcctgcaacggtgcagacaatatcaaaacggcccagagtattggtgatctccatgggctgacgaacgatcagcttcagagtttcgaggccgaagtactcatcgatgtcacggccattgatggtgatcttgccggtgccggggtacattcttacacgagctaccgagtgctttcttctgccggtgccgtagtagtagggcttggaatcgtacattctaaaatcctcctctcaaattacagagtccacgcggtggggttctgagcctggttgttgtgctgctcgcccttgtagatgcgaactctggtcagagccttgcggcccagagtgttgtccgggagcataccctttacagccagcatcatggccttctcggggttctcgcgcatcaggtgatcgtaacggatctccttgaggccgcctacccagccggagtgatgacggtagaacttcttctccagcttcttgccggtgaggattgccttctcagcgttgatgatgatcacatggtcgccgcagtccacatggggagcgaagtcaaccttgtgcttgccgcgcaggatggcggcagcggcagcagcggtccggccgagaggacggttcgcagcgtcgatgatataccacttgcggctgatttcctgagccttgggcatagtagtcatagtgtttacctcctgaaatgatttgcagcccgcttccaaaaaacaggggctgaatgtattgacagcgccctaaaaagggcatgaaaagaaaccctgtcaaagcgacaagtcctattatatcggtgcccccgggaaaagtcaacacctttttgaaggaatttttatgctggatggagcgaactccgtttttcttcgatttttacccgtttttctcccgaatgctccgatgccattttaatttttgtgcgctttgcccagggccggaaaacccggttcccaagccaaaatccccggttctggaaaaaacaggcggatgcgctttacagctgccgggaaagagggtatcatcagaggcagaaggaggtgcgcccatgcagaccattcccgcaaagaccattgtcacccgtacccggagccggtggtggttcggcaccgattataatatgaatctctaccggggctgtacccatggctgcatctactgcgacagccgcagcagctgttatcacaaccccgacttcgaccacatcgccgtcaaggaaaatgccctgaccattgtccgggacgacctgcgccggaaggtgcagcggggcgtggtggctaccggcgccatgagcgacccctataacccgctggagcaaaagctcgggctcacccgccatgccctggagctgctctcggcctatggattcggtgtggcagtggataccaagagcgacctggtgagccgggacgccgatgtgctctcggagatcgcggcacagatgccggcactggtgaagttctccatcaccacggcggacccggccctggcagcacgtctggagcccggggcaccctctccggagcggcggtttgccgccatggagcagctggcaaaggcgggaatattcaccgggctgctgctcatgccggtgctgcccggcctcactgacaaccgggagaatctctcccggctgctccggcagactgcggaggccggaggacggttctgttactgctggcccggcctgaccatgcgggagggacagcgggagtatttctatcaggcgctggaccgggagttccccggcctgtgggagaagtatgagaagcggtacggcgcccggtaccgctgcactgtgccgggggcggcaaagctctatgcctgggtgcgggaggagtgcagccgtctggggctgctcagcgaaatggaggccatcatcgccgtatcccggcgggggtacgacttcggcggtctgccgggtcaggcaagcctgttttcatagggtgcaggtccgggcgggcacgcatgggaggcggtttccttttataaagggagagctttccaccagggcagttttccacagatgcggggccggcatgtggaaaaatgtccgcttccggttccggcagaggatttccggggctggaatcttgcaatccccgggggagcgtgctaaaattggagagctgaaaaattacccgtttaacggaatggatcgaagggattgcctgtgcaactgtttttgaaacgactcaagggggacccggtgctgctggcagcctggggactggcattggtttcggcatttctggtgccgccggaccgggaatggctgggctatgtggacttccacaccctgggactgctcttctgcctgatgctggtgatggcaggactgcaggacatcggcttcttccagcggctgggcgagggcattctcgggcgcacccgcactgcccgtcagctggaactggtgctggtgctgctctgcttcttcaccgccatgctcatcaccaatgatgtggcgctcatcacctttgtgccctttgccggagcggtgctcggcatggcagggctcaccgaccgcattgtgccggtggtggtgttccagacggtggctgccaacctgggcagtatggcaacgccggtgggcaacccccagaacctctatctctactcccattacggcgtgccgctgggcgagttcttcggggcggtactgccctttgcggggctttcgctggtgctgctcaccggggcgctgctgatgcgccggtcggcacccctgcccgagatcccctccaccgccggacagctcccgcctgcccggggacggctgctgtgctatctgggactgttcctgctcagccttgcggcagtcgccaagctgatcccggtgctgctgctggtgcccatggtgatggcagctattctgctcattgaccaccggctctttgcccgggtggactatggcctgctgctcacctttgcgggattcttcatcttcatcggtaatgtgggacgcattcccgctttccgggagctgtttgcctcgctgctggcaggccgggaggtctatgctgccgccctggtgagccaggtcatcagcaatgtaccggcggcactgctgctctccggcttcaccgacaatgcccgggcactgctcatcggtaccaacctgggcggtctgggtaccctgatcgcctcgatggcaagcctcatctcctataagtatatcgccctctccttccctgagaaaaagggaaagtacctgggcttcttcaccgcagtgaacctgctgttcctggcagtgctgctggtgttctaccactttgtaatggcctgacggcagaaaggagcactgctctatgaaacgtatcctcctcttgttgggactgggtgccctctttaccgccttctttatcaacatcggcggcgtggatctgctccccgactggctgggcagcctgttctttgcgctgggtgtcaccggactgggacgccgcggcggcgaatccctctccacccctgccatgatcgcctgggtgctgtttgtcaccgagatggtatcggtgctgctgcgccccgaaggcatgtttgcggtggggatcggcgtgctctttgtcattctggaggtatggctctacctgctggtagccggtatcctggacgaacgcttccccgaagcagagctgagcatcaggcccatctccattctgggcgtggtgagcgctgtgggctatgtgatgaccatggcattcggctcgggcattctgggggtgctttgcctgctgacaggggttgccatgaaggtctggttcatggtacagctcgccaaactctccaaaatcgtggaggactaaaaaccgcataaaaaagacccggaagcagccgcttccgggtcttttgttatttccggggaaaaccggaggatttccttcaggagagaaagggatctcagccccagacttcttcggcgatctcacggatcagagccagcttcttccactgatcctcctcagtgagcttgttgccctcctcagtggaggcaaaaccgcactggggcgacaggcagagccggtccagcggcacatacttggaggcttccagaatgcgctccttgatgtgctccttgtcctccagctgggggcgcttggaggtgatgagacccagtaccacgatcttgtcgccggtgacatccgccaggggttcaaaaccgccggaacgctcgtcatcgaattccaggtagtagccgtccacccgctcctgaccgaacaggatcttgctcaccggcgcgtaaccgccgctggaagcccaggtggagtgatagttgccccggcagatgtgggtattcaccaccatgccccggggaacacagtcaatgacagcgttgttgaggtccacatagagctgagccacagcatcggcgtcggtctgaccgccgtagagtgccttgcggcgctcggtatcacagagcataccccaggtgcagtcgtccagctgcaggctgcggcagccggcctcatacagggcatggataaagtcggaataggccttgatcagatcctcccggaaggcttcccgggtgggatagacagcatccagactgtcgcagttggtgccgcggagcatctcattgtagaactgggccggagccggaatggtctgacgggggatggcacggtcgcctaccagatcccgcaggaacttgaagtgctccaggaaggggtgaccattgaaccggatgggggcaacgatgcgtccggtgtcggcacgggtctcctcatcgtggaagaagtagccatgctcgccgacgatgtgttccaccccctcaaagccccacatgaagtccagatgccagtagctgcggcggaactcaccatcggtgacgcagcgcagaccggctgccagttccttttccaccagctcggtgatgcagcggtcctccacagcctttagctgctcagcggaaatggcgccgtccgcataggcggcacgggcttccttgatggcgtcgggacgcaggaagctgccgactacatccagacggaacggtgctttggttctctcggtaaaagacatatagaaatcccccttcggatggtatgatacaacggattgtttgaaccgatgagcctatcataccacaactggtggctatatgctaatactgataaacaattgataaccatagccaaaagctatggcactctgtattacaggcacaggggatcgggttctgtgccggcatcggatacagacggcggcttctgccggaggtagggctggaggaattccaagtaccgctgacccagacggctcaggggctgatccttggggtggaggtagccgatctgcatgatttcgtcgctttccaggggcaccgaggtgatccgggacccgctggcgtcctggtggatgatgccggaactgatggtgtaggcgcccagtcccaccagcaggttaaagagggtggcacggtcggtgaccacgatgttcttggggctttcggcggtggaatggggctcttccgagaagtagaaggagttgtgcaggccctgttcatagaccagccggggatagctgcgcagctcgtccagggtcaccgaggagcggcgggccaaggggtggtcggtgctgacaaagatatgcggacgggcggtgaaaagcgggacaaattccagttccgcgtcccggataatgcgcagcagcacttcccggttgaagtggctcaggaagaggatgcccagctcactgcgctgggtgcggacatcttcgatgatgtcataggtgcggctttcccggagggtgaactcatactgatcctcccggtattcccggaccagatcgatgaaggcgctggcgaccactgcgtagtgctgggcagacagggcaaagacccggcgcaccggggtgccgaatttatactgctgttccagcagatcggcctgttccaccacctgccgggcataggccaggaatttgaccccgtccggggaaagcatgacgccccggctgccccggtaaaagatggtgatgcccatctccttttccagatcggcaaccgatttggaaaggctgggctgggtgatgaagagccgctgggcggccaggctgatggagccggactgggcgatctcgatgatgtaacgcagctgctgcagggtcatggaaagcctccttgggacgggtgatgtacatggggattattgtagcatactcccgggagagtggcaagggaaacacagggcagaagcggcgccggagtcaacggggaagagggcaggggcttccatccggcagagggagcagggtaacggtgagcttgccctggcgctgccgtcccagggcatagcgcaccagggaagcggtacagctgccggggtggcgcagcccggcgatcagatactccgactgttccaatcctgccgggtaccagaacccatcaaatccccggggcaggatcacagcccgttctgccgggtgataggcgcacagcagggtgagggtcaggccgggatattcggttttgcagcggtacagggcatgggcagccagccggtcgaatctgccgtactgccccaccacaaactctgttatgctctgttcccggatatgacgctcgatctcggcggtcagcgatggcaggatatcgctggaggtgtccctgtgcccaatgagaaaacagcggctgtttggcataaacaatccctctttttactttattttatcgtaaaaataatacgataaaaatcattaaagcgcaacgatctttccaagtataataaacgcagcagacaagtaagggggcagagaggaatgaaagatatcctggcagagatcacccggtaccgggaaagccggggctggaccgaataccagctggcagaacgttccggcctgccccagtccaccatttcctcctggtaccgcaggaagatgatgccttccctgccatcgctggagaaggtctgcggggcgctgggcatcacgctgtcccagctgctggcggaggacgagaaaacagcggtgctgtcccccagggagcaggaactgctccgccgttggtcccggctgaacgatgcgcagaaacaggcgctgctggatctgatggacactttctgagagaagcgaaccctctgagtggaacaggataaataaaccaccctgcccgaatggggcagggtattttgttccgtgcggaaatgacagcgccgccacagggcagatcacagcgggttcatcaacccttctgagttattttaactcaaaagggttaaatttttcaagggcaaatgggtatcattttcatatgaagtgaggtggtacccatgaatattggagaggcggtcagagagcggattctggaactgtgccgggaacgggatatttccatcaaccgtctgagcagtatgagtggagtcacccagtccaccgtgaacaatatcgtcagcgggcgcaaccgcagcactacgatttccaccatcaagaagctctgtgatggcctgggcattaccattgaggaatttttccattctgatctgttccgggaactggagcaggagattcaataaaaaacacccccggtcctcacaggacagagggtgttttttcattggtatacaggctcagatgagctgatagagcaggccgtcccgggtgctgtaccacaccagcagaccatgttcccgccgggagagccgcagctggaagtcccattcggggtactgccgccagacccgcaggcttccgcccgagagcagggccgcaaaggcgatgtgttcagtcttggtcatggggtggtcggtggtgatataccattcgtcctccaccggttcggtgtgcagacgctggtgttcctccgccttccggggcttctggggttccagggtgcgtccgcagcactggacacctgccggcgaggcggaaaagatcagattcccgcataccggacagatatagaatactgtatttttcatatttcctccttgcgggggattttcagtgagatccgctgtgagcagactctcggtgctgacccccagggccgctgccagcggcgccagcagggagatgtccggacagcccagcccagtttcccttagttaaagatatgaaccctctttatcagtctacttttcc

SEQ ID NO: 4067 - DNA, 32759 bp, Unknown
  16S sequences of unknown bacteria
cctgggtccgtccgtgccttcggcgccgtggacgtggtgcttcatgacccgcaaaaccttattccttcgtcgggaggcaccacgtccctgagcccgtccgtgccttcggcgccgtggacgtggtgcttcaaggcccgcaaagccttattccttcgtcgggaggcaccacgtccctgagctcatccgtgccttcggcgccgtggacgtggtgcttcaaggtccgcaaatccttattccttcgtcgagaggcaccacgtccctgggtccgtccgtgccttcggcgccgtggacgtggtgcttcatgacccgcaaatccttattccttcgtcgggaggcaccacgccacccgcctcggccctctggcgtcccatctattcaagttatttatacatctttcttcgtgaaaatgttgaatcgctatgccgttatcatttataatccgataatgacgagttctgggaataagaaacagaaggaggatttatgagaagcagatttaatatgttccccgtcgtggaaggaaaagaaacaaaggccaatactatcggcaaagcagcaattataggcgggtgtatcttaacttttgggatgcacttgttttacaaggaaaacggtgctcgcatatggacatacttgagtgagatatttgtggcatattttctgctggactacctgtttctaagcatcggcgggtgtatccaatgcagcaggcgcatcgggaaaagggtgcgagttggaatcgtgattctggctttggttgccgttctcttcaccttgctgctttgcttcctggaaaaagcaccaactctcaccctacttccttacagcataattctcgtgtacgccgttgtggggtatcggaattataatagcgtaaaaaaagcttagctcagactggacaaggagcgcattaccagatcaatgtctttgttttccaactcttgtataatgtgcagatacgtcttctgcgtcgtcgtcatgctggaatgacccagcctttgggcaacactggcaatagagacaccggcaaaaagaagcagggaggcgtgggtatgacgaagaccgtggaccgaaatcacgggaatatgaagttttcggcagtgacgttccagtacatcattgacagtggaattgtacacttttccctgtatgaatataggcttgtcttccggcaggtttcggagcaaggtggagaattggacaatcagctgccaatccagttggacgcgccgaacggaggagcggttctttgtaggttgaaatccgcctccttctttgtaattccaagtcttgttgacagagatggattgctttgtgaagtcgaagtcggcgggggtcaatgccagcgcttccgagaagcggagaccggtttttgcaatcagaagaatcagccaatcccaattcaacccttcttccagattcaggtccgccaggagctgatgcagttcaaattgattcagatatttacattttttcacccgaggggtcttccctttaatgattgcttttcgagtcgggtcccgatcgataagcccttcatccagcgcatccagaatggctccttttaattgatggtgaaaatccattgttgtttgccgctcatgcagcaaggcgtagtcattgagcagcttttgataggtaattcggttcagttcgccaacttgcaattccggtgacagccgacgaacccaggatagcgtcaattcgtattttttcatggtaacgtcacggatggcgccttccttgtacacttgaatccactcttcgtaatactcgtgaaataacgtggttttcttaatgttgttcagcataatgacctcctgtaaacactttgcagcatgtaatggtaaagaaatttcctttaccaatccccggtgcatggtataattaaaacaatcggcttacaccgggaatgagcgtttttgtttaagtataagatacaacgaggggcactatgaataagcaacaattatccgcaaaaatctgggaatctgccaataagatgcgttcgaagattgaggcgaatgaatacaaggattacattctggggtttattttctataagttcctttccgagaaggaagtggaatacttgaagaaaaatgattggacggatgaatacctcccggaattgactgaagaggataaggaaacggtaaccagcgttcagaagaatatcggatattttatttcttatgaaaacctgttctccacctggctggaaatggggaaggatttccgcattgaacacgtgcatgacgccctatcggcgtttaaccggaacatcaattcgacccataagcgtgtttttgagaaaattttcgacacccttcagacgggactttccaagctgggggataactccgcatcccaatccaaagccattcgggatttggtatatctaatcaaagatattccgatggacggaaagcaggactacgatgtgttgggattcatctatgaagatttgattcgaaactttgcttccaatgccggaaagaaggcgggggaattctacacgcctcatgaggtgtcgctgcttatgtcggatattgtggcacaccacctgcagaatcgcaaggagattaagatatacgacccgaccagcggttccggctctctcctaatcaccatcggaaagagcaccgctcggtatatgaagaatcgaaacaatattaaatactatgcgcaggagctgaagcagaacacctacaacttgactcgaatgaatctggtgatgcgaggaattctcccggacaatatcgtgactcggtgcggagatacgctggaagaggactggccgtattttgacgaaaacgatccggcacagacatacgatcctctttacgtggacgcagtggtatccaatccgccgtattctcagtcatgggatcctaccgggaaggagaacgatgttcgcttcgctcggttcggcttagcgccgaagggtaaagccgattatgcatttctgcttcacgatttgttccacgtaaaggatgacggaatcatgacgattgttctgccccacggggtgcttttccgcggcggcgaagaaggagagatccgtcggaatctgattgaacagaatcatatcgatgcaattatcgggctgccggcgaatattttctacgggaccggcattccgaccatcatcatggtgctgaagcagaagcgcgagaacaatgatgttctcattatcgacgcatccaagggcttcatcaaggagggtaaaaacaatcggctgcgtgcctgcgacatcaagcgaatcgtagatacggtgaccgaccgccgggatgttccgaaattcgcaaaaaaagtcagccgggaagaaatccgccggaatgactataatctgaatattccacggtatgtggattcctctgaagaggcagaatcctgggatatttatgcgtccatgttcggcggaattccggaaaaagaattggattcccttcagaaatattggagcgccttcccgcatcttcgggaagaattgttccgggaagtatcgcccggatactgtgaggtgaaggcttcggatattaagtccgccgtacaggagcatgaagatgttcaactgttccgaaagcagttctgcgacgccttccgcacactggaagatgcgcttcatcggacgcttgtagaggaagcggaaaccgtaaatgccgtgacggccgagtcggatttcaccgatgatatttttacccgtctcaaagatatcccgttggtggattcttacgaagcctaccagcttctccatgattcttgggaaacggtaattgagaacgatctggagatgattcagacggaaggtccggcggcggccacgcaggtggatccgaacgtggtgctgaagaagaagaatggaaaggatcaggaggttcaagatggctggaaggggcacattctgcctttcgaactggttcaagacgcattgctgtctgaggagaaagaggccatttcgataaaagaaaatcgccttgccgaaatcgtttccgagtatgaagagattttcgagtcgttggacgaggaggagaaggacgcggactattccggcgagaacggttttgtctggagcgaggtaaagaaagccattaaagcaggtgctttggagccggaaacgctgcagaaactgaccgatgccttgaagttgaatgaggaagagaagaaactgaaatccgccgtcaagaagcgaaaggaggcgctggagcttcagaccaaagacaccattgagaacctccgcgtcgaacaggtcaaggagctgcttcatcggaagtggattaccccgctggtgcagaatcttctgagccttccgaacaatgcggtggatgcgctgatttcggaattgaacgcgctgaatcagaaatatgaaaccactttcgccgagctggaatcccagattgcggaaacggagacgcagctttcggccatgatggatgaactcaccggcagcgaaaccgatctgctgggtctaagcgaacttcggaaactgctgggaggtgagtgatatgacggaaaaaagaaaatcgccggccctccggttccgaggatatacagatgattgggaacagcgtaagttgggagaagtgtttgaagaatactccgaaaaaggtcacgaggagcttcctgcacttacaattattcagggtggtggaacgattagacgtgattcgtctgatcgaagtcttcaatatgataaagcaagcttatcgaactataaaaaggtcgaggttggagattttatagtacatctccgatcctttgaaggtggtcttgaaatggctacaaaccttggaattattagtcctgcatatcatacattccacggagagggtacggattcgagattctattattcatattttaggtcatcaaagtttatcaaccaggacttaaaaccccacgtttacggaattcgagatggtcgtagcattgacatccaaggaatgaaaactattgaaattccatggtcaagtttcgatgaacagaaagctattggcgattatatagaaaacctcgaccgcctcatcacccttcatcagcgtaagcttgaacggagattttttcccggatgcaggttttttattcaggggcacacgctgacgtggtgcccgtcgacgaaagaacaaggcattggggggagcgaagcaccacgcccaaccggccgaaatccgattttgctccaaagacgtggtgcccggcgacgaaagaacaaggcattgcagggagcgaagcaccacgttcaaccggccgaatccgattttgctccaaagacgtggtgcccggcgacgaaagaacaaggcattggggggagcggagcaccacgcccaacccgctgaacccccattttgtcccaaagacgtggtgcccggcgacgaaagaacaaggcattggggggagcgaagcaccacgtccaacccgccgaagccccattttgtcccaaagacgtggtgcccggcgacgaaagaacaaggcattggggggagcgaagcaccacgtccaacccgccgaacccccatctggtctcaaagacgtggtgcccggcgacgaagaacaagattttgcagacaacattatcccgatattaaaggaggcaaatatgacttttaagaaagaggcggatttcgaggaagaactgatacatcttctgacatccgtaagcggttggaaaaaagatacctgcggatggggaaattccgatggtgcgtatgaatcggtgcttcgtcatcccgatgaagaggaccttctgaagaactgggcgaacattctctataacaataacaaaagcagggatcgcctgaacgaatatccgctcacatcgggagagatgcgccaaattatggaacaggtgacgaaccttcggacccctttgaagctaaacggtttcatcaatggacgaagcgtgtctattgttcgggataatccggaggatacagaacatctgggaaaagaaatcagcctgaagctgttcgaccgcatggagattgccggaggccagagcgtttatcagattgcacaacagccgaagttcccggcgaagaatcggattctgaacgatcgccgcggggatgtgatgctgctgattaacggaatgccggtgattcatatcgagttgaagcgatccggagtaccggtgagtgaggcgtgccatcagattgagaaatactcccacgaaggggtgttcaccggactgttttctttggtacagatttttgtggcaatgactcccgaagaaacgctgtacttcgccaatccgggaccggacggtcgattcaatccttctttttatttccattgggcggactttaataacgagccgattaataactggaatgagatcgtgcgcacgttcctgtccatcccgatggcacatcagatgatcgggttctatacgattgcggacaattccgatggggtgctgaaggtgatgcggagctatcaggtgaacgcggcgaatcggatttccgacaccgttcggaagaccaagtggggagagcagaatcaactgggtggatacgtgtggcacaccaccggctccggtaaaaccatgaccagcttcaagtcggcacaactgattgcggattccggcgatgcggacaaggtggtttttctgatggaccgaattgagctgggcactcagtccctgcaggaatatcggggttttgcaaatgacgatgaggatgttcaggcgacggaaaacaccggggtactgattggaaaattgaaaagcacgaatccggcagacacgctgattgtcacatctattcaaaagatgagcaacgtgccggaggatgcgggactgaaagcccgggatttggaaacgattcgacggaagcgaattgtttttattgtggatgaagcccatcgatccactttcggcgatatgctgatctgcattaaagaaacgttccctcaggcgattttctttggatttaccggaacaccgattcagaaggagaaccagaaaaagaagagcacgaccgcaacggttttcggcaatgagctgcatcgatacagcatcgcggacggcattcgcgacggaaatgttctgggattcgatccgtatatggtacggacatatcgggacaaggaaatgcgcaaagccgttgcacttgaaatggcacatgcatcctcggagaaagaggcgctggacaacaaagataaacgaaaggtctacatggagttcatggattccgggaaggtgccgatggccggatatgttgattccggcagcggaaaatatcttcgaggaattgaagactatattccaaatgcacaataccgacaagatgcgcacacccatgcggtggtggaagatatccgggagaatttccctcgcctcagcaccggaaagggcgatgagggcgttcgctttcacggaatttttgccacatccagcatttcggatgcgattaactactatcgattgttcaaggaaatggcaccggaacttaaagtgacggccttgtttgatccgaacattgataataatgagggggcaatttccaaagaggatggtttggtggagattattcaggattataaccgccggtacggacaggattttaccattcctacttttgccagaatgaagaaagatattgcagcgcgactggcccataagaaaccctacgaacgaattgtgagagaatcggagaaacagctggatcttctgattgttgtggatcagatgttgaccggatttgattccaaatgggtgaataccttgtatttggacaaagttcttctgtacgaaaatatcattcaggcgttctcacgaacgaaccggctttttgaaattcacgagaaaccatttggaattatccgatattatcggaaaccgtataccatgaagcggaatatcgatagcgccattaaactgtattccggagatcgagcatatgggttattcgttccgagtcttacggagcatttggaagagatgaatcacagtttccgggttattgagcggctgttccgggacgaaaaaattgataatttcgaacggctgccggaggatggaactgtttgcgggaaattcgcaaaggaatttcgagaactggtatcctatctggaagcggcacaaatccaaggattcacatgggaaaagaagcgttatgaggaagaagagaccggtgaagcggtcgaggtggagttggatgaaagaacgtatctgattctgctgattcggtacaaagaaataccacgatttgaaggaggcgagttcgggccggagataccgtatgatttggatccatacatcgaagagatggatacgggcaaaatcgatgcggaatatatgaattcccgtttcgaaaagtattataagcttctgaaacgagatgatgcgtccgaaggggaactggagaaggcggaagaggaattgcaccgaacgttctccacgctgaccatggaagagcaaaaatacgccaatttgtttttgcacgatattcaaagcggggatgtggaaccgatggcaggcgcaacccttcgggattacattacggagtacatggcagaccatcgcaacgatcgaattcaccgattcgcggagatattcgggatggacgaagagaagttgagaaatctaatggcgctgcatcctaccgaaggaaatattaatgaattcggacgctttgatgccttgagggcaacggtggataaagataaggctcgcgcgtatttgaagagaaggagcagcgaaaaattgcaccgccaaaagttacgataaaaatcgacaatatccttcgagcgtttattctggaagatgagaaatagcaataatcctcgagaaaccctttaattccccaattcctgcccggaagtattaaaataaataaattcgtgcgttagatttttctaacgcactttttttaatgcaaagtgaccacacaaaaaacacaataggtagtggacaaataattttgaatgattataataggatattgaaaaaaattaaagcggtgaatccgcaattaagaaaggggattaaagatgaaaattgttgcagtagcagtgtttctgatagtgatactgctgattatcaccgaacgagtgcaccgtaccgcggcggcaatggccggagcaatggtactgattctcaccggcgtcatgtcggcggacaaggcactttcctatattgattttaataccattggggtgctggtgggcatgatgattttcgtggctatcgtgcgtcgatccggtatgttcgagtatattgcggtgcgagcggccaaagcggtgcacggcgatccgtggaaaatcatggttgcttttaccctgattaccgcagtgctttcggcaattttggataacgttactaccgtactgctggtgggaccgatgtccatcgccattgcccggatgctgaagattgatccggttccgttcctgatgggacagatcctggcatccaacgttggcggtaccgccaccttaatcggtgacccgccaaatatcatgatcggcagtgccgcacacctgtcctttatggacttcctggaaaacaccggttttgccgtgctgttcatcctggtcgtgctgattctgttgatgaaaattgtatatgagaagaagattgaactgggcacggtggataccggcgccattgagaagcttgacccgtccaagtccattaccaatcgggcgttgatgaaaaaaggaatcatcgttttaatctgcgtaatcgttggatttatgttccatgacaaactgggcattgagtcttccgtcatcgctctgaccgcagcggcagtgatgctgatcatcggcagggaagatgtgaacgaggccattcaggatgtagagtggacgacaatcctgttctttatgtcgttgttcgtggttgtcggtggtctgaccgagacgggtatcatcaaggaactcgcatccaagattatcgatgcaaccaacggacatccgatggtcaccatgctggtgcttttgtgggcgtcggcactgctgtcctccatcctggacaacatcccgttcgtcgcaacgctgattccgctgattctggccatgcaggcggacggaatagacgttacctccttctggtgggcgatttccctgggtgcgtgcctgggcggaaacggaaccatgatcggtgcatccgccaatgtggttttgtcggacatcagtacaaaacacggctatccgattaccttcaagagctacctgaaagtcggcatgccgttcatgcttctgtccatcgtaatttccactgtatttcttgtggtaaaatttgatattatgtagtcaggaggtatggattaatgagcaatgaatacacgaccaacaaagtgtccagcgacatgatcaacatgatggcaaaacagatgggcgcggtgcatatcaagtccgatccggcgtatatcaacatttatacatttgagatcgcaccggagtttcggattaagtacatgctggatcttcgccggggaaagggcatgtaccttcatcgggtaagcccgtacccaattatgctgggaaaattctacggcgagaccgatatcgtcgattacatgaagcgggatctgcagaagttccgccgcgcacacgaaagcggcaatttcgcttcgttcctggatttgacggaagatttgacccagttcaatcgccagattgagcagctcttcttgaatcggaatgtgccggaagcggctttccgggaactggcagatgagatgaagaacgtgcgtgccaccattaaacagatggcagaggaatgcccgatgctgtacgataccgatcgaagcatgggtgaactggccatcaactccagcgatttgggtctggaagaggaatagttctcgtaaaaataagaagagtcggaagtctaaggcttccgattcttttttttatgtcgacagcatgaggggaaatgagtataatcaaagtagcgttgattttacatccgggggtgtagaactgcattgaaattacaaataggcaggagtggaaatggctaagaaagtatcaagaaaagaagaagaggaactgaagaagctgtcgccggaggagcggaaggcgattaagaaacagaagaagcgggatgcgtatcagaaggagaaggcgcagcggaaggaagagcgctatcagagcgagtcgaaaaagttccgcaagcgtcaccggaagggcgccgttgtgacgggcatcgtgctggcggtggttctgctgggcggcctcttctattggatgaacaccgggctgttcaaggaagacagctataaattcttcagctacgacaaatacgtgaaggtggcgtccacggacaagctgacctacaaaaagtctcagctgaaggtgtccgacaaggacgtggaaaaacagattcaggcgaagctgaagaatgccggagagaagaagctgacggaggccttcatcaagaagaacacggacaacgagtgcaagacgaaggcggaatacgagaagcacgttcgggaacagctggagaaggacaagaagaattccgtaggcagcgaactgctcagcaaggtcagcggagattccaagctgaagaagacgccgaaactgcagctcaaggcggttaagaaggacgtggagcagaactatgaacagatggcttctcagtacggaatggacgtggacagcttgattaaagcctacggtatggacgaaaaatcctatcaggccatggtaaagaacagcgccaaggagagcgtgaaactgcacctggtggcacatgccattgcaaaagaagagggcatccgtctcagcagcagcgattatgaccagaggctgaaggagttcaaggaaagtaccggactcagcgagaagcagttcaagaagcaggccggatcctcttacgaggattatgcgaaggagaacaacttcgaagagtatttcttccaggagaaggtaggacagttcctggtggacaaggctacggcaaaataggataaagaggataaggattgggaaagccccgggttgcgtgtgcaatccggggcttacgtgcaccaagccggcgtcggccccggaggaaaaatggcctgggacttggtgcaaaggaaacgaaggaacaagggttagggggtttacgtgcaccaagccggcgccggccccggaggaaaaatggcccgggacttggtgcaaaggaaacgaagaaacaagtgttagggggctttcatgcaccaagtcggcgccgcccccggccggaggcccgccacttcggccagcggccccatcgcccccccggcggccttccccttcctcattgccggccgccgtcagtcccctcaaccggtagttaaaagtactcatatgagtacttttgttttttcccggataattataaaacttatggaatagaatctatgttttgctgcgcgtagatgtgcgatgggccggatatgcgcacatacggcatatttgccgggtaagaaaggagaatcgcctatgaaacctcacttagcaggctaccgaaagaagcgtagcagattcggttcggggattgttacgctcgtgatgctggtgtccctcttatggggcggcatggcatggaacgtgcaggaagcgagcgccgcttccaaattcgacaatatcatgaatccggagctgccatcgggttttaatgccgatgataccacgaatccatataacaatggaaagcagaagtttttgctggcggagaacaacgagctcaccgtatacaaatcctgggatgtgggcagcgacgagatcgctcggaagaacatgtgggtatccaccttcgacaactacactccgggaggaagcatgaagctgatggccggggacaacgatgcggatgcccagaataaaggcggatggaagagtgtcacagcggacacaagtgcaaacgcaaccaagttcaactatctggatgctgtcgcttttgacccgaacggaacgggccgaaaggaccacgttgcctatgtaggctattatcagaaaggcagcagcaagggcaattaccttctggtatacgatacggtaaaaaaagagtggacgaccacccaagatttgccggggaccggtgatgcagccggcctcaattatctcatcgcccggaacttctattccatcactgccggagactacaacggagatggaaaggacaccatcgtggtctacaatccggctgtcgacgggaaatacggcgtgacggaatacaaatacacgaaaccgggagcgtatggcaagctggagcttcaggggaattccaagcgcatgcttcacggcgtgtatcgggaatactccgatctggaaaacagcaaaaatcttcgggacaagctgggatgcaatctgactaccggagattttgacggcgacggaatcgatgacctgggagtggtttcctatggtcaggaatattcgtccgcgccgaaggatgccgattaccggctgtacaccccgatggtggcggcggtattcggagaggaccgacacaagagcgacaacggcgacaagtggtccgtggtttcttccggaaaactgcagaccgtgtatgccggcctgaacaagaccaaggaaaaaatcaacaagaaggacacggatgtctatgaatccatgagatctccatccatcagtgccggagatattgacggcaacggcgcagacgaactggtttgcgcgggtttctggtgcaaggttcaggacgacggcgattccgccggctacaacaagggcatcgatcacggtaaaatcacggccgccgcggtttccgcttccggaaagtccatcaacatcagcggtcatcagatcgattcgaacaagtggacccagtccaccacggccagaaagaatgacttcgatgtcaaagtacagttgtccaccgaatgcgtggccattaacggacagagatccgccgagcacgtattcatcaacggaaccctgtacgaatatgccggtgcactgttcaatgccgtttacacaccggaatattttacgaaggaagataagggcatcggaaatgctattgtgggctccgcagggattacggatgtggttgcgggcgtgttcgacggcaacgatcagggccgggaacaggtgatgttcgtatccaccttgagagaaacggacacctactacaacgattactacatgaccatgggcgccatcggcggcagcaattacggcaaggataccaacattgccaaaaactactacgacagcaacctggacagggatcattacaccctcggcaataagggagataatgtagacaacaagagagtcaatctctgtattgccgcttccgataacgacaacgacggattgctgggaagcttccgggacaagaagtgcgtctacaccgacccgaagaatgccgccgtacttcaggcgggaccgtacttcggtgccatggacgacctgggcggatacgatgacccgtgcgagacctcctataccatgtccagttccttcgaacggggcactaccaagggagacagcgtctcattcggcgccggattctccggaacgctggagttctcggcaatcgccagcatggaagccagcttgcagctgggatattcgctggattggaacaagaccttcgaagaatcggtgacggagacctataccacctccttcaccgctcagggacacgaccaggtgatcgtaagccggattccggttaccgtataccgatatgacatctacacaccgaaggccggcggcggctacacgatgaacgaggacggatattccgtgacggtaccgggaaaaccgatttactatcagctgagcgtaagcgaatacaacgagttcgtggatgaatacaacaacaagatcgacgagctgagcaagaacgacgcgtcgaagatgcggctcaagaaaatcgcaaaggacaaagcggcgtcgggcaaatacgatttgccggcagacaacgaagggaatccgcagaactactggtccagctgggccgatgccggcgaaggggcgaccaatctcagccggagcccgttggcgctgacctacagttccggtcattcctccagcgaatggagcacctcttcttccgctaccaccgcgacggaaatgagtcacggattctcctttgacttcaccctgatgggcggcttcggccttctgggcaacaatgccaaagccggtgcgtatgtgagtttggaatacctccactccaacggaagttttaccacggaagccgaagagaagggctccgccggacaggtggaaaacctgaacgaaaagaccctcatcgcctccggcttgccgaaaccggtaatccgcgcctacggatttaactgggaattcggtacgtggaagcgagagctcaccacccagtccggggactataccccgttcttcggatatcgggtatggaaggtgaccatgccgccggaaagaccggagaatctggaagcggagcattccgacaccgacggccttcacagcgtggatttgaaatgggatccggtggacggcaagcaggtgctggggtacaacgtgtacatcaaggacggcagcgaatacaagcagattaacaaagacctgatcaagggtacggaatataccgccgacggtctggacaccaacacgaattacaccttcgtggtcaccaccgaggcgtacaccgatgtgaccggtcaggataccacggtgaaagccaacagcttgtggtccgacgaggcgtccattaccacgccgagacagggttatcgaatcaccctgaccccggaccgcggctccaagattacggccaccggcgaggaaaaagaaattcacagcggcgatgaaatcttcgagggagacgccatcaccataaaagcagccccgcgggaaggctacacgctgacgcaggttctcctgaagaagggagacggcagtgaagtggatatcacgtccaccgacggcaccttcaacttcgtcgtaaaaggcgatacagaagtcatcgtcaagtcgaagaagaacgtttccgaaagtgagattatctaccgtgccggcgaacacggaagcatcacttcggcggcttccggcggacaggtattcaaatccggcgccatggtcagcgacgatgtgaccttcgaagcaaaggcagaggacggatacgttctcaaagaatggcaggtaaccaccgacggcaagacgcagaccttcgccgccaacggcagcaatacctatcgattcggcccgttcgcgccaaaacacgaggtacaggccgtattcgtggcaaaagacgatgcttccgtgacgagaaccctcaccgtgaacagcggacagggcggaaccgttaaggtcacggataaggacggcaaggcgtacgaaccgtcggagggcaaaatcaccgttaacgtgggcactccgctgaagattaccgccgtgccggacaagcactacgtgctgcacgcatggaccggagattttgcggcggtatccgaggaaaacccggagatttcccataccctctatgaagacctgacggtgggcgcggtattctacgcaccggtgaaatacaaggtgtcctacgacgtgaacgatgccaagctgggcagcatcgattccgacatcaagagcggatccactcaggtggaagatgcgaagatttccttcaaggcaacgccggcggagggggcaaggctggaatactggctcataaaaaaaggcagcgatgaacgcaaagtcatgacgacggatctgaagtcttcctacgacctggagatttccgtggaggacaccaccaaggtcacggcggtcttcacgccgattgagacctattccctggcaatcaaatcctcgaaatacggaaccctccgcgtcttcaaccgggcggacaaggaactgtccagcggcgatgagatccggtacggcgataagctgaaattcaaggtatctccggccaaggattacaaattcaaggctttgaagattaacggaaaagaagcgaatgcgaaggaaacccttaccgtaaccggtgacgtttcggcagcagcggagtttgccaaaatcgactacaaggcgccgctggaaaagaagctgagaatcaccacgaagagcaagaaggtcaccttgaaatggggcaagaccgagacggcggacggctacgacgtgttcttcgcgaagtgcggcaccaagttcagcaagaagccttcattgaccacaaagaaactaagtgtttccgtttccaagattcagggaaagaaggtcagcaagcgaggatgctacaaggcctacgtcagagcattccgaaaggtgaagggaaagaagcagtatatcgcttccggtatgacagtgcactcggcgggaagcaaaaacaaatacactaacgcttccgccatcaccggcgtgccgaacgcgaaggcgataaaatccggaaaaacctatcagctgaaggccaaattaaagaaggccaataagaagaaaccgctgattaagaaatcccactctccgtggctgagatacggcaccaccaacggtgcggtggctaaggtgagcaaatccggaaaaatcaccgcagcgggcagaggcacctgcacaatttacatcatcgcaccggacggtgtgagaaggaacgtaaagattaccgttaaataaccttgcagttactgcaagaaccaaccttccgaatggacgatgtcccgttaaccggggcgtcgtctttttttgcggtgccgtcaagctatggagaatggccggggcttgtggtacaatcaaagtagtttttttacagaagggagaacgggattatgagacgtgaaatagcggtctccgtgcatttcctgacggaggcgaggcgaaagaaaatcgaggaaaccgcggcgaaaggcggatttgacacagtgttctacgacaacgacgatgcggcggtggggagaatagacgatgcggaaatcgttttctgcgagacgccgaagccggtgaaggggctgaagaacgtgaagtggtgtgccagctcctatgcgggcatcgcaccgtatctggaaccgggggtgctgccggagggctgccggctgaccaacggggcgggctcctacggcgtgactatttcggaacacatcgtgatggtgtccctgatgctgctgaaacagatgccgagataccgggaaatcatcgacaaccgggaatggcgccacgacgtgccgattcgttccatctacggaagccgggtgacagttctggggacgggagatatcggaaaatataccgccaagcgaatgaaggggatgggagcgaagaccgtcatcggaatgaatcggagcggccgctgtgccgaaccttcttttgaccgtatcatcacggcgggagagctggatgcactgctgccggaaacggatattctggtgctgtgcatgccggagacgaaggaaacccgggggaccctgtccaaggagcgcattgggatgctgccgaaggaggccatcgtggtgaacgtgggccggggcagcgctatcgatcaggatgcgctgatggcggccctgaacgaagagcggattgccggggcggctctggacgttatggtgccggaaccgctaccgaaggatcatccgctgtgggatgcgcggaacatcatcatcactccgcacatttccgggaacatgtccctggaacacacccgggaggagtccgtggacctgttctgccgaaacctggagcgatacatcgcgggggaagcgctggttcacgccgtggattttgaaagagggtattaatatgattaaagcatgcattttcgatctggacgggacgctgacccggacgcaggagtccatcgcccgtcccatcaatatgactttggaacattacgggctgaaggcgcagccggtggaagcctataactatttcgccggggacggcatcgataacgccctccgccgggcgctggcggcatccggcgatgaagagggaaaattcttttccgagggcatcaagctgtgccggaagtggatgcaggaggatcccctgtaccacgtggagccctacgagtacgtgccggaaaccctgaagaagcttcgggactgcggatgcaagctggcggtattctccaacaagccccacctcagcgcggtgaacgtagtggagacgattttgggcaaaaacacgttcgatcacatccaggggcagaccgaccgaattcccatcaaaccggatcctacgggagtgttcgagattctggaccgattcggtctttccaaggaggaatgcctgtacttcggggataccaacacggatatgatgacgggaaagaatgcgggggtgtataccgtgggcgtcacctggggattccgccctcgggaagagctggagaaataccatgcggaccggattatcgattgtccgaaggatttctggacctgcgtgaaagagatgaacgaagaatagaagcataagaggatggaatgaagaagagaagaaaaccggagctgttggttccggccggaagtatggagccgctgattgcggcggtggagaacggggcggatgccgtctatgtgggcggccgcctgttcaacgcccggatgaatgcgggaaattttgacgatgaaaggatgcagcaggccctggactacgcccacgcccgtggcgtgaaggtgttcgtgaccatgaacaccttgattttcgatgaggaaatggaagaggcggtggaatacgccggattcctgtatcgggcgggggtggatgccctgattgtgcaggatttgggattgggaaggcggattcacgaagagctgccggattttcccctgcatctttccactcagggaaccgcctgcgatggggaagcggtggcgctggcgaaggagctgggctacgaacgggtggtgctttctcgagaactgtctttggcggagatggaagcggcttgccgggatgggggcctggatattgaggtgttcgttcacggcgccctgtgtatctgctattccggacaatgccaaatgagccgattctacgggggcagaagcggaaaccgcggcgcctgcgctcagccttgccgccttccttatgaaggcgtggatgaaaacggaaagaaaatctccggtcatcttctgagtcccaaggatctgtgtctggtggaccggctgggagagctgattgaagcgggcgtctactccttcaaaatcgaaggtcggatgaaatccccggaatatgtggcggtggtcacccgaatttaccggaaatacatcgacgagtatatggaaaaaggtagctatcacgtgaccccggaggatcgcctggagctgcggcagatctttaaccgaggtggttttacctcgggctatttgaccggaaatccgggagagaagctgatgtccccggtgattccgaagaatcagggcatccgcatcggaaccgtacaatcggtaaaaccgggctccaccctggtggatgtatcctgcgatatcctgccggatatgggcgacggcatcgaaatccgttcggagcgaaaggcgggaaaggcggtcagcaccatcatcagctaccgaaaggagctgaaaaaagacgttctgcgcatcggggatttcaaggagccggtgcaggtgggggatgcggtgtaccgaacctcctccaagaagcagctggaagcggtgcgcagctcctttcggaacatgtccttggacgcatcgccggaatcccgccgcatcggacggcgccgaggcatcaatctgaccctgacatgtttcgacaatgcgcttcgcctgaccggtacaaccatcccggaaacgggggagctgtgggacagccaggcgaagaagagcgcggtgctggaagcgggtcctttcgagacggatgcggaacgggccacgccgaaggaacggtacgagaatgcccttcgaaagacgggaaataccccatttgaagtggaaagcctccgcttccgaggggactttgatatacgggtaaaagcatcggaaatcaacgctcttcgccgggagtgcctggccaagctggaagaggagatccggttccgccggacgcttccggaaggcttcccaccgatggaaggaatgggggaatccgagaccggactgccggttcttccggataccttgccgcgagttcctctagccgcgctgtgcctagaggcggaccgtaccggccgatctttagcggaggcgtacggaaaccgggaagattcggaagcgattccttttatctccaatgtgaccaagggccgtgaggaccacatcctgctgcgccgggaaggggaaatcctggaactgggccaaagtgtgccgattctggtggggaacctgagctggctgcaccggttggcgggaaagggactccggctgtacggcgattacggcctgaacggggtgaaccgggagacggcaagggtcctgaaagagatgggcgtggaagcgctctgcccgggactggaacggaacgaaaccggcgagcttggagagaagaggatgccgctgataatcagcgagcacgatttctccgcccgggaacttcgaaacaataagcgtggaattcatatccgggtggaacatccggagtacagcagtcagagccggatcgttccggtagtgacggaaaggaattagaggaatgaagctgatgcacctggcggatctccacctgggaaaacgggtaaacgggttttccatgatggaggatcaggaatacattctgaatcggattttggaaatcatggaggaggagcagccggatggtctgctgattgccggtgatgtgtacgacaaaaccatcccgccggcggaggcggtgcgccggatggacgattttctcaccgccgtggcggcgaagcacgtcccggtgttcctgatcagcggaaaccacgattcggcggagcgggtggccttcgggcatcagctgatgcaggggagcggcatttggatctcgccggtatacgacggaaccatccggcaccacaccctggaggatcggtggggtgaggtgaacatctacctcattccctttctgcggccttccgtggtgcggagctttttcccggatgttgaaatcgaggattacacggatgcgctgcgaaccatcattgaagatctgcaggtggacacgtcccgacggaacgtggtgctggcccatcagttcgtcacggcggcgggggcattgccggaaacctgcgactcggaacagctgtcggtgggcggcctggaccgggtggacggaagtgtttttagccccttcgattataccgctttggggcacctccacggtccgcagcgcgtgggaagcgagacgattcggtacgccggatcccctttgaagtattctttttcggagcttcaccagaagaagagcgtgacggtggcggagcttcgggcaaaaggagagacggaaattcggcagattccgctgcagcctcggagagagatgatagagctgcggggaacctttgaggagattctggaggaagcccggaagaagggggagccccagacggattattaccatatgattctcacggacgagaccgatgtggtggacgctttgtcccgccttcgggagtactatcccaacatcatgctgctggattatgacaaccggagaacccgctcgcagaaagaagtggagcagttggaccgggtggaggagcggacgccgggggaactgttcgccgcgctgtatgagcagcagaacgggcaggagatggattcggaccggaaggaatatctggatggattgattcgtgaaatttgggaggaacaggtatgagaccgattcgcatagagatgtccgccttcggaccgtacgccggcaaacagaccgtagaaatggaccgcctggggaccagcggcatctacttgattaccggggatacgggggcgggtaaaaccaccattttcgatgccatcgtcttcgcactttacggaaccgccagcagcgaccggcgaagcggcgatatgctgcgttcccgctatgcggagccggacacccccacggaggtgaaacttgtttttgcctaccgtaataaagaatatgagattcgccggaacccgacctatcagcggccgaagctgcgaggcgagggcatgacccaggaaaatgcatcggcggagctgcggctgccggggggagagatcctcacccgcaccggagaggtggacgagataattcgggagattctgggaatgacccgggatcagttcatgcagattgccatgattgcccagggggattttctcaagctgctgctggccaagacggaggatcggcggaagattttcagcagtattttccgcaccggccggtatgcccggctggaggagcgcctgaagcaggaggcccgtcaggcgcggaagacgtacgacgacttgatgcgggaaatcggcttcgagcaggaacgggcacggcttccggaaggaacggaccggagcgggcttcgggaggaggagtaccttcaggcgattgagaaattccgggatgaggccggaaaaaggctggaagaaggggagaagaagcagaaggttctgagaggggaattggatgtcctggcggcccggattctggcggcggaagagcaagaaaagcggaaaaaggcgctggaagagacccggcagcagtggacggaccttcagagagtggcggcacagcgaaagcaggagctggaagcggcgcggagccgtgaaccggaagcgaaggagaaggaagcgcggcttcacgtggaacaggaccggctgcagcagtacgaccggctggaagaattgaagcagcagaaaaccgaagcggagaaaaagcgggtttcggatgagtcggctcgaaagaagttggaagaggcccggaaggccctgacacagcaaattcaggattgccggcagaaaatcaaagaaaaggagacgctggccgggaaggccgcagcgctctccggggagaaggaatgccttcggagtcagggggcggaatacaatgaattgaagaccttgctggaagcctatgaggaagcttcggaaaagtggagccgggcggcggcgatttatcagacggcctgcggcaaggaacaggaattcggcgagtcctatcgccggcagcaccgggcgtttctggatgaccaggcgggaatcctggcggcggaactggcggaaaatcagccgtgtccggtgtgcggatccctgcaccacccatcgccggcgatgaaaaccgacgatgcgccgacacgggaaacggtggaacagtcccagaagcgttgggaagaaagcaaagccgccatggatgaggccggccgaaaggcggcagctcttcggggaacccgggacagtagccttcagcatatggaagaaaaggcaaaggggctgaacatgccgacggaaccggtgatgctgaaagagacgctgatggaagaacagaagcggtttcgttcaaaatggaaagagatcacgggggctctggcggcatcggaagcggcggccgaggcgaaagtggttttgggggagaaactggagacgtttcagaagaagcaggaagaggatgaagaagcctatcgcaagctggagttggaatccgctcgtcttcaggagcagattgagaatctctctgcaaattactcggaactgaaggagacccttccgtatccggaccgggagtccgccgggaaggcggcgtcgttgctggaccgggaaatccgggaaatccgggaggcggtgcagtcggcggaagagaacgagaaggcggccgctggccgaatccaggaagcggaaggacgaatggacgagctgcagaagcagattcgggaaggcgaatcggcggagtcgatgacatccgcggaactgcaggaaaatcagaagcagaaaaaggacgaacagctccgtctgcaggcagaggcgaaggaggacaacctgatctgggagaccaattccgccgcggccggccgcattcggaagctgaacggcgagcgagagcaggcggcacggaaatattccatgctccaaaatctggcagacaccgccaacggaaacctttccggaaagcagcggattcagctggagacatacgtgcagcagcagcttttcgatcggattctggtgcgggccaacacccggttccgagtgatgtccggcggtcagtacgacctggttcgccgaaaggaataccagaaaaaccagcagagcgggctggacctggacgtggtggatcactacaacggtaccacccgaagcgtctccaccctttccggcggagaatccttcatggcgtccctgtccctggcattgggcctttccgatgagattcaggaaagcgccggcggcgttcagttggatgccctgttcgtggatgagggcttcggctccctggatgaagaaactctggatcaggccatgaaggccattcagaccttggcggaggacggcggccgaatcgtgggcatcatctcacacgtgacggagcttcagaaccgcatcgaccggcaactgctggtgcgcaaaatgaaatccggcggcagcaccgccaccatcaatatcttatagaggaaatggagtgttcaaaatgagaatgatcgatacattggcaaaaaagggcgatgccatgatggcgaacagcatccgagcccggaaggggatccttcgggaccgttgccgggacctgcggaaggagatgggtacggactacctccgagacgccggcgacgccatcacaaagcacattctggccagcgaggcctaccgggatgccggaaccatcttcgtctacatgagttacggcaaggaagtcatcaccgacggttttatcgcgcaagcgctcgccgatggtaaaaaaatctgcatcccgctgtgtcttccggagaatcagatggaagcgaagcgctacaccggaccggaggatctccattccggaaagtacggaatccgagagccacgggaggatgcggagacagtagcacgagaagaaatcgacctggcgctgattccgtgcgtcgcatgcgataagcggtgcaaccgcctgggccacggtgcgggatactacgaccgatacctggaggggacggattttgtcaagatggcactgtgcccggagaaaatgattctgtccaacgtggcggtggatgccctggatgttcccatggatgccgtggtaacggaggaaggcatcgtgacgcggaatcggtagccggagaaggagggattatgtctgaattaatctatagtattgtgatgtggaccgcccgcattcatgacgaaatcatgggcatgaacgacggatggggatactacaacagcgacaaaaaactgcattttatcgtcatgggaatcatcgggatgattgtggtgctggcagcgtatttcgtcttcaagctgctgcagaatcatccgttggtaatcgcatttatctacgcgttcacggtgatgatcgtgctgacgttcgccattgaaatcggccaggggttctacggaaccggcaacatggagatggaagacgtggtggccggcatgggcggattcctgtttttcttcgtgatattcgcactggtgcgggggattttcctgttgattttcaaccttctccgaggaaacgatcgaaaaaaacggaagaaacaacggtagaagaaaaacaatttgtaaaaatatccttaaaatgcttgctttttttgtcgttgaaggataaaatatagttcatgttgataatgttttgagtgaaatttgtccggccaaccataaagatcggatgagggtgaaaggagtataggttaatggcaaagcaagaaccttattttgatgatgcggcgcacgcatcgtcggaatcgagagcaagtttttccggtaagttaggatatgtattagcgacggcgggatccgcagtcggcctgggaaacatttggaggtttccctatctcgctgcaagacacggcggcggaattttcctgctgatttatctgattattgcaattacattcggatacaccatgatgatgtccgagaatgcgctgggaagaatgacccggaagagtccggtgggcgcgttccgtgcttttagcaacggcaaattggccggatgcggcggatggctcaatgcggtgattccgatgctgattatgccgtactacagtgtaatcggcggatgggttgtgaaatacctttacgagttccttcggggcaatgtgaatgcgacggcagacgatgccttcttcggcggattcatcagcgatgacgccagtgcggagctgtggttcgtggtatttgcgctgatggtaatcgtggtaattttcgccggcgtggagaacggcgtggagagaatctccaaaatcatgatgccgatgctggtattcctggcgctgattgttgcaatctactccatgacgcgtccgggcgctgcggcgggaatcaagtacttcctggttccggatatgaagaacttcacctggatgtccgtggttgcggcgttgggtcagagcttctattccctctccatcgcaatgggaattctgataacttacggttcttatatgaaaaaggacgtggatattgagaaggcaaccggacaggttattctctttgacagtggaattgccatcatggcaggactgatgattattccggcggtattcgcattctccggcggagatccgaatgcgctgaatgcaggtccgtccctgatgttcatcacgattccaaaggtatttgcaagcatgggcttgggccgctgggttggattcctcttcttccttctggtgctctttgcagcgctgaccagtgcgatttctctggcagagaccagcacctccaccttccaggacgagctgggatggagccgcagaaagtccactctgctggtaaccctgctgctgttcggtctgggaaccctgaactctctgggatacagctccctgggcttcgtaaagatcttcggaatgcagattctggacttctttgatttcgctaccaactccgtaatgatgccgattgcggctttcgcactgtgcatcctggtagctcgttgcgttggggtggaccgtatcgccgaggaaatcaagctgtcctccaagttccgcatggagaagctgtaccgcgttgtggttcgctatgtggcaccggtatttgttatcatcattctgctcagctctttgggattcctgggctagtggaagcttaaagaaaaaactaaagcctgcattcgattggcaagcgcttgactatgagtcttgaagagcatgcagttaggttgccgccggttgacacgctgcggattctccgcacgagtcagcccggctggcccagcctaacatgctctttctcatcgtcaagcggagattgctgattgggcgcaggcttttttgttcccgaggctggcggcgcaaacaatgcccgggagcaaggcgccaacaaaggcgccggcagcccgaggaaaaccggaccctgttggcgttggcggacggagaaacaaagcttcccgaggggcgaggcgccaacataggcgccgccagcttgggaaaaaccggaccctgttggcgttggcggacggagaaacaaggcgtttccgggagcaaagcgccaacaaaggcgccgtcagcccgggaaaatctggaccctgttggcgttggcggacggagaaacaaagcttcccgaggagcgaggcgccaacataggcgccgccagcttgggaaaaaccggcccgtgttggcgtgaccggatgaagaaacaaggctctgcgaggagcgaggcgccaacataggcgccgtcagcttgggaaaaaccggcctctgttggcgtgaccggatgaagaaaaaaggctctgcgaggagcgaggcgccaacatgcccctgccgcgcgactctaattcatgctgctttcgggaaagcggaagaaattgacgacgaaccactcttcgcagaggtttcgtcgtcaatttcctcgcgaccgccgggtgaattagagtaaaatgctcgggggagagggcaggatgaaaccttggaagcagaaaacccaagtgagaagaaggagttttcgactttgaacggaacttagattagaacaaaaatgtgaagaaaatattagattgacgacagactttccaaaggcgtgggtctgtcgtcaattctttcttttttatatccacacgagttagacgtggtgcttcacccccgccaaagccttgaaccttcgtcgcggggcaccacgtcacccgcgcccgccgggcctacagtgaagccgacgtggtgcttcacccccgccaaagccttgatctttcgtcgcggggcaccacgtcgcccgcaccggacgggccttcgactggttagacgtggtgcttcaccccggtcaaagccttgaaccttcgtcgcggggcaccacgtcgacggggctggacgggcctacagtgatgccaacgtggtgcttcacccccgtcaaagccttgaaccttcgttgcggggcaccacgtcgacggggctggacgggcctacagtgatgccgacgtggtgcctcacccccgccaaagccttgaatcttcgtcgcggggcaccacgtcgcccggctcggccgggcattcggcggctccgacgtggtgcctcacccccgccaaagccttgaaccttcgtcgcggggcaccacgtttctgggctcgaccgggcaatcggcgtctccgacgtggtgcttcaccctcgccaaagccttgatccttcgtcgcgaggcaccacgtcacccgcgccagccggccggctctgcttcacgcccgaagcgccatcaggctcccccgggcgccggacgggtcccctgggccggccgcccctttcggaagcacaaaaaaagagctgccgtcgatttctcgaaacggcagctcccggctattcatatattcaatacttcttcatccgattatacaaacattgtaacgaatggaatggtgaacagggacagcagagtggtcagtgcgtagccccggctgcatagatccgcatccacatcgaagctctcacaggcaatgaccggcatgctgccgttgggcattccgtagaggaggatgaaaattcccaccagggtggaatcgaaacccatgccgccgttgcgatgcagcaccagtgctgccgccgccggaatcagcagaagctggaacaaggagaacacgtataggcgaacgtccgtgaaaacccgcttgagattgatttgagccagtgcacatccggtgataatcatggacagcgggatgcaggtgtccgacacgtaggtaatgcattttaccgtgatttccggaaggtggatcgggaacagcacgagaatcattgccaacaggacacagatgattcccgggttaacgagatccttgaaccggaatggggatttgtccccggacattctcttgaacacctgaatggcataggtatagaagaggaggttgaaccccagcgcatagaacgtgatgtagaatgtttcctccgagccgtaaagggattccaccagcgggatgcccatgaacgccgtattggcgaaaaccagcatgatggtcaccagtttccggtcgttcccctgcacccgcaggagtttcgccaccaccggccccagaagaatcatcagtccgtagaacagcgccatgagaatcaggttctgcgccatcagagttttgggaatggatccggatccgctgagggcggtggaaatcatcagcaatgggttaaaaacattgacgatgaggttcgagatttccgacgttccctgcttggtgagccatccctttcgaaagcagaaaaagcccacaaaaataaaacaaaagagaagcacgagcttctcaagaatgattaagctgtcactcattttccaataaacctttctattctattcaatcaccactaacacattttcacggagaacatgcatcaaccgatttttatttttccgcgaaaaaacgcatatattatatcactttttggaggcgaatagaatagccttgccggaaaagttggtaaaaaattagttttttttaccaaaatataagagatgcttttttgcatatttcgcaaaaaaatggtatcatgctgttgaggtgcctcgtggcgccgaccgaaaagtgaaattctaaggaatcgatgaatcaaggcgattcggaaaggaattgaaatggattatttagaaattgagaaagtcattggaagacagattattgactccagaggaaatccgacagtggaggcagaggtgcatctggtagacggaaccgtgggcagagcggcttgtccgagcggcgcatccaccggtgagttcgaagcgctggagctgagagacggcgatcagagtcggtatggcggaaagggcgtaaccaaggcggtttcgtacgtgaacaacgagatttgcgacctgctggtgggaatggatgcttccgacacctatgctatcgacaaggcgatgatcgaagcggacggcacggaagacaagtcgaagttcggtgccaatgcgattctgtccgtatccctggcggcggcaaaagcagcggcacaggctctggataccccgctgtaccgttatctgggcggcgttagcggaaacaccctgccggttccgatgatgaatattttgaacggtggtgcgcacgcaaccaataccgtggatacacaggaatttatgattatgccggccggtgcgccaagctttagcgaaggactgcgctggtgcacagaagtatatcacaagctggcaaaactcctgaaggcagacggttttgccaccggcgtgggcgatgaaggcggttatgcaccgaacctgtccagcgacgaggagactttggattacatcctgaaggcgattaaggaatgcggttacgtgccgggggcggacttcgttctggcaatcgatgcggcagccagcgaatggaagggttccaaggccggtgaatacgtacagccgaagagcggtaagaagttcacttccgctgagttggtagagcactggaagtccctggcagacaagtatccgatcatctccctggaagacggtctggatgaagaggactgggaaggctggaagctgctgacagaaaccctgggcgaccgggttcagctggtcggtgacgacctgttcgttaccaacacaaagagattgtccaagggcatcgagctgggcagcgcaaactccatcctgattaagctgaatcagattggttctctgtccgagaccatcgactgcatccgcatggcgaagaaggcgggtatgaccgctgtggtttcccacagatccggcgagaccgaggatactaccattgcagacctggcagtggcactgaacaccggacagattaagaccggtgcgccgggaagatccgagcgtgtggcaaagtacaaccagcttctcagaatcgaggaacagctgggtgacgccgcatcctatgcaggcttcaatgcattcaatgtgaccagaaaataattcacgaatagaggtaatccctgaagaattgagaaagagctgttagaatagcacgattttaatgggcacgaatgaaagacttggtgtaaagaaacggaaggcaaatgaccggaacggtttcttgcaccaagtctttttgtgttcgtcctttttcccctcggggacgtggtgcttcacccccgtcaaaggcttgatctttcgtcacggggcaccacgtcgccgaggccggccgggaattcggtgggtcggacgtggtgcctggcccccgtcaaagccttgatctttcgtcgcggggcaccacgtcgccgaggctggccgggcatttggcgagccgaacgtggtgcttcacccccgtcaaagccttgatccttcgttgcggggcaccacgtcgccgaggctggccgggcatttggcgaggcggacgtggtgcttcacccccgtcaaagccttgatctttcgtctcggggcaccacgtcagccgct

SEQ ID NO: 4068 - DNA, 3287 bp, Unknown
  16S sequences of unknown bacteria
aagccgtagaatgcttccaaatcgaaggctcatcagccaaaacctatcccgttcgaattactcagtgtcagcggcgcaaacaaaaaatttttttcaaaaatagtggagaaatatggagatatagactattataaaaataagccaaaggtgcagtgtagcagaaagatgatatgtcagtgccaagtccacacgctatggatacagtgttgcagtagaaagcatgtccgcagccgcatatgaaatgagatcgtatgaaaagtcttctattgatttcagagccccaattggatcttgttccatgccgaaatcctgatgattttgaaagtagccgtaatcaagtaaaaacagaaagggtgaagtttatgacttcggattggctgtaaaatggtgcagttcattttgttctgtatgcttgcggttctggttcagggcgcggtttgcgcccgttggccgcgctggcggtatggcgttgttgctctttgcttgctcgccggtgtggcggccgcggtgctgttggtttcttcggccggtcaggatagtgtgcagtattctgttcttctggcagacggcactgcaaagatgtttgatacgcaagctgctgcagaggaattcatggcgcattccgatgctgcaagaggtttggaaaccgtttccccaacacagtggaattggcctgttattctttccgttgctgctgcacctgccgcatgtgcgctcatttatatcgttctttggagcggtacgcggcgcgcatctgagaagtaaataaaacaatgcgaaaaggcgcggacttatgtccgcgccttttttatttgaatagaaccagagcatggaggtgtggtggcagaacaagataggaaatgctgccggaaaagagacagggagcgggtattgcttcgtttttcacaaattttattttttttctgaggaaagggtgtaatttcctgtccacaagacttgctattttgcggtaagttcaatacaatagaacgtatcaataatggagaaagaagcttatgaagcctttcgaggagcgtgaaaaaatgtatcagatcacagcaaaagagatcttgaaccccacagtggtgaaaatggagatcctggcaccggcagtggcaaaaaaagcgttgcccggccagtttattattttgcgggtagatgaaaaaggcgagcgcattccgctgactgtggcgggatatgaccggcaaaagggaacggtggacatcatctttcaggtggtgggcgccacaacaatgtgcctgagccataaggaagcgggtgactcgattcaggactttgtcgggcccctgggcgttccgacccgcacggagggtctgaaaaaggtggccgtggtgggcggcggtgtgggctgcgccattgcctatcctgtggcaaaggagctgcacgatcagggctgcgaagtgcacagcatcattggtttccgcagccgggaactgctgattctggaacaagaattccgcgcttgctccgagcgattgatcgtgatgagcgacgacggcagctgcggcgaaaagggactcgtgacggacgctctgcgcgcgctgttggaagcgggcgagcaatacgatgaagtgattgccatcgggccgctggtcatgatgaaatttgtctgcgcgctgaccagagaatacggtgtgaagacggtggtcagcatgaatcccattatggtggatggcaccggtatgtgcggcggctgccgcctgacggtgggcggaaaaaccaaatttgcctgcgtggacggcccggatttcgacggccatgaagtggatttcgatgaggcgctgcagcgcgctgcgcagtaccgggattttgaacaccgtgcctacgaagaaacctgcaacttgttcaaaagagcggaggggtgaaccatggcaaagaatatgaggatggataaaaatgcgatgcctgagcagccggcagaggtgcgcaataaaaacttcttggaagttgctttgggttatacagctgagcaggccatggacgaggcacggcgctgcctgagctgcaggaaccggccctgtgtgtccggctgtcctgtgggcgttgatattcccggctttattgccaaagtggccgaaggcgattttgccggcgcttacgaggttttgagccgggataccagcctgcctgccatttgcggccgcgtgtgcccgcaggaaacccagtgcgaggagaaatgcgtacgcgccctcaaaggagaaagcgtagggatcggccggctggagcgcttcgtggcggactggaaaatggcgcagggtgaggaagcggttcggccgcctgtacccaatgggcacagagtggcggtcattggctccggccccagcggcctggcctgcgccggcgacctggcgaaaaagggatatgaggttacgatctttgaagcccttcatgctgccggcggcgtactggtatatggtatccccgaattccgcctgcccaaggagattgtgcgccgggaaattgccgggctggaaaagctgggagtcaagatcgacaccaatgtagtagtcggaaaaaccatttccgtccgggaactgatgcaggaagagggctttgaggcggtgtttatcggttcgggcgcagggctgcccaaattcatgcatattcccggcgagaatctcaagggcgtattttctgccaatgagtttctgacccgcaccaacctaatgcgtgcttacgagctgggctgtcccactccggtgatgaaggcacagcgcgtggccgtggtgggcggcggaaacgtggccatggatgcagcccgctgcgccaagcgtctgggcgccaaagaggtgtatattgtataccgccgcagtgaaaaggagctgccggcccgtgctgaggaagtccatcatgccaaggaggaaggtatcattttcaaactgctcaacaatccagtgcggattttgggcgacggcaatttcaatgtaatcggcattgaatgcctggaaatgaccctgggggagccggatgaaagcggtcgccgccggccggtggaaaagccgggcagcgaattcgtcatcgatgtggattgtgtcatcatggccatcggcaccagccccaatccgctgatcaaatccaccaccgatgggctggaaactgcttcctggggcggtatcattgccgacgaagccacaggagccacgtccattcccggcgtatatgccggcggggacgccgtgaccggtgcggccaccgtcattttggccatgggcgcgggaaaaaccgctgccgccctgtctcttatacacatctgacgctgccgacga

SEQ ID NO: 4069 - DNA, 32333 bp, Unknown
  16S sequences of unknown bacteria
gggggtctttacgccttttttcctttcccttgcgtttttccctgttgaatcgggggctgtgaaaaatcttctgttgttttttcacagccccttttgagtgctgccgcgccgtatgaaggttgcgggttccgggcagctgcatgcaaattcggcgggcaaagaatcacttttccgccagcatggtgagcagcttgttgctgcggttgaggaaatccaccatgcggtcggccaccagcggctggcgggccatttcgcacaggtccacgatctggcggcaaaccatctgcgtgatgtcgccctcttcctcggcggagatgaggtacttcaccagcggatgcttttcgttgagcgtgagcgtgcggtgctcgggcatctggaagccgccgccccactggcgggacatatccgtgaaccggcgggactgctcgtccacggtgatggtggcgggcagatcgtcggacttgaagcgcgtgagcttcacttccagttctttgtcgtccagcgccttgcggaatttctcttccagcgaggcgcgggcggtctcgtccgtttcgccctcttcggtgagcccctcggtgctggcgtccacgcgctggaacttgaggttctgctccttgccggagaactcgaggaagctgatgaagttgttgtcgatcagcgtgtcgagcacgatcacgtccttatcctggctggtgtactgcgcgatcaggtgcgcctggcgcttggcgtcgctggtgtagtacacggtttcgcccttgtcttccagctctttgagcgtggtgaagccgccgctggtcttttcgaacaggatggcttccttcacgcggtcgaagaatttttcatcgcggatgcagccgtacttgacgaagggatggatgtcgcgccaatacttttcgtagtcttcgcggcgggtgttgaattcgctcaccagccggtcggccaccttgcgggtgatgtaggcggccatctttttcacatagccgtcgttctgcaggaaggagcgcgacacgttcagcggcaggtcggggcaatcgatcacgcccttgagtagcatcaggaattccgggatgacttccttgatgttgtccgccacgaacacctggttgttgtagagcttgatcacgccttcgctggcggtgaactcgttttccagcttcgggaaatagaggatgcccttgagattgaagggatactccgcgttgagatggatccagaagagcggatcgcggtaatcgtggaacaccttgtggtagaactcgcggtattcctcgtccgtcacgtcgctggggcggcgcatccacagcgggttggtctcgttcacctgctcgggcttcttttcctcggcgggcttctcttcgcccttttcttcctcggatttctcttcttccgccttgggcggttcgaccacgctcaagtaaatcggcacgggcatgaaggcgcaatacttctccagcgtttcgcgcaactggtgcaaatgcaaaaactcgtggttttcctcggacagtttcatggtcacggtggtgccgcgctgcgtgcgctgcgagggctccatttcgtattccatgccatccgcgctcgtccagcgcacggcctgcgcgccgtcttcccaactgagggtgtcgatggaaacctcgtcggacaccatgaacgaggaatagaatcccaggccgaaatgcccgatgatgccgccgttttcgccttccgaaggcttatattgcttgaggaattcttccgcgcccgagaacgcgacctgcgcgatgtacttgcgcacttcgtccgccgtcatgccgatgccgttgtcggaaacgcaaagcgtgcccttctcctcgtccgccacgatgttcacggcataattttcctcggcctgcgcctggccgctggacgcgagcattttgtatttcgcgatggcgtcgcaagcgttagaaacgatttcgcgcaggaaaatgtccttgtccgaatacagccattttttgatgacgggcattatattttgtgcatgaatggaaatgctgcctttttctgccatattgattgcctccaaaactttgaaacggcccctcctatggttgccgttccagcattttcttcattgtatacctggaaaggttgtttgtcaagcacaaattagcactcgcacacggcgagtgctagtaaaaattttatgaagataaacggaattttggattgctttgcccgttttacagcggcggcaagggcaggggctcttccatcagcgcgcggctgaggggatattcctccagcgccttgggcagggccgtgagggcgcccagcggcgcgctcgccaagatggcgggaatggcgcgctgcgccagcgcgcggtcgagcgcgtgccggggttcccagtccacgtgcggcaggacgcgcgccaggtattcccacatgccgctcagcgcgcggcgggaaaggtaaatgccgtgcccggccaatgagcggcgcagcgccgccagccgttcggaaatttccgcgggaatttcccccgtgggcgcaaagcgcgcgcgcaacgcgctgagggatacgggcggcagcgcgcgggccgcgggagaagcgctggaaagctgcggcagcacgctcagcggcgtgggcttcaggcgcagggtaaaggcgcaatcgaacgtgagctcgtcgatcggttcgcccgcgtcctggatggtggcaaaggtcaccatggacggctttgcgccgcgcgccgccaccgcctcgcgcagcatggagcaatcgaaggtgttggcgtcgtcgagtaggaacaagaagggggtgaggctgtcgttgcccgccaaaaagtcgcggtaatccgcgcgctcgctcaggctgcccttttgcgcgcgcacgcacagcagccgctcgtttaggcccagcgcgtcggccagcaggcgcaccacatcgcccttgccgctgccgcatgggccggataccaggcagaaattgcccgcgcacaggatggccagcaggtttaccgcctcgtcgttgtccaaatccaattgcatttgggcaaagcgcgtgcgcagggcactgatcagttcgcccgccgagggcgcttcggtttgcggttgggcggattccgcctgcggcggctcgcccagcgcgcgcccgcgcgcggccagggccttggcttcataggcggcaagcgcggccttcgcttcctcgcgcgcctggttcagcgcggcgatttcccggttttggctttcgcacagttccttctgcgcttcttccagcaggcggcggcggttttggcgcagcgcgtcgatctccagggcgattttcaggcgcgcggcctccagatcgctggcggcggcggggcgttccggccgcgcgccgccgcattgcgccagcaccatggcgtcgaaggaatccaggcggagcatattctgcaccaggcgttcgcgcgcgtcttcgcgctcccaggcggtgcgcaaaaaacgcagggcggtttcggcaggattgtccaccggcatggcggccacgttcaccggcaccggatggccgagctggtcgtagcgggatttgcgccactgttcatcgatgatttctttcaggctgcggccgcgcgtggggttcaggccggtttgccgggcgctttggcggacgctcaccgaacggggcaggctgccgtcgcgcgaaatccagggcgcgctggcgcgctcgggcgcggcaatttcttgcgcggcttccgtggccaagttggccgcctcgccgccttgtgggaaggccgcgccttccgaatggacgggcgcggagagggggttcgcttccaaggggaagaatcccgcctcgttttccgccacgatcacgcgcgcgctttcgccatccacgaactcaatggcggccatgcggctttgcgcgtcggccaggggcagggtggccgtggtttccatgcgccggagcgcgcgcccctcttcgccatcttccagccgccaaggcccgacgagcgcgccctcgctttcgatgaaagcgcaggcggtgcgcaagagattgccctccagcgcgacggtggacggctcgccttccagcggcagggaaagcacttcggccagctggttttccggcagggcgcagatcacatccgaatatacaatataagcgttggtttccattttatccggcgcgaagtttttgttgggccggattttgtcgtttgcccccgcatgctcgcgcaggtcgagcaggcaataccgccccagttggcgcatgcgcgccttaaagtggctgctttcgtttttgtcgggaacgatgcgcacaaacccatcttgcggatattgctgttccggttccgcaaaggggtggtaccgcccgtcttcgtgcaaaaacagcgggcgaaagcgaaaatacgcttttaatggattgtcttcttccaaatagcctaaggcataatttcccggcagcgccatttacgaccctcctgacatgcgtggtctgttgccgatttggcccgcaaatgcatcttgaaggcggctttctttcggctcgtgcctgaaaattccgaaaatggtctgcgcgccatgcgaaatttgcaggatgaacgccgtgaaaaatttaatttgccttcgcaaagtttttttgtggccattcgcttgaatattttcccacttccattatacatgaaaatattcaaaacgtcaattttagttgtcgatttcgtgaaaagcaatcatggattgcggacaaagaatggcgagtatgtgcaagaaatgcggcgtggcgcgaaatctttgcttgtgctttgggcgcaaatggcgtatagtaagaggcaagtaggagatccgatgggcaaagacccaaaggggaacgcgagagggtgacgggcaaatgccggtggaatacgttgtggggcgcgcgggcgcgatgcttcccgcgctcgcgcgttgcgcgcgcgaggccattttgctggatcgggagctgatcattctggtgccccgccagttgacgctggaaacggagatcgcccttttcgacgcgttgggcatcgagggctcgtttcgcttgcaaatctgttccacagcccgctttttggcgcgcgtttttgaggaaacgggcgcgccggaaggcgaacgcatcgacgagcagggccgcgccatggcgctgtaccgggcggccagcgcgtgcgcgggtgaattggtgtggtataaggacgcgtttcaccggcgcgggttttcgcagcgcgcgctcaagcagatgcagctcttccagcaggcgggcctggacagcgccgcgctgcgcggttgcgcggacgcaatggagggcagcccggcgcggcataagctgcgcgatttggccctgttgatggaaggatacgaccagattttggcgggccgctaccaggatggcgagggcgaactgcgcgaggccattgcgcgcctcgcggacgcggcgtttttgcgccagtgcgcggtgtgcttttatgggttcgatttggttccgccgctgcttgaggaactgatcgccgccgtggcgtgcgaatgccagaagatgaccgtgttttgcacgctggatggggaccagcgcgcgtgcgacgcggacgtgtttttgcccgcgcggcgcgcgatgaagcggctggacgcgcggatgcgcgcgaagggtttggagcgcggctttgtgcgggcggaggaggaaaaccggcagcacgcggaaatcgcccacctggcgcgcgaactgttcagccgttcgccgcgcgcgtatgcgggcgcgcccaagcgggtgcggttgatggcctgcgccgatcccaacgcggaggccatggccgtggccagcctgtgccgggaactggcccgcgccaagggctggcgctatcgggaaatgcggattgtgagcccggacgcgcagtcgcgccgcctgccgctcatgcgcgcgtttgcgctgtatggcgtgccgctttcgttttccgattcgcgcagcgcgagccagcatccgctggggcgcgcgctcaccggcacgctgcggctgtttgcgggccggtatcgcgcggaggacgtgatcgacctggtgcgcacgggctatatgaacattccggaggaggcggctgaccggtttgtgaattttatcatagcgcacggcttgcgcggcaaccgcttcaagcggccggtgggcgacgcagcgctggaaagtgtgcgggaagcgttttttgcgcccatagaggccctggaggcggctctgcgcgcggccaagacgctgcgggagcaactcacggcgctgttcgagttcctgcaggccatcgacgcctatggcaagtgcgagcgggaacaggagcgcctgatcgcgcaaaacgagcgcacgcgcgcgggcgagagcgctcaggtgtggaaccgcatcctttccacgctggatcagctttgcgccatcatgggggaaaagcggctttcgctgaaggcgctcaccgaactgatcgagcaggcgctggcggcggtggaactcaaaggcctgccccaatcggcggacgcggtggccgtgcagccgctttcacgcacgtttaccacgcccgtgaaggcgctgctgctcgtgggcatggcggacggcggcggcagcgcgcccagcggccttttgacggatgccgagcaggccagggtgagcggccaggcccacgtgtggctggggccggacggcgtggaattggcgcgcgtggcgcggatgtatcttttgagcgcgctgggcatggcgcaagaagccgtgtatttcagctattccctcagcgccatggacggctcgccgctgcgccccgccctggcggtggagcggttgcggcgcgtgtttcccgaactgaagttgtccggcgaaccttccgagcgcgtgctttcgggcgcggtggacgcggcggtctaccggctttcgcagggcggcagccgcgcagcggtgcccgcgctggcgcgcttgcccgaaggcaacgcggcgctggcgcggtttacgcgctttctgggctgggacgcccgcagcgacgcgctgggcgaaaagctggccgcgcgtgcgtttggcgaccttgcgcgggtgagcgcttcgcgcctggagcaatacgcgcaatgcccgttccggcatttcgtgacctatgggctcgcgccgcaaatcgtggagccgttcgcgctcaagcccgtggacgagggcagcttttttcacgaggccgtgcgcgcgtttctctcggcgcagcggctggaaatccaggatttgccgccggacgtggccgccacgcgcatggaaagcatcgcggatgggctgctggacggcatgatgaacgggcccttgggcgatacggcggtgagccgggcggaacgccgccgcctgcgtgataccgcgcgccgcgccgcctggatgatggcggaacagatgcgcggcagccagtttgaacccgtggcgctggaagtgcaatttggcgatgacgaaccgcgcctgctcttgcacccccagggcggcgacagcgcgctgtacgggcgcatcgaccgcgtggatcagtggaaggccgggggatatttgcgcgtgatcgattacaagcgcggcggccgcgcgctcaaaatggaagaagtgtatggcggcctgcaattgcaactgatgatctacctggccgccgcgctgaagaaatacggcggcaagagcgcgggcgcgtattactttgccgtggcggatcccgtgccgctgagcgacacccgagacccgcaggaagcggacgcgctgcgcaaaaagaacctgcggctggacggcgtgtttcccgatgatccggaaatcgtgcgcgccatggctactgatccgcaggaggccatgaaggtgcgcctcaccaaggacggcgagttctataagggcacgcaaatcgcctcgccggagcggtttgaggaaatgatgcgcacggcgctcgacttctgcgaacgatacgtttctgaaatccgcgcgggccgcacggatatcgcgcccatccggcgcggcaagcggcgcgcctgcgatttttgcgattataaggccatctgcgcgcaggatggctccacagaccggccggtgtaacatttccgccgggttttctggcggttgaaccctgcatactccgccgtcgccaaggcaatactcatctcgttggaggtgagtatatggcgattcacaaggtcgaaatctgcggcgtggatacatcgtcgctccccgtgctggacaacgagcgcatgcgggagctgtttcccaaaatccgcgcgggcgataccggcgctcgccatgaattcatacaggggaacctccggctcgtgctcagcgtgatccagcgctttcacaaccggggcgagagtgtggacgacctctttcaggtgggctgcatcggcctgatcaaggccatcgacaatttcaacacggagctgggcgtgcgcttttccacctacgcggtgccgatgatcatcggcgaaatccgccgctatctgcgcgacaacaaccccatccgcgtgagccgctccctgcgcgatttggcgtataaggcgctgcgctcgcgcgacgcgctcgtgtaccgcctgaaccgcgaaccggacatccgggaaatcgcggaggaaatggacgcccgggaagaggacgtcgccatggcgctggaggccattcaggatcccgtgtcgcttttcgatcccatctatcaggacggtggggacgccatttatgtgctcgaccaggtgaaggacgcgcgcgtggacgaaaacgattgggtgcgcgatatttccatcaaccaggcgctgcaaaagctgggcgagcgcgaacgaaacatcattcgcagccggtttttcgagggccgcacgcagatggaagtggcgggggaaatcggcatttcccaggcccaggtgtcccggctggaaaaatccgccctggcgcaaatgcggcggtatatctgaaaaggggagaacgcaagtttaacgcaggctttgcttgccggaaaaggctacttgtggtatactaatggttgtgtaatcgggcggtcctctgtccgcaagccgggcacgaacgtccagagagaaggagagttttccccatgaatgagatcattcgctccattgaggaggcccagctgcgcaaggatctgccgcaattcgtggtgggcgataccgtgcgcgtgcatgtgaaggtcgtcgaaggttcccgcgagcgcctgcaggcgttcgaaggcgtggtcattgcccgccgcaacggcagcgcgcgcgaaacgttcaccgttcgccgcaccagctatggcgtgggcgtagagcgcacgttcccgctgcattccccccgcctggaccacatcgaagtgatccgccgcggtaaggttcgccgcgcgaagctctattacctgcgcgagcgcagcggcaaggccgccaaggtcaaggataagtaagaacttccacaaaatcgctggagccgggcgcttcagcgatttttgttatgcgctgcttggcgcggcttaaggagaaaagtatgcctgaaatcaattggtatcccggccatatggccaaatcgcgccgcatgctggaagagcagatgcgggggatcgacgcggtgatcgagctgtgcgacgcgcgcgcgccgcacgccacgcgcaaccccatgctcagcgccgtgtgcaaagggcgcgcccgcgtgctggtgctcaacaaggcggatctggccaacgacgcggccaccaaagcctggatggatttttaccgcgcgcagggcatgttcgccgtgcgcttcaccgccacgggcgggaaaacgcgcgaaatcctttcgtttattcaggaggcgacgaaagaagccgtggagcgcatgcgcgcgcgcggcgcgaacaagaccgtgcgcctgatggtgatcggcgtgcccaacgtgggcaaatccacgctcatcaaccgcctgcgcggcggcgcggtggtaaagaccgccgaccgcccgggcgtgacgcgcacccggcagtgggtgaaggtggggccgtatctggaaatgctcgatacgcccggcatgctctggcccaagctggacgaccaggaagtggccaaaacgctggcgcagctgggctccatccgcgaccagatcatcgacggcgaggaactggcgggcgatttgctctttcgactgatgcggatcgcgccggaagcggtgtgcgcgcgcttcaagctgcccctggaagcggcgggcgagatgcagccctatgagctcctggaagcggcggcgcgggggcgcggctacttgctctctggcgggcggctgaacacggagcgcgcggccgccgtggtgctggacgagttccgcgcgggcaaagtgggcaaaattactttggagcggccatagccatgcgggaaacgaaagaagcaaagctcgcgcgcctgctggaacgggaaaaggcgctgctcgaggcgggcgcgacggtcgcgggcatcgatgaagtgggccgcggcccgctggccgggccggtggtggccgcctgcgtggccatgaagccgggctgctgggtgccgggcgtggacgattccaaaaaactcacagaaaaaaggcgggaagcgctgtacccgctgattttgcaaaacagcctgtatgcgcgcaccgcctgggtgtggccgggggagatcgacgcgctcaacatcctgaacgccacgcgccgcgccatggaagaggcggcgcgcggcctgccgggcgcgatttttctcgtcgacgccgtgacggggctcgacctgccgggcgcaatcgaatccatcgtccatggcgacgcgcagtgctacagcatcgccgcggcgtccatcgtggcaaaggtcgagcgagaccgctatatggtgcagttggacgcgcgctacccgcagtatggctttgcccaaaacaagggctatggcaccgcgcagcacatggcggccttgcgcgaatgcggcccctgccccgagcaccgcaaaagttttattcgatttttagcgtctgacgcaccgcgccgatgaggttggcaaaatagtggccaaacccctccgcattggggtgcaggcgcgcgtcgtaaaagtaccggctatcgtgcggcaccagggaaaggccgtctatcacagtatagccgtatttcgcgcattcgcggcggatggcttcgcccaccgcgccaaacggcccgaacctgggcagttcttcgccatccgcgcgccatatgggcgtgatggcgagcactggcgcgccgggatacgcgctgtgcaggttttggaaaaagcccgccatggcctcctcgaagtcttcgcgcgcgcgggaactccagtcgttggtgccataggcgaccgtgatgaggtccggcgcgaagccgggcagcgcctggggataatttgcgcggaacacgtccccgccgattgcctggttgaccagcagcgcgtcgattgcgcgcgcgatgcgcgtgggataggcctgggaagagaagatggcgtcgtagccctgcgaaatggaatcgccaaaggcgagatagcggaagcggtgcgccacgggcgctacgcgggtttcgccctgcagggcgaggcgggagatggccatttcgtgcagcgcgggcagcacgatttgcaggcgctttgctccgctgggcagggcgagccggagggaaccctccagcgccatttgcgtgtcagaaccttccgcggcaaagggcgcgccatcgacaaagacttccacatagccgtagggccggggcgcgtccttttgcaggcgatagtccatttccaacgcggcggcgtccgtgtccatttccagcacgatgcccgcgttgcaacgggtgcggatggcgcggtgcgggtcggcatcaaactgttgcaattgctgcggtgtaaggcggcgcaggcaaatgccctcgggcgagtcccaggcgcctagcgcgccggaagcatagggaagcagcgtatgggcggaaaattgcataatgacctccatttataggggctgtgaaaaaacttttggttttttcacagccccattgtgtgttttcgttcggccaacggcctattcaagttgtggtttccacgtgacccacgttggactccaccagacgccgcgacttgaaacgggactggcttcaacgcccggaatgaacccatggttcatcctctattatcgttatacggtggttcgccctcaccccaccagcgccaaaaactccgcttgggtgtaatacacatccatggcgatgttgttcatgtagtagaaggcgtaggcgccgaaatcgtcgcccacggcgtcgtagatttcctgcgtgccgcgcaccacgccggcttcctcgtcgaaccaccagcggcaggaatcggagttggcgttgagcaggttgacgacctgacagacggtcgccgcgtcggcgtccgcgcccacggcgcccatgtcgcagaccacgcgggcgatgccgtcgaagcactggcaccaggcttcgatggtcgtaccctggccgtcgtcaaaggagatcatgaaggtgtcgttgtagccgtctccatcctcgtcgctggcggtgaagggatgccccacagagggcagataggcttccagtgacgccgccaggggcagctgaccgccctcggccagagcgcacgcgcccagcgtcaaaagcgcgcagacgagcaggcaaagcagttttttcatcgttatcccccttttttaggccagcgccgccagcgcgttgtagctgtcatcgacagctaccgcgacggcgagcatgtagcgttccaccacgtagccaaaatcctcgtcgcccaggacgggcagctccatgcgcgcgatgatactgccgtcgttcgtgttgaggacaaagcggacgaaagtggcgtccgcgttgatggcgttgagcgcctgatacagcgcggccatgtccgacgtgtccgccgtgaccagcgtgctggtttcgaaggccacgcgctcgtcgttcacgagcgcgccgacgatgatcgaatccacgccctcggccttggagggagcaaaggcgcggataaacacgtcgtcttccgtggaagtatccaactggtagttcacgcccgcctcatccatatacgcggctacttgacggccggcctccgtgcgcggctgcgccgcctccgcaaacgccaggcacgggcacaaaagcgccagcgccagcagcaaaccgatccaacgtttcaatgatacgcactcctttcatattttgccacatatttcctctttatcggagcaatttttgcggttgtaggctttgtcagcgctctgatgcgcccggcatgtgcgccgggcgcatctcaatctttgcaagccgtattctagccgatggcagacttacagcgccttggtgcggatttcctccagcattttggcgaggagcgcgtcggtgctcatcacttcctgcgtgcccttgcgggagcgcacggccaccatgccggattcggcctccttatcgcccagcaccagcatataggggatcttttgcacctgcgcctcgcggatcttgaggttgatcttctcattgcgcaggtcggtctccacgcggatgcccgcgtcgaagagcttgtcgcgcagggccagggcggcctcgtccgcgcggtcggtgatggtgaggatgcgggcctgctcgggcgcgagccacagcgggaacgcgccggcaaagtgctcggtgagcacggcgatgaggcgctccatggagccgaacaccacgcggtgcaccatcaccgggcggtggcgctcgccatccggaccgatgtagcccaggtcgaaccgctcgggcaggttcatatccagctggatggtaccgcactgccaggtgcggcccaggcagtcttccaggtgcaggtcgatcttcgggccgtagaacgcgccgtcgccctcgttgatcacgtagggcacgcccagctcgtccagcgcgccgcgcaggccgttggtggcgatttcccacatctcatccgagccgatggagttctccggccgcgtggacagctcgatgtggtagtccaggccaaacgtcttgtagatctgcgccgccatgttgtacacgccgatgacctcgtccttgatctgctccggcgtcatgaagatgtgcgcgtcgtcctgcgtgaagcagcgcacgcgcatcaggccgtgcagcgcgccggaaagctcgtgccggtgcaccaggcccagttcgcccatgcgcacgggcaattcgcggtagctccacatcttgcgcttgaaggccaggatgccgcccgggcagttcatgggcttgatggcgtaatcctcgccgtcgatcacggtggtgtacatattttcgcggtaatggtcccagtggccggactgctcccacagcgcgcggttcaggatgatgggggttttgatctcctggtagcccgccttgcggtgcagatcgtgccaatagtccaccagcgtgttgtagatgatcatgcccttggggaagaagaacgggaagccggggccttcctccatcgtgtcaaacaaatccagctcgcggcccagcttgcggtggtcgcgctttttggcctcttccaggcgggtgaggtaggcgtccagctcttcgcgggtttcgaaagccgtgccgtagatgcgctggagcatcttgttcttttcgctgccgcgccagtacgcgccggccacgctcatcagcttaaaggccttcaccttgccggtgctcaccacgtgcgggccggcgcacaggtccacaaaatcgccctgcttatagaaggagatcgccgcgtcctcgggcagatcgcggatgagctccaccttgtagggctcgcccttttcctccataaagcggatggcttcctcgcggggcagttcgaagcgctccagcttgaggttctgcttgacgatgtgcttcatttccttttcgacggcggtgaggaattcctgggtgaagggctcgtcgacgtcgaaatcgtagtaaaagccgttttcaatcgaggggccgatggccagcttggcctcggggcgcagctttttcacggcctgggccatgatgtggctggccgtgtggcgcagcgaggaaaggctgtcgtcaaaatgcggatgttcctgcatggggatccttcctttctggttcttggcaaattttggaaacaaaaaagcgcccggcattgggacgggccaaaagcccgcggttccacccaatttgctcgcgccactttgctgggggatatcgcgcccggcgctgtggatcaagggctggtgcgcgatgcggccctgcgggggaagctcccagcgcgcaaaacgcgcttcccctctctggcgccgttcccggcatcgcttgttccccgtcgtttccacaggaaatattggcatcattatagcggcgcggcgggcatttgtcaatccttttggcggaaaaaccgtcaaagaaaaagatttaacgcgaaatgtgttggcaggctttggctgggtatgctataattgatcggaaaacgcacttccgccgatttgtgcggcgttgcccctagggtgccgggcaaaggcgaagcggaaggtggaaaaaacaaggaggaacaccaatggcagtcatttccatgaagcagttgcttgaagctggcgtgcattttggccaccagacccgtcgctggaacccgaagatggcgcagtacatcttcaccgagcgcaattcgatctacatcatcgacttgcagaagaccgttaagaagatcgacgaggcgtatctcttcgtgcgcgacgtggccctcgagggcaaggacatcctgttcgtgggcaccaaaaagcaggcgcaggaatccatcgaatccgaagccaagcgctgcggcatgtactatgtgaacaaccgctggttgggcggcacgctcaccaatttccgcaccatccgcacccgcgtggatcgcctgaacgcgatcgaccgcatggaggccgagggccagttcgacgtgctccccaagaaggaagtggcgggcctgctcgccgagcgcgataagctgcagaagaacctgggcggcatccgcgagatgaacaagctccccggcgcgctgttcgtggtcgacccgcgcaaggagcacatcgccgtggcggaagcccgcatcctgggcatcccgatcgtcgccatcgtggacaccaactgcgatcccgacgagatcgattacgtgatccccggcaacgacgacgcgattcgcgcggtcaagctgatcgcgggcaagatggcggacgccgtgctcgaaggccgtcagggcgagcagaccagcgacgagaaccagaccagcgaagaaccggttgccgaagaagcggccgcggaataatcacacggagggcgtattcctatggaaatcagtgcaaaagttgttaaagagctgcgcgagcgcacgggcgccggcatgatggactgcaagcgcgcgctgcaggaaatggacggcgatatggacaaggccatcgacttcctgcgcgaaaagggcctggcctccgccgccaagaagcagggccgcatcgccgccgagggcatcgtggatagctacatccacatgggcggcaaggttggcgtgctggtggaagtgaactgcgagaccgacttcgtggccaagacggacgaattcaaagagctggtgcacgacatcgccctgcagatcgccgcgtccgcgccggaatacgtgtcccgcgacgaagtgcgcaccgagcacctcgagcacgaaaaggaaattctcgccgcgcaggcccgcaacgagggcaagccggaaaagatcatcgagaagatggtccaaggccgcgtggagaagttctacaaggaagtctgcctgctggagcagccgttcgtcaagaacccggatgtgaccatcgagcagcttatcaccgaaaaggtcgccaagatcggcgaaaagatcagcgtgcgtcgcttcgtccgctataagctgggcgaaggcctggagaagcgcgtggacgatctggcggcggaagtcgccgcgcagaccgccgcgatgcagaagtaattcctttgcgcgtggtatggttttgcgggcttgcccgcaaagccgcgccgtttgtgccaagaagaagggcttgcgcgttcccgttgctgggcggctggtcttcctgaatttgtttgctgcccaattttgaccgctttgccgttcaaaattgggctttttctatgattacaatcgacggggatggcgcggcgggcgcgccgcttgccgccaaaaatggagggaaaaccatggcaaaataccgcagaattgtgctaaagctcagcggcgaatcgctggcggcggggcacggcgcctttgacgaggcgcgcattttggaagtggcgcagaacatcgccgcgctctcgcaaatgggcgtggaaaccgcggtggtgatgggcggcggcaacatctggcgcggccgcttttccgagcagatggatccggtgagcgccgaccagatgggcatgctcgccacggtgatcaacgcgctggccgtgcaggaggcgctgcgccgcgtggggcagagcgccagcgtgtttaccgcgcaggagatgaaccgctttgccgcgctctacacgcgcgacgcggcggatgcggctttgcgcgcgggcgaagtggcgctgctggcgggcggcacgggcaacccgtttttcaccacggatacgggcgccgcgttgcgcgcggccgaactcaaggcggacgcggtgttcaagggcacgacggtggacggcgtgtacgacgcggatccgcacaaaaaccccgacgcgcgtctgatccgggagatttcctatcgcgaggcgattgagcgcggcctcaaggtgatggacatcagcgcgttcaccctgtgcatggaacggcatgtgccggaaatccgcgtgttttccatgaatccgctctccaacatcctgcgcgtggccgagggggaagcgctgggcaccgtggcgcacgaatgaggcgcggctggcaacaactccgcagtgcggcgtagttgcaatcgtgaggggcaaggtcaacccctcagtcggctagcgccgacagctccccttggttccaaggggagccttttgggcagtgctatacctgtatgaagtcgcgccaagcaaatattcgcctttcaaaggcctcattgcctttgtcgcgccgcccgctagcttcagcgaagaacgctttgccagcacccagaatttcggcaaaattggggcttgccttttggcggaaaaaccgttacaatatagcgtagagtaatcatcgatcggagggcatttgtatgtacgagactcatatcgacgtcgcgaaggaaaaaatgcaaaaaacgattgccgtggtcaaaaaggatcttgccaccatgcgcgcgggccgcgcgaatccgcagattctggatcgcattctcgtggactattatggcacgccgaccccgatcaaccagatgggcaacatttcttcgccggaaccgcgcatgctggtcatctccctgtgggaaagcaaaatgatccccaacgtggaaaaggcgattcaaaagagcgatatcggcatcaatcccaccaacgacggcaaggtgattcgcctggtggtgccggaacttaccgaggagcgccgcaaggatctggtcaagcaggtgaaaaagcagattgaagagggcaaagtcgcgctgcgcgccattcgccgcgacgcgctggacgccatccgcaaaatggagaagaagtccgaaatcaccgaggacgatttgaaagacgcggaaaaccagcttcagaagctcaccgaccagcaggtgaaggatctggacgccattggcgcggaaaaagaaaaagagatcatgagcgtatgacgcgctttttgcccgcgcgctttcgcaaggagggcggcgcgccctcaggggcgggagaacaactgccgccccgcttgccgcgccatgtggccatcatcatggatggaaacggccgctgggccaagcggcgcggcctgccgcgcacggtggggcacagcgccggcaccgaggcgctgcgcggcatcatccgcgccagcgacgattggggcatagaagcgctgacgatttacgccttctccacggagaattgggcccgcccgcaggatgaagtgggcgcgctgatgcgcttgctgttgcaatattttgcctcggaaatcgacgagctggacgaaaagaacgtgtgtatccgcatcctgggcgatgtggcgggcctgcccgcgccgcagcgcgaggcggtgacgcgcgccatggaaaggacgcgcgccaacaccggcctaaagctcaacatcgcgctcaattacggggggcgggacgaactcgtgcgcgccgcgcgggaattggccgcgcgcgcggcgcggggcgaaatcgcgccggacgccatctctgaggcggatgtggcgggcgcgctgtacacccggggcctgccggatgtggatctggtgatccgcaccagcggggaagaacggctttccaattttttgctgtggcagtgcgcgtatgcggaaatgattttcaacccggttttgtggccagactacgaccgggcggaatacctgaaggatttgtgggaatacgcccgccgcgaccgtaggttcggcggggtgcacgagaaagaagaaggcccgaaaggataaagatgtgataaaacgcaggattaccggcatcatgctggcggcgctgtggctgtttttgtggttttaccagggttggcccttgcgcgtgtgcatgatgttcgtgatgggactgggaatgatcgaggtcagccaggcgttcgccaaggaaaaaatttggccgtgtggcgtggcgtgtatggcgttcgccctgtttgccttgcccgcttatttgctggcgcggcaggaactggatccgttcgccgccctgtcgccggtgttgctgatcgccatgctgtgcttgattttgggcatgtctttgctggtgctcaggggcacggtggacggccgttcgctgttggcgacggcgtttcccattctctatccagggcttttgtttgcgatgctcttcccgctggtggatctgggcggccgtgcgcaggtggcgctggtgctggggcacgcgctggtcatcgccctggccaacgatttggccgcgtatgaaattggcacccttttcggcaagcgcaagctctcgcccgtgatcagtcccaaaaagacggtggaaggcagcctggcggggtttgccgccggcatcctggtcgcgtgcgggttgccgtttctgatgcggctgatctggccgcaattgcagctgttgccggtgtggatgtacgcgctcttgggcgcgttcgccagcgtcgcggcgcaactgggcgatctttccgcctcgtatatcaagcgcgtgtgcgaaatcaaggatttcggctccatcctgccggggcacgggggcattatggaccggttggacgcggtgctcttttgcgccacggtttgcacggcgttttaccattggtttgggatctgaaggagcgaatatgagggaaatagcgattcttggagcgacgggttccatcggcacgcaggcgctggatgtgattgcccggcattcgggcgattttcgcgttagcgcgttaacggctcattcgaacgcgaatgagctttttgcttatgtgcgccgcttccggccccgctttgcgggtttggtacgcgaagcgcccattccggaagacttgcgcttttgcgagtggttctttggcgaggacgcgaacgagcgcgtgcttcgcgccgcaaagccgcacgacgcgctgtgcgcggtggtgggcattgcgggcctgccggcggtgatggcggcattggaagtttgcgagcgcgtgctgctcgccaacaaggaggcgctcgtcaccggcggcgcgctggtgatggaggaggccgcgcgccggggcgtgcccattttgccggtggatagcgaacactcggcgattttccagtgcctgcagggcgggcaagaacccgagcggctcattctcacggcctcgggcggcgcgctgcgcacctggagccgcgaggccattcagcgcgccacggtgcgggatgtgctcaagcaccccacttggcgcatgggcgggaagatcacggtcgattgcgccacgatgatgaacaagggcctggaagtgatcgaggcgcactacctgttcggcatgccggaagcggccatttccgtgctggtgcatccgcaaagcgtggtgcattcgttggtggaattcgcggatggcagcctgctggcgcaaatgggcgtggcggatatgcgcgtgccgatttcctatgcgctgggctatccgcaacgcatcgaatccggcgcggcgcggctcgatttgctttcctgtgggccgctcaccttcgaggcgccggatgaagcgcgctttccctgtctgcggctggcacgggaggcgctgcgcgcgggcccctacgccatgatcgccctgaatggggccaacgaagccgccgtggccgcgttcctggaaaaccgcataccttttggcgcaattgcaaacattgtggaacaaattctggcttctacgctcccagaacggatttcatgcgtcgaagatgtgtatcgtatggataaagatgcgcgcttgcgcgcaaccgaagaaattgggaggatggaatgagttttttgtatctcttgctggcagtggtgctgctgggcgttatcatcacggcgcatgaatttggccactatatcgtcgcgcggctcacgcgcgtgaaggtggaagaatttgcggtgggcatgggccccaagatcgtgggctggcgcaaaaacggcatcgattattcgctgcgcgccatcccgctgggcggcttttgccgcttcacaggggaggacgaaaagagcgattcgccggacgcgttttccgcgcaaaagcgctggaagcggtttttgatcctgttttccggggcaggcatgaatttcgtgctggcctatgtggcgatcgtgctgtttttggccatttatggcgtgacgctggcgcaggtgccgcagatttacggcctggtggaaggcgcgcccgcgcaggaggcgggcattgaggcgggcgacgtggtggtcgccgtcgacggagaggcgatcagtttcgacgaggcggggctggacgcgatgacccgcgcgatcgagcaatccgagggcgcggtgcaaatcgcggtggaacgcgatggcgagtccatgacgttcaccgtggagccggagactgccttagtggacgggcaagagcagcggcagatcggcgtgtatctgggccgggaagagcgggcgagttttggggaagcgctgcgcgcatcgggcgagcggttcgcctattatgccacgttcatgctcgatacgctgcgcgatatgctctttaagggcgaaaacctggatcaggtcatgggcccggtgggcaccatcaccagcatgggcgaccaggcgcaggcctatggcatgcaggccattctttccatggtcgcgctgatttcgctgaatttgggcattgtgaaccttctgccgctgcccgcgctggacggcggccggctggtgtttttgctggcggacgcgattgtggtgaagctgcgcggcaagcccattccgccggagcgggaaggcatggtgcatgccgtggggctgttgttgttcatcggcgtgttcatcgccgtcacatatcaggacattatgcggctgatagcggggtagcaaaatgaaaacggttacagtgggaaacgttcgcatgggcggcggcgcgccggtatccgtgcaatcgatgaccaatacggacacgcgggacgtgcaggccacgctggcgcagattcgcgcgctggccagcgcgggggcggatctggtgcgcgtttcggtgtacgacgaggagtgcgcccgcgcggtgcgcgcgctggtggacggcagccccgtgcccttggtggcggacatccatttcgaccaccggctggccatacaggcggtggaaaacggcatcgccaaagtgcgcatcaatccaggcaacatcggcggcgaggcgcgcgtgcgcgaactggccgactgcctgaaaatgcaccatgtgccggtgcgcatcggcgtgaacaccggctcgctggaaaagtgggtgctggagcaatacggccgcacgccccgcggcatggtggaaagcgcgctggggcacgcgcggctgttggaggattgcgggttcgacgatattgtgatctccgtgaaggccagcagcgtgcgcgagaccgtggaggccaaccggctgctgcgcaaggcctgcgcgtatccgctgcacatcggcgtgaccgaggcgggcgagccgggcgcgggcaacatcaaatccgccatcggcatcggcagcctgctgctggacggcattggcgacaccatccgcgtgtcgctcaccggcgatcccgtgcccgaggtggaagcggggctgagcattttgcgcgcggtgggcttgcggcgcgacgcggtggacatcgtttcctgccccacctgcggccgcacctgcatcgacgtggcgggcatcgtggcgcgcgtgcgcgcggagacggcgcatctgcgcacgccgctgaaaatcgccgtgatgggctgcgtggtgaacgggccgggcgaagcgcaggacgcggatatcggcatcgccgggggcaagagcggcggcgcgctgtttggtcatgggcaattgctgcgcacggtgcggggcgatttggcgcaggcgctattggaggagatccggaggatgagcgaaaatggctgagcgatgggaaaaggcgctggccaacccgcaattgtccggttgcctggcgctgcggcgcgtgcgcgtgaatcgcgcgagcggcaacatgcgcatcgatttttccgcttcccggctgctcacgcagcgcgagcggcaaacggtgcgcgagagcttcgccaaggagttcccgcgcgcgcaggtggacgtttccttcgcctatccgggcggtttcgccttcgatgaaaagggcatgacgtatctgctggagcgtctgttcgagaacgaggcgggcgcgcgggcgtttttgcgcggggacaattggcagtttgcggacgatacgctcagcttttccgtgagcgcgggcgcggggcgcgcgtttttggcgcgcaagaatgtggacgcgcaactggccgccattttgcgcacggaatttggccgcgaagtaaaagtgcgctttgtggagccggagaacatgagcgagattctggcgaaaattcgcgaggatcgcgtgcgcgaggaagagcgctccgccgcgctgcagcaggatagggtgcgccacgaggaaaagaaggcccaggcgcgcgcggacggcgcggctttcggcaaggtgatcagcgacaatcccatccccatggacgaactcacggaggccacgggccgctgcgtgctcaccggcgaagtgctctcggtgaacgtggtggattccaaaaagggcaatacgaagattgtgacgtttgccttttcggattactccgattccgtggcgggcaagctgtttttgaccgagcgcggcgagggcaccgtggcggaaaaggccgagcggctgctggcggttttgaaggaaggcgcgtggattctggcgcgcggcgagtatcgctacgacgatttcagccacgaaatggtgctcatgaccacggacataatggccgcgcccgcgcccgagcgcgaggacaacgcgccggagaaacgcgtggaattgcacttgcacacgcagatgagcagcatggacgcctgcattcctcccgccgaggcgatcgcgcgcgcggccaaatgggggcacaaggccgtggccatcacggatcacggcgtgctgcaatcgttcccggacgcctttggcgcggcgaaaaagcacgacatcaagttcattcccggctgcgaggggtatttgatcgaggatagcgcgcagctcgtcgagcgcgcggacgacagggacttccacggcgccacttttgtggtggtggacgtggaaaccaccggcctttccccggcgaaggacgcgatcatcgaaatcggcgcggtgcgcgtggaaaacggcgaactggcggaggagtattcgcagctggtgaatcccaaccggcccttgccggagcgcatcacggaactgacgggcatcaccggggccatgttggcggataagccctccttcggcgaaatttgcgaggaattccgccgctttatcgacggcgcggtgctggtggcgcacaacgcttcgttcgacggcgcgtttttccgcaacgcgctggcgcgcgagggctatgcctttgaaaatccgctgctggacacgctggcgctggtgcgcaacgtgtatccgggctggaagaaccacaagctggaaaccgtgtgcaagatgctgggcgtgaacaacaagcacgcgcaccgcgcggtggatgacgcgcgcgccaccgcccaggccatgctcgtggctttccaggagatggaaaaggaacatccggtgaaactcctcagcgatttgaaccggatttacggctcggacgcgtcagaccagagctggcacatcattctcctggccgcctcacagacgggcatgaccaacctcaaccgcctggtgagcgaggcgcacctgcaccattaccgccgccgtccgcgcattccgcgcggcctgatcgaaaaataccgggaggggctgatcgtgggcagcgcgtgcgaggcgggcgaactgttccgcgcggtggtgcgcggcgcgggggacgcggagcttttgcgcatcgcgcgcttttacgattatctggaaatccagcccatcggcaacaacgcctttatgctggaggaaggcacggccaaggacgaggaagcgctgcgcgatttcaaccgcaaaatcgtgtggctgggcgagcaattgaacaagcccgtggtcgccactggcgacgtacactttatggagccgcgggatagcgcgtatcgcgccattttgatggccaccaagggctttgaggacgcggacaaccaagcgccgctctatttccgcaccaccaatgagatgctggaagaattccgctacctgggcgagaaaaaggcgcgcgaggtggtcatcgaaaaccccaacgccatcgccgaccgcgtgggcaaggtgcggctgttcatcgagcacccggagggcaaggaaaccttccagccctattggcccgaggcggcggacgagctgcgcagcatcacggaaaaccgggcgaaggagatctatggcgatccgctgccggaaatcgtgcgcgcgcgcatcgacaaggaactgggcgcgatcatcggctatggcttcgccacgctgtatatgatcgccgtcaaactggtgcgcaagtcgctggcggatgggtatatcgtgggttcgcgcggttcggtgggttcgtccgccgtggcctatttcgcgggcatcacggaagtggattccctgccgccgcactatgtgtgccccaagtgcaagcacagcgaattcgatgtgccggccggcttcgcctgcgggtacgacttgccgctgaagaattgccccgtgtgcggggagaacatggaccgggacggcttcaacatccccttcgaagtgttcctgggcttcaagggcgataaggtgccggacattgatttgaacttttccggcgtgtatcagcccgtggcgcacaattatgtaaaggaacttttcggcgcgcagaacgtgttccgcgcgggcaccatcggcaccgtcgcggataaaaccgcttatggctatgtgctcaaatatctggaggaacgtggaatcagcaagagccaggcggaaaaagagcgcctggcacgcgggctgatcggcgccaagcgcaccacgggccagcatcccgcgggcatggtggtgctgccgcagggctatgaaatctatcagttcacggccatccagcacccggcggacgatgtgaacagcgacaccgtgaccacgcactttgatttcagttccatgcacgatgtgctcgtgaagctggatattctgggccacgatgatcccaccatgctgcgcgatttgcaggatatgacgggcatcgcgcccgcgcaggtgccgctgaaggatcccgcggtgttcgcgaaaatcctttcgctgttttccggcacgcaggcgctgggcgtcacgcccgaggaaatcggcgtggccaccggcacgctgggcattccggaatttggcacttcgtttgtgcgcggcatgctcacggaaacgctgcccagcaccatggaagaactggtgcgcatttccggcctttcacacggcacgggcgtgtggctggacaacgcgcaggagatcatccgcaagggcatcgcgccgctgcgcggctgcgtgtgtacgcgcgacgacatcatgaaccagcttatggaactgggcgtggaggccaaaaccgcgttcgacaccatggaatccgtgcgcaagggcaagggcctcaagccctttatggaggaagccatggccgcggtgggcacgccggactggctggtggacagcctgaagcgcatcaattacatgttccccaaatcgcacgcggtggcttacgtgatgatggggctgcgcatcgcgtatttcaagattttttatccgcgggaatactattgctgctatttcaagcgcaatctggaagcgttcgacgcctcggtcatggtggggaatctggatcacctgcgcgccgccaaggcggaattgctcgccctgcccaaggaagagcgcgaccgcaaggcggatgcgttgagcctattggatattctcgtcgaaatgagcgcgcgcggcatccagatcgtgctgccggatttgtacgcttccgcggcggaccggtttctgatcgacgagcaagggcgcattctgccgccgctttccacgctgccgggcgtttccgtggcccaggcgcagcagattctcgccgcgcgccaggatgggccgttcatctcgcaggaggaaatggttcgccggaagattcccaaaagcgtggtggaggcgctgcgcgcgggcggcctgctcgcgcaaattccccagagcagccagattagcctgtttgatttgtaaggggaacgaacgcggcgctgcgcgcgtccaaatagggagccgcgcgaatgtgcgccctggctcgcaaaaaccatacggaggatgcgatgatgaaaaaattgttggcttgcgcgctggcgctgttgctggcgcttccggctggcgcgttggcggaggcgattgcgctgaacctggccgaggaagacgcgctggtcacgcccgagggcgaagtgctggttccgccgcaggagtatatggagatctatgccattggcggcgggttttacgcgctgggcgtgtatgaaaccggcgaggatggatttttgcgcacgcgcttcgcgctggcggacgcgcaagggaacgcgctcacgcaggcgctgtattcttcgctcgaatgccgcgacggcgtgatctattatgaaattgatgggcactttggcgcgatggacgcgcagtgcaatccgctcgtgccctgtgagtatacgcggctcatcggcgatgggcagggggatttcctgggctttctggctttgcgcacggatccgtgggataccaccatggacgcggtgtacgcgctcaaagccagcggggacgagcgcgaaaccgatatttccgtgatcgacctgggcgagtccttttcggagggacggattcccgcgctgtcctcgcaaacggaggcgtacggctatttgaacgcgcagggcgaatgggcgattgcgccaaatttcctgtacgcgggcgcattttccgacggcatggcctgcgcggccacgcaggagggcatgggcttgatcgatggcagcggcgcgtggctgctcgagccgcggttcgatgtggtggaatacgggaacggttccctgatcaccaccacggtgtatggcgagggtgtgtacctttacgatgcgaccacgcgccagcaaatcgcttcgttccccggcgcggaggtctacgccgcgcactatgggaactacgccgtgatctacctgccggaagaagtgcggctggtgggcgcggatggcggcacgctcctttccctcgcgcccggcgcgagcgtcaccgtgggcgaaaaccgcgcggtggtttccaccggggaatatggcgagcaaagcgtgtatttgtacgatttcgcgggcaaagcggtggcgggccccttccaggcgcttacctccgcgggcctgcacggcgggcgcgaatgctttatcgtggatgcgtttagcgtggtggaagtcgataccggcggcgtggacagttacatcacttgggatccttcgcagatccgcagcggattggtggatgaggatgggaacacgcttttgccctgcgaatacgaggtgctctacagcgtgggcgaaaaccggttttttgcccgacagggcctgtcggagggcatgatcgacgcttcaggcaattggattgtgcgctttgagatggattcttaatgggaaatttgcctcaaaccgcgcgcaaaagggaaaaatgcggttgtaatttgggcggcaaagtggtataatcaatgtgttcgccaagaaggcgaggatagatgccatatgtgccgcccacaggtaggcgccggtggaaaaccggctccttttgcatagctggcaagagcaacctggcgggcagaaggcggcggagaagcgtgccgccagccttctttcgtgtggtgatggcgcgcaggccgctgcgcgggtgttggaggggatttattgaaacaatcgccgcttacgagggcggaaagcgccgctcgccgcgaggcggagcgcatgggactggaatgggtggatgtagagctcgcaaaagaacctgcgggtcgttttttgcgcatattcgtagataagccgacgggcgttgaactaaacgatttggaaacctatcacaaggccgtgcagccgctgttcgacgatgtagattatgattatatggaggtgtcctccccaggggtggatcgcccgctgaaaaaaccgggcgattacgcacgggcggtgggcagccaggtggaacttcgcttttaccggccgcaagagggccaaaagcaggtgacgggcacgctggccggcctgtttgatggcgcggtgcgcctggtggtggacggcgaggagcgcgcgtatccgctgaaggccattgcgctggccaagcctgtggtggagatcgacgaaagcattttgagcgattcctcggcagaagaggacgacatagaggagtagtggcaatggcaacgagaaaagtcaaaccagaaacggaaaatttgtccagcgcgatcgattccatattgcgcgagcgcaaaatgaaccggaacgcgctgatcaacgcaatcgaggccgcgctgatttccgcctataagaaaaactacggccgcaattccgatgtgcgcgtcaccttcgatggccgcgatgtggaaatcaccgcgcagaagagcgttgtggaagaagtgcaggatccgcatacggagatcaccctggaagaggcgcgggagatcgacccgcggtatggcctgggcgaccggattcccgtggtggtcaacccgcgcgattttggccgcatcgccgcgcaaacggcgaagcaggtgatcgtgcagcacatgcgcgaggccgagcgcggcgtgatctacgatgaatacatcgaaaaggaaaacgaggtgctcaccgccatcgtgcaaagcgtggagagcaacgacaacgtctttgtggaaatcgggcgcacggaaggcattctggaggcttcccagcgcatgccgggcgaggagattcgccccaacgaccgcctgaaggtgtatgtgctcaacgtgtcgcgcagtccgcgcggcccgcagatcacggtttcgcgcacgcatccggggctggtcaagcggttgttcgagctggaagtgccggagatccgctccggcgcggtgcagattcgcgccatcgcgcgcgaagccggttaccgcaccaagatggccgtgcattccaacgattccatgatcgacgcggtgggttcctgcgtgggcccgcgcggcatgcgcgtggaaaacgtggtaaatgaactgaagaccgaaaagatcgatatcatcaagtgggcgagcgatccggcggaatacatcgccaacgcgctcaacccggcgcgcgtgatccatgtgttcgtttccgaccgggaaaaggccgcgcgcgtggtcgttccggacaaccagctttccttggccattggcaaggaagggcagaacgcccgcctggccgccaagctcaccggctggaagatcgatatcaagagccaaagccaggcggaagccgccgccatgcaactggccgaggaagccgcggcgcaggaagcgcaggcggccgaagcacaggagcaggaagcagcgatggacgccgctgaagcggtggacgttgcgccggaaaccggggaggaagaacaggaaatctgatgggaatcaagccgaaaaaggtgccaatgcgcatgtgcctgggctgccgggagatgcgccccaaggcagaattgcgccggattgtcaaatcgccggaaggggaaattggcatcgatttgaaggggaaggcgccgggccggggggcgtatatctgcctttcggagcagtgcctgaagaaggcgcgcaagtcccgcgcgctggaacgggcgctggaaacctccattggggaggaaatttacgagcgcctggaggcggaaattcgtgcgcaggcaggagaataaaaattacgccatattgggcctgtgcatgcgcgcgggcaaactgataacgggcgcgcaggggacggaaaaggccgtcaagagcggggaaggcgtgttggcgctcttcgatgcttccgcttcggacggcacaaaaaaggcgattcgcgacgcatgcacatacatgcgcgtggaatgtttgcagttgccttcgggcgtgctttcgcgggaaaccgggaaggccgggcgaatggcagcggcggtgacggacgcttcttttgcccgcggcatcatccgcgccgtgggggaagcggccaagcaatacgattgaggggtgcatttagggaatgaccaaagtcaaggtgcaagacgccaccaagcaattgagcacgaatgcgggaatgctgttcgaaactgtgtcccgggcccgcaagcaggcgcaggatacgtatggtgcgctcaaaaaaatttccgacgatctgaatcgcacggaaaagcaacgcttggaaatggaagccaaagaggcgctccgcaagcaatatgaggccgccgcgacgtacatgacggggtattccaccgagcaggtttcggaaattcaggaagcggccagccgcgcggaaaaagagcgcgcgcgcgccgcggaggaagccgccaaggccgcggaagcggagaaggcggcgcaggccgccaaggctgcggaagaggcgaaagcggcgcaggccgcacaggcggcgaaaaccgcgccagcagcgcacggcgcggcaggcgcgcagcgtccggccgcttcgcaggggcaaccgcgtccggcgggccagcaagggcagtatagccgtccggcgggccaacagcgtccggcagggcagcagcgcccggcgggccagcaggggcagggcgggg

SEQ ID NO: 4070 - DNA, 4445 bp, Unknown
  16S sequences of unknown bacteria
tcttcaggcgtttcttcgttaccttccagtagttacgagctgcctgataatctggctgatcagtcagcacagctaccacatcaacgacggaaaagtaccattcttccttttcctcatcccatgcggtccgaatacgcttgttttcgaacagttggatattatcgttttgtgccatttgaatcacctcgttctgtcatgaattctttcaaaagtccttggcagccatccagcacatcctgccaggtcgcctcgaagtcctcggtgtaccatgggtctgccacattgccgggatgggcggtgtgatccatcaggagggacatcttgccgacatagtcgccgccgcagatacggtacatatcccggaggttggcctggtccatgccgatcaggagatcgtattcgtcgtaatcccgatttgtcaactgccgtgcggcatggccttcgcaggagatcccatgctcggccagcttgcgccgtgccggaggatagactgtgttgccgatctcctcccgactggtagccgctgattcgatatgaaattgcgatgccagtcccgccttttttaccaagtccttcatcacgaactcggccatggggctgcggcagatattgccgtgacagataaacaggatcctcttcatactgcgttctctccgaaatctcatcgttgccctcattataccacacatcgaccttttcgtcgagaacactttccagatacgcagaatcctcgatcatttgcagaagctccgacttggatagattttgtgcagcggcctgccggatgtaccagcgccgctccactgcgggtagttctgcttccatgatcacaacgttctgtgtccaattcaagtgaagcgcttcgccaagcagttccggcgtgccgctgtacaactgccagaaatcccgcatccgacgcacattgcgcggagagaagccgggtatatccgggtattgttctttcaggaactccgctgcggtcaccgccgcgcccttttccgagcgggcgcagacgatcttaccgatctcgcagtacagctccatctgcggcagatccgcgtccatgacaaatcccagtgcggcaaacattgcgctgtaatccacagcttttcggacattcatagcttctcctttccggcacacaacgcctgatttaaaactcaaagcagagaaaagcacgatggcatcgccgtgtttttctctgctttgacctgtttcagtacacaattttctgtcggatctcaatgccacccttcagggtgactgcgacccggttgtcgtggtaatggccgaacagccagtagtgataatgtgctctctccttgacctcctgcaggaaatctgtgagcgggtctgcctcattgtggcggttttccatgagagcaatgctggtgggagcgcagtgcgtgataacatagtccaccgcccaatcgaccttggccagatttttccgtgcttcagcgtactcctcctcagaaggcatctcctgcgcccaccacgaaatgtgattgatgcgatacctcgctcggggctttctctgcagcatcaggagctttcgctcaaaatccggagcacccagttccagaatgccgtcctccgtatcatggctttttgctccgcccatggtgaagaagtgatagccttccagctcgaagacctgtccacgcatcaggtgcaggacatgagagcgaatgcggtgtaccttgccgccgtgccagtctttcaccggatatcgttccagtgcgtcgtagttctcatgattcccgcagacgaaggccagcgtgaacggaagactttccagccagtccaatgcagcctcgtcacggccgtctccaaaccacacaccaccaaagtctccggcacaaatcacgatgtcccgctttgtcatttgtgcctgctccgggaaatatttcggcttgaagcgttcaaagtttccgtggcaatcaccggttacaaaaatcatctttccaccttctttcagtacataattttctggcaaatctcaatgccacccttcagggtgactgcgacctcacccttggagaggatttttactgtctccaccagttggcgaacggcgctctcgtcccactccgtaatgtggagcgatgcgttttccaatgtctgtgcggcatccatgatgcgctgattggcttttgtctgttcgttgttattcgcgaggatcccggaacgcttttccttcaggaaagtctgttcatccaggatttctttgaactgaccgccataggcggcaggatcatccgcggccttttccagcagtgtttggaactgctgctccagttctctcagcctgcgttcaatgtctcccaggctcatcgtgccgccggggaatgggatgatctccgtttccatggcatctgtgatctgccggatcaggctattcttgtcggccatggccgtgttcagagcggcaaggattgcttgctggagcggcgcttcatccaatgtgggtgaattgtggcagtatttcttgccgtagtctaatcggctcacgcagcgccacacgactcgtttttcaccgtttcgtgtccatgtgcagcgacgatacagggtcccgcattcaccacagaccagccgttccgagagtgcatacttgctggcgtaggaggccatccccgtgactgcgttcttggaggggctctttgctgcattccgccgtgccatctccgcctgtacggcatcatacttttcacggctgacaatgccctcgtggtgattttcaatgaggtacatgggaagctggccaatagccttgcggttgataaagtcctgccggaaggtcttctgcatcagtacatcaccgcagtatttttcattctgcaggatgctgcggatgcgggagatggtccactccggtgaatcctcgaagcacttgacgccttgctgttccagttcgtctttgatcatccgcaggctggccccagtgagatagcgctcatagagccatcggacgatttcggcctgttccggaatgatctccggctggccatcctcacctttgcggtagccgtacagctttttatattggatgctgacctttccggcttccatggcgcggcgcttaccccatgtgacattcgcggagatagattcactttcagattgggcgaaggcaccggagagggtgattcgcagctcactgtcctcctccagagaattgatgttttccttttcgaagatgaccgcgataccgagctgcttgagcgcccggatataatagaggcagtccaccgtgttgcgggagaagcgggaaaccgacttggtcaggatgacatcgattttcttctggcggcagtgccggatcatccgcatgaagtcctcgcgcttcttggccgaggttccggtgatgcccttgtccgcaaagatgccggccatcgtccaagcggtgttggacatgattttatcggtatagtactctttttgcacctcatagctgtttgcctggtcctcctctttggtggagactcggcagtaagctgccacccggagctgtctgcgggcttctgcctggcgggtggtttccggtttggcagggattttgatcactctcggggcatcatctttcattgcaggtcactcctttctatgatttgcccattttttaatcgcagtttgacattttggcgggtcaccagcacctcggatacggtgcttttcagaagatctgcgttcagttccgccacacattcgaatgcggagaagagatgccggagacgatttgtttcatattcttcattccccagagtagcatattgctctgccgcaagccggaggatcagcgctttggcgttatcctcgtcgattggctgctgctccagagcattatccagcgcctcctgcgttttggaatatgtgactggcgtaggactgcgccgatgctgtatgtggtccgggtaatttgcgagaccattgagcaggtcggtgacactttgttccacccgctcagatggtggtgtaccgcagagcctacgcagcaccttttgggcttctgtctttttcggaagttgaggcttgtttgagcgtttttcatttgccgcgatgagctgttccttatctatgagcttgggatattctttttctccggtgtagcgtgcgtccgccagaatacgggcgaccatatttttgttccagagccgtccctcatcgtatgggatatcctgctggcgaagcgactccgtcaactcattcaaggattctcctgcaatatatcggaggaagatctcctgcacaagtttcgcctctgattcctgtatgacgatcttacccagagacatcttgtagccgaagggctgcttccggtttcccatcaccgcaccgtcctctctatggactcccgcagctccagcccatttttcaggcagaagcggacggagtcgttgctctctatgataattttctcaacgagttcagcaaacagttccgcg

SEQ ID NO: 4071 - DNA, 3012 bp, Unknown
  16S sequences of unknown bacteria
gtgggtgatgtgcccaagagagtagaaggaatcaggttagttggctgcggcgagcccggccccgacagggcgaacgtgacgcagccgctcaaaatcacaccaggtgcaaagcgaagcgggatattattacttttaaaaattgaaatggcgatagggtagattgtaataatgacaaccgctgcgttaataccaccgtaacagataacggaagaggcaagaataaccagaagtaaactcatacgccgccgctgcgcagctgctgtgactctggaaagaaaaagatgctgaagagtataggcaattgagagcgccgcgccgctggaggcataaagcttagccatcacagagctgaacagaaacattcccaaaaggctactcacaatggagccaagcccgccaaggtattgctcggtcagcgtttcagttagcggaagccctgccagccatactgtggctacagcgcccaaaaagcttgccagataaattgaccagccacggtaagttacaaaaatcaggatggaaaatcctacgaaaatacttagcaggcccagagtgtccattgcatttgctcacctcaagaaatctttaccagcccttaactttggcaatgcccgtgaagcctaaaacggcgcatacaagcattgcgggaatcattgcaataaacgcaccgctgtatgatttggttacgtcatacacagcattcagaatagggctgccaataaaggcaccgatacaaatcatggactgaatccatcccacgaaagtagcagaatccctggggccaaaggcgctgttcaccatggcgcaggaaagcaccttggggaacaggtatgcaacacccataagaatgcacaccaaatacatcattccaacgcttggcgtagtaaaagccatgattgccacgcaaccaatgaacacgcaaatgagcgcaatcattgtcatgcgcgagccaatccagtccgcaatggcgccgccaggcaccatggtcacagcatttaccagaaaaatcatgccaaagatagaaccgacaagcgcggagtcaaaccccaggtccgacatatacacggaaagatttgtataagtagcgtaaaagcacatgccgaacaacaggaaaacgcccataatggcatagaaattgtaagttttcagcgcctggcggaaagtgatgccgggcaattcttctgttgagctggtttgggcagacggcaaagcgtttgccgtttcggtgggttttggatcacgtgcaaggaggagacggatcaccactgtgacaacgatcattccaattgccagccagcgcagggtagcgccatatccaattgtgttgatgaggctgcccaccatgcggcttcccactgtgccgcccaatgctcccaatgtcatggaaatcgagagcaatgtagcttgtcccttatcaaaccagcgattcaataatgtaattgtgatggcagaagaaaagaaagccgcgcacaaacccaccagaagagcgccgaaatagaacagataaatattagatgtggtggagtagataaaaaagccgatggccagccccagcccgcccagtacaggtacatttttacttttcagccactttgtaaccttgccgaactgcgtcaggtaaagcgcactggataaggagtggatagaaaacaccagcgaaaactgagtgcggctaatctcaggatgtacttctaggattggcgccataaactggcttacaacactgtaggaacaagcataataaatattcattataaccgttgcaagaagcacaacatacccataatgaaatttgaattttttggttgccatattaataattctcctgtagggatggtgatgtcagtcttgataagtgtcacgtttcaggcgcaaataatccagctctgcatttgtgaggtgcagattcagagttttgatgcagtcatccaactcccacagattctgcggtccaatctgagcagccagcggaagatcctgtgagagcacgtacgcaagggcgatattcacgccgctacagccgtgtaccttggcaagctccagagctcgctcgcggcgcttaaagttttcttcggtcagaaaagactctttggtagccatgggggccttttcaggatcgtaggccggcagaagcggatctacaaagaaaccggcgccctgcgccgcccatgcaaacagagcgatgtcatggtctttatgccactgtgcgaattcgtcatcggcataccatgtacctggccaacggttatatttggcatgtacaagactgtaagatggactggatacagaggggccgcggtaattcatccgcttgcagtagtccagggcttcctgaacacgtgagggctgccagctgctgacgccgaacgctttgaaatatcctgcaatgcgaagttcttccagcttatccatcaaagcttctaccggaacatgggggtcatcccggtgtatcatatataaatcaaaataatccacacctacgcgatcaaggctatacatcagatcttcctgaatgaaggtggggctaactctgacaaactcctcatgcagaacacctttgcggtcaatcagacaattacagcatttatcagaaatcataatattttcgcgtttgataccggacgagcgcaaccaacgatccaggatttcttcacttttggcaataccgttgccctttccgtaatagcggccggtatcaatcatcgttccgccgcgctctacatacaaatccatcattttgtgagcttcggcttcggcatccaggctgaaccaggccgtcccgaaaatcaggcggggaacaggcttgtccaagccgcgcacgctgatataatccatgttcataaccccttttgctattagattttaaagttagtgatcacttgtaagcgattttatcatttgtgattgttaaaaacaagacgatttcaattttttcaagaatagagagaaaaatgttaattttataacaaattcgcaatagaaaaattggcagaagtggcgaaaattaatagg

SEQ ID NO: 4072 - DNA, 27626 bp, Unknown
  16S sequences of unknown bacteria
aggaccagatgtcggctgtgaatatgttccgggtgagctcccggaacatattcacagccgacatctggtccttgatggttacttccacatcggttttgtcttccacaaccagctccaccatcttgtggaacagctgcatttccgagttgatgccgtcgtagagggtgatctccgggccggaatccccggaacagccagtgaggacactggtcatcagcacggcagagagtgcaagggcaagaatttttttcatgcgcaagagcctccatttttctgtttttttattatgatacggttatgcgtccagcagaccgttttccaccaggaattcccgggcaacctcgtccacagtgcggccttccacatccacggcataggtcatatcggtcattttctcgttgtccatggtgccgctgagcagaccaagaatctcccggagatcaggcgctacatccgccatctcttcaaagaggccttcccgtaccagcagggagccgttgtactccgggaagaaattgcggtcatcctccaataccttgagctgcgccttccggttgaggccatcggtggtatacacttcggtcacctggaagttgccgttttcaatggcggtgtacttcaggctgatgtccaccgggaaggtttccttgaacttcaggccatagaactcggtgaacgggccgaatttcatagtgccggctgttccttctgccgcaaagaactcatgctccgcgccgaaggtgagttcaccggctaccggtaccaggtcgctgatggtttcgaggttgtattcctcagccaccgactccggaacagcgatgcagtaggtgttgttgatgcccagcgggtcgagcatgatgacgccgtgcttgtcgtagacctgttcgcttacatagtcgaacagctccacgccttcggggacatccggcgggccctgcttgagatgggtagtcagtaccgaaccgtcgtaggaacagaagatgtcacagctgggatcttcccgggtgagttcccggaacatcagcaccgacgacatctggtccttgatggtgacttcaatgtcggtccggtcttctaccagcagttccaccatcttgtgaaccagctggatttcggagtagttgccgtcatacagttcgatttcatacttggggctgctgctgcagccggtgaaaaggctggcagccagggcagaggcagtgagtgcggagaggatacgcttgagcattcgggtacaccatcctttcaggttacagaggttgtcagcgggaaggggtcaggccgttcttcgccatcatgcggcgttcgatccagcccatcagggtatcgaagaagatcgccatgatcatcagggcagcagtacccgagagaatcatccccatgttctggatgcggattccccggtagatcaccgatccgatgccgccgccgcccacaaaggtggcaaagacagcggtactgatggagttgactgtggcgatccggatgccggtgaataccaccgggaaggccatggggagttccacctggaacagggactggagcttggtcatgccgcagcccatggcagcttccttgatggccgggctgacttcggtcaggcccagtacggtattgcggatgatcggcagcagcgagtagagcgccaggccggtgataacggtctgtttgccggcgccgatgacgatcatgatcaggccgagcattgccagggagggaacggtctggagcaggtcagccaggttgaggatcaccttccgggctttggggaagaggtaggcgatcacacccaggaacagtcccgctacaatggcaatgcagatggcacagagtacaatggtgagatgttcaatcaagagtttggaagtcattttgcccctcctttccgcaggccgcggggagtgacagcgatctgcaggcggtcgatgagtttgcccagcaccaccgccataatggcggcgggaatggcgccggcaaggatcagggcatcgttattggaggagacaccctgatagatgaagtcgcccaaaccgcccagaccgatgatggcagccagggtggcccagctcacggtatagacggtggagagccgcaggccgccgatgatattgggcattgccagcgggagttccacctgcaggagggtctgcatgggggtcataccgcagccccaggcggcttccaggtactgtttttccacaccgagcagaccggtataggtgtttttcagcaccgggaacatggcatagatggagagcgcgatcagtacagtgatgggctccatgccggtatagaggaagaggataccgataaagacgatacccggaatggtctggaagaccgagatcagcggcagggtaatggcggagagctggggtgcccgggacaggagaatgccgaagaacaggcccagcacaaagccgattgacaccgataccagcacatagaacagatgcttctgaatggaggatacgaacatatctccataaatatcaaagaaggtggagagcgaggtaaagaatcttgtcatagattaatccccccagactgcggaggccagagcccgggccatgctggaacgggttacgataccggcgatggtctgatccgggttgagaacaaccacatagttgccgcccttgaccagcagcttgtcgaagcaggccttggcctcatcggtgatggacgcttcgggcatgacacggcgcaccagcggagcaatgctgtccagcttttcctgagagtgctcgttgatttcctcgatgctcacagtgccgaggtagcggtcatcggaatcggtcaccagcagggtgtcaacgccgtgcagagccatcagctcggtgcattccaggataccgcggtccgcgccgaccttgaagatattggtgcgcaggaagctggagatggtcagggtttcgttgttgtcatggatatgcttgcccaggaagctgcggatcaggtcattggcaggattgcggagcatctcctccggcgaggcgatctgcgcgatttcgcccttatccatgaagatgatcacatccgccaggctgatggcttcttccatgtcgtgggttacaaaaatgatggtcttgttcagcttgcgctggagtttcttgacctcctcctgcaggacagtacgggtcatggggtccagagcgccgaagggttcgtccatcagaacgatcggcggagaagcagccagggcacggagaacgccgatacgctgctgctgaccgccggacatttcggagggatacttgtgtgcatactgctcatagggcatattgaccatttccagcagttcatggacgatctggtcgcatttctccttggggtacttgagcagccggggtacaacactgatattctgggccacagtcatattggggaagaggccgatctgctggattacatagccgatgctgcggcgcagggcaggcttgtcgatggtgttgatgtccttgtcgtcgatgtagatatgcccgctgttgggatcgatcagacggttgatcatcttgagggtagtggttttgccgcagccgctggggccgataagaatgacaaatttgccttcttcgatctcaaaattgaggtcattgaggattacattgtcgccatactgtttggttacatgttcaaaccgaatcattgagtaacccctttctttgttaagattgcaggtatcaagctgatacatctttcaatttctataaatctattataatagtgacaacttgtgtttgtcaataagttgttggaaagtttacaaaaaaactgcaattttgcgttcaagcccaaaaagaggacacggaccgttcacacttgggaagaaggcgcagaattgcagttccgatggggttatttcaggcggcgcagctgcagcagatgggagagcaggccggacagggaaccagccaggatcagcagggctggaatggcgataaaatcgatgtggaccaggattcccagaagcagggcagcggcagagatcgcggaaccaattaccagattcttgatccgggacagcagcagttcccgttccgaggggcctgtgtttttttgtttactcatagtgatatgactccttggggcagcggcagcagaccgccgcggcgaaaaatttgatattaccatctaatatagggcgaaatgttgcattcgtcaagggaaagtgccataatgaataaagatggtcagttctgaccggtttgtgggtgtaatagcgggaggatttggttgtatggaaagtattctgttcagtcttaacagtgtcatgcccctgtttttgatggggattgccgggtatctgctggtgcagcggggcgttgtcaatgagaactttgtggatcaggcgtccaatctctgcttcaagctgctgatcccgttcagtctgttccgggaggtgtatgacgccaaggtcctggacagcttcgatttccggcttccgctctactgcgtgctttcggtgctgaccgtgctgatcctggcctggctgatctggcctcattttgtcaaggaccgggcccggtgcggtgcctgcatccattccaccttccgtgccaatgtggtgctgatgggcattccggtgctcaccaatatgtatggggaagagggtgccctggtggcagccatggcgctgccctttgtggtgatcctctccaatatcggcgcagtgacggtgtttactgcctttgctccggagtccagcggcgcccggctcgacccgcgcaagctgctgctcagcatcgccaagaacccgtttattatcgccattctgctgggtctggctgcacagctcagcgggatttccttcccgccctttgcctccaaatccatcgactatctggcggatatgtccacaccgctggcactgctggcagtgggcggtcagtttgaccccaagaaggctgcgggcaacctgcggctcaacctgacgatctgcactctgcgtctggtggtgatccccgcggtagtgatcgccgtggcagctgccctgggcttccggggcccggaactggcgttcatctttgtggtagtcggctcgccgtcggcagtatccggtgcggctcttgccaaggtgatgggcagtgaccatcggctcaccggcgaagtcaccttgatgacctccctgctttcggccttcaccttcttcatcgcattcacccttctgcgcagcgttgccttgatctgacaggctaaaatgcaggaaaaattcattggatttcaaatacatatttctgccgaaacttaaacaaattctcggatttccacaaaaaaggctccatttctctgccaggccggcggaggacggggcctttctttgcgggcttggaaaatcggaaaaagtgccagtcctgacgcagatctgacaggatattcccgtcgatcctgctataatcacaggcagaaaggtggggaggggaattggagataacagtctatgccgatgtgctgctggcagtgaactttctcatcgattacctgctgctgctgttctgtgcccggctgtccggacgccggatcatccgcaagcggctccttgccggagcgttggtaggggcgctcacctcgctggtgatctttctcccgccgctgtccttctggcctatgacgcttctgaaagccggtatagcggtgctgatggtgcgtctggcctatccctggctgagctggagagtctttttccgggacagcttcctgttcttcacggtgagcttcctgctggctgggatctgcctgggactgtggctggggctcggaactgccggcgtgctctgttataacggagtcacctattttgatgtcagcctgggcacgctgctcctctcgatgactgccgcctatctggtgctcaccgtctatgctcggttccgggcgctgcccagcggggaacagtacacagcgtttctcagccggggcggacggaccctccggcttgcggcgatccgggacagcggcaaccgcctgactgagccgttttccggggaaccggcagcggtggcggatctgcggaccgtccaggagctgctcacagccgaggagattgcggcggcactccgcccggatcaggtgggcagcggcggtatgcagcagcttcggctgattccctgccggacagcctgcggcgccggagcgatgattgcattccatccggaccggctggttctggagggggaggaaggctgcctgacagtggaagaaatctggatcgcagtatcggtggacccggtaggcagcggagatttttccctgctgctgcctgcggcgttcagcggactgccaatcaaggagggaacagggtgtttacaggcatcacagagctgaaaaatcggatatggagctggattctccggcactggccgggggtttgctattacataggcggggcgcaggttctgccgccgccgctggagcgggaggaggaacgggaggtattcgcgcggctggcagagggggacgagtccgcccggcgcaccctgatcgagcgcaatctccggctggtggtctacatagcccggaagtttgaaaccaccggcatcgggatcgaggatctcatctccatcgggaccatcgggctgatcaaggcagtcaataccttctgcccggagaaaaatatcaaactggcgacctatgcctcccggtgcattgagaatgagattctgatgtacctgcgcaagagccagaaccagcgcagcgagatctccattgacgagccgctcaaggtggactgggacggcaatgagatgatgctttcagatattctgggtaccgagccggacatcatcagccgccccattgagcagagtgcggagcaggcgatgctgctttcggcggtggaccggctttcggaccgggagcggcagatcatgcacctgcgctttgggctgcggggcggcaccgaacacacccagaaggaggtggcagatgccatcggcatttcccagtcctatatctcccggctggaaaagcgaatcctcagccgcctgcgccgggaactgcatgacctctgataaaaaacacacccgcattcccacagggaaacgggtgtgtttttgtgtgctttgagccaggtatccggtgtgcccggggcttaccattcccagcgcaggtgcccaggaacagagccagcctccgccgccgcaccttctcatgagaagagacaggaacagcgccggagccttccggcgtatagttgctatttcccgggttcttctccggcggcagcggtggcaaggcgctcatgctcagcccgggccgcggcattggcagccgccttctccatgcgggcgagcttcttggggttcaccggtttggggttgatctgtaccgggggctttttcagcgggcggttccggatatagcggtcctcttcactgaagatgcatccgcagtatttctgcatatagagtccggcttcccgtgccttttcctggccttcccggaagcccacacggaaatcccggtagaggaactggatgccgtactgttctgccagccgttcgccgatctgacggatcagctcatgcttctgataggggctcaccagcagggtggtggtgaagctgtcgtagccatgggtggcagcataagcggcggtctgttccagccggatggcatagcagtcagcgcagcggccttcgatgtggtctgccacccgccggacaaagtcccgcaggccatattcatcctgttcgatgagggtcagatttacctgctgggcatagtcccgcagacagtcccggcgggaacggtattcggtgtaggggtggatggtggggttgtaccagaatcccaccggttcgatcccctccgcccgcaggctttcaatgcagtagaccgaacagggggcacagcagatgtgcatcagagttttcatgggtcagttcattccttttataatatgtagggtcaggcgggggagtccgggtcggcgttccgggcgagcagctcttccattggacggaacactccgtctgccggcaggagctgctggtgccaggtgccatccttccagaagcacttctgcccccgggcaccgggcagggaggtgagcagccgccactgcccgtccaccacttccagggcagcgccgttgtccagagcgatggcaggcatgccatggacccggcgcatcatccggggcagatcggtctgacgcaggggctccgcgtcatagtgcgggcagaacagcaccggcagatagcccagtccggtgaccttgatgagctggtcactgccgctggtgaacttccgggagtcagagttgccgcagctgcaccagcagatgccgccggcactcacaccgctgagcacagtgccccgcttgtatgcttcgtccagcaggcggtcgccgccgcagcgccggagcagtgtcatcaggcgcagagtgttgccgccgcccacatagatgaagtccgcccattccatcttccggcgcagggtatccgggtcacggagatccgcttcggtgaggtgatcggtatgggtgcaccccagcctgccgtgaaaaatatcacacatggtggcatagtagctgtccgcaaaggagttggcaagcccgatgaacagaaagttcggatcgtccttgccggtcagcctcacaatttcccggtcaaatgggccggtttcatacggatgttccccgcggccgttttcaccgccgccgatggctacgatttttcccatacaatctcctccttttataatagtattgcctctattgtagtcttggaaggcggggctgtcaactggaaatcccacctcagcgaaaaagcacggaatcatagggaatttcagcgtgtaaagatattttgcttaacagttaatcgggcacgcattcaaacaaaaaacagggggaccagcggtggtctccctgttttttcagacggggttatcgggcttcgaaggaatcgcagatggtttcggtcatctcggtgaccgagccgccggaaacagtcacattttcagccgagcagtgcccgccctggttgtgagcgcagtggctggcggagcagcggatctccatgtgcgggttgggggtgctgccgcaggctgcgttgacagcgccgccggttttctgctggaaggagccgcagaaggtctggtccttcatgacggcactgtgaccgtcgattttgatgctgttgcggcagcagtagccgccgttatgactggcgcaggtgttgacactgcaggtaagttctgccatttttatcacactccttgaagatttcattcatagtctgcccgggcagaggcggtctatacagaaatttctgaaaaaagtagagaacaaatattcgtaaaacccgagaaaaaaccgtccgggcggttgattttgtgtccggaggacggtataatgagatatagtcagttcgtgcgcccttttccaaggcagaccagccgggagaaaggccgcgttttttctgctgtggctgggctggcccggacagcagacagaagtttttgcaaagacggaggttttgatatggctgttaagcaggcggaagataaaaacgcatcggtagcttcggagaagcagaaggcactggatgctgcgctggctcagattgaaaagcagttcggcaagggtgcggtcatgcgtcttggtcagcactccaccctgaatgtggaggcaattcccaccggcagcttgtcgctggatatcgcgctggggatcggcggtgtgcccaagggacgcatcatcgagatctatggaccggaaagcagcggtaagaccaccgtggcactgcatattgtcgctgagtgccagaagcggggcggttcggctgtgttcatcgatgtagagcacgccctggaccccaactatgccaaggcactgggcgtggatattgactcgctgctggtatcccagcccgacaccggtgaacaggctctggagattgccgaggctctggttcgttccggcgcggtggatattgtcgtagtggactcggtggcagcgatggtcaccaaggccgagatcgagggcgagatgggcgacagccatgtgggtgtccaggcccgtctgatgtcccagggtctgcgcaagctcaccggcgccatcggcaaatccaactgtgttgccatcttcatcaaccagctgcgtgagaagatcggcgtcatgtatggcaacccggagaccactcccggcggccgtgcgctgaagttctactcgtcggtgcgtctggatgtgcgccggatcgagcagctcaagagcggcggcgaagtagtgggcaaccgtacccgggtcaaggtagtcaagaataaggtggctccgcccttccgggaagctgagtttgacatcatgtacggtcagggtatctcccgggaaggtgagatcctggatgccgctgtcaagctggacatcatcgagaagagcggttcctggttcagctataacggctccaagatcggtcagggccgggacaatgccaaggaattcctgcggcagaatcccgagctggcagaggagatcgccgcacaggttatggcaaatgcggacaagctgctgaattcgaagatcggacgcaagcccgctccggctccggcagcgaagccggcagaggaggttgcgcctgctccggcagaggctccggctgcgcccaaggccaacatcgacatcgaagtggacgactgaccgggataacgcatgaagatcactgatatttccgtgacgaaaaaaggccggtatgccctgtttgtggacggggagttcctgttctcggcagaggaggaggctctggtccgcagcggactgcgtccgggcatggaaacggatatccagacccttgaggcgctccggcgggagtcggagtacatctatgggcgggaatgggcgctgcatctgctggaatacaaggcatacagccggcggatgctgctggaccgtctgcgccggcagatcgatgaggacattgccgagcaggtggcagaccgtctgtgtgagctggggctcatcgatgaccggtactatgcgtccacctatgcccgggatctgttccggctcaaggggtattcccggcagcggatcgcccaggctctgcgccagaaggggatcgagccggataccatcgaggaagtgctggagcagtttgacgccggggaatcggatgcccggctccgggagctgatccggaagaaatatgcccggtacctgggagaggaaaaggggcgtcagcgggcagtgaacgcgctgctccgcatgggttataaatatggagagatccgcccggctctcgccgaagttctggaggaactcggcgtagaggaggagctggatccggaagattagtaggagaatcaaatggcagtaaaagtaggaatggtgtcccttggttgttccaagaaccaggtggacggagagatcatgctctcgctgatccagcgggacggatatgagctgtgcggcgatgccgaacagtgtgatgtggtgattatcaacacctgcgcattcattgaggatgccaagcgggagtccatcgagaatatcctggagttctgcgagctcaagcgtcagggtgtcatcaaggctgtggttgtaaccggctgtctggcagagcggtaccagcaggagctggtgaccgagatcccggaggccgatgtcattctgggcatcggacgcaacactgatattgtcaacgccatcgatcaggcgctgcagggagagcgggtcgtggagttcgcccccaaggacgagctggtcatggacgccgagcgtgtgctcaccaatgcgccctattatgcctatatcaagctggcagacggctgtgacaaccgctgcacctactgtgccatccccaatatccggggacggttccgcagccggaagatggagaatatcctggaagaggtacggcgttttgccgctcagggcgtcaccgagatgaacctggtggctcaggataccacccggtacggcgaagacatctacggcaagctgatgctccccgagctgatccgggaggtctgcaaggtggatggcgtgcactgggtgcgtattctctactgctatccccagcgggtcaccgatgagctgctggaggtaatggcctccgagcccaaggtggtcaagtacatggatgtgccggtacagcatgccagcggacgcattctcaaggcgatgaaccgccgggacgactatgactacctcaggaacctgatgcagaagatccgggagaagattccgggtgtggtactgcgcaccaccttcatcaccggcttccccggtgagaccgaagaggacttcgccgagatgacccgtctggtaaaggaagtgaagttcgagcgtgtgggctgcttcacctactcgcccgaggacggcaccccggcctactccatgccggagcagatcgacgaggagaccaagcgccgccgggcagatattgtcatgagcgagcagcttgccatcgccgaggaatttgcccggagctggatcggcagggaactggaagtagtggtggagggcctcaatgaggagaccggcatctactatggccgcagctatatggatgctccggatattgatacccgggtctacttcgattcgccctatgagcatgagaccggtgagtatgtcatggtgactgtcaccggcagccagggctatgatctggtggcggaagaagccgaataagcaataaagcggatctggggggatcttgttttgaatacaccgaataaactcacgctgatgcgggtcattatgatcgtgccgtttgtattctgcatgctcagtgatctggtgccgcatcggttcctgtgggcgttcctgctctttgtaactgcttcgctcaccgatatgctggatggctatcttgcccggaaaaacaacctggttaccgacttcggtatccttatggacccgctggcagacaagctgctggtgacctcggccctgatctgctttgtaggccagggtatgatcccggctgtggtggcgatcatcattctgtcccgggaattcctggtgacttccatccgtctggtagcggcgcccaagggtcgtgtgatcccggcagacaagtggggcaagtccaagaccatctgtcagatgatctggatcagtaccctgctgctcattcagtgggcactgtcccagggaatccagggcgactggatggtactgctcaaccagctgcttatgtcgctgaccaccgtgctgactgtgttctccggcggcaactaccttatcaagaatatcgacctgctcaagggctgatgccccggaaggtcaggccggttctgtccatacccgggcagagccggcttttttcgtgatttacttgcccgggggattgtgatagaatgttagaagattttgccgaaggaccggcgggaagaaagggtgacaccatggatcagacaatcaggcagcgggtggaagaactgcacagcaaagaccggcatgaggagattgtccggctgctggagcggctggaaacgccggatgcggaaagctgttccctgctggcccgggcctataacaatctgggccggtatgaggaagcggagcgcctgcttctcagcaccccgcagccggaggacccgctgtggcatttccgtctgggctatgcctggttctatcaggagcggtatgaggaggcactgcgggaatttgaggagactctccagctgctccccggtgatgaagatgccctgatctttgcgggatggtgccgccgttctctggaggccagacagaaacagaacgccgccggacagactccggaagcctatacagaggcggagcgggagagggtactcgaacatatcgcagcctggttcggcaaggtggatgatgtgatccccggggcagaatcccaggaggcccaggtggatctggcagtgatcccgccctcggcagagcatgactgctatctgctctgcacggtggggatgggcgcccggcgtatggcagtcccggcggatctggtggaaaccgagccggaccgggccgagctgatgatcgcgctgccgtcctggtggcagttcgagtcggaggacgagaactggcgttggcctctgcgctggctgaagatcatgacccggctgccctggaaccagcacacctggctgggctggggcgatactgtcccggcgatctcctcccagcacacaccggggccgggcatggcaggcatcctgctgatccatccccaggcctacggggcagagagcttccactgcgcattgccaaatggggaacaggtggagttctatcagatggtgccgctctatgcggacgagctggacttcaagctccgcaatggagcggaagccctgctgcggtacatgaacgaggaggcgctggaggtggtggacccggcccgggaaagtgcctgccggtatgtgtcggtgaaggattttgccattcccagcgcgcagatccgtcccatactccggaactggaaggggccgtctgggtgtattgccaccgaccgcattctggtggacgggtgccgggtgggatatatgtatcgggaaatgccggactatgaggaggacagcggctggcggttcctgtccggggacgagagcgatgactatctctccgatccgcagaactcggatgtctatgacctcaataccatctgcaactatgatactgatattatcccgtttttgagctatccggcggggtctgcctttgagcgggacctggacgggcattttatcctgctggatgactgaggttctgtgtgttcagtcacaaagcaggcgggaaccggttgacaaacccgggcaaaatgcatacaataagaactaaagattccataaccaaatgcgtaacgggacccagtagtccccggtaccggcaacagagaggcggctccatcggctgaaagggctgccagtcaaggatcgggcgatgaattgcacccgccagcacagaccgggaacccggctgttccaaggacagctgtcagtatcggaatgcgtctgcctgcgttaaaggccaacgagtgacaaacaggagtggaaccgcggtctatgatcgcctccggtggagcaaacgctttgccgggggctttttatatgctccgggcagggcacagagaactgtttgagaggagaaaatcagtatgagaatctacaataccctgtcccgtaaaaaggaagaatttgtgccgctggaaccgggcaaggtccggatctatgcctgcggcccgaccgtgtataactacatccatatcggcaatgcccgtcccatctgtgtatttgatgtgctgcgccgttatctggaataccgcggctatgaggtaaagttcgtgcagaacttcaccgacatcgatgacaagctcatcaagaaggccaatgaagagggcatcaccgttgccgaggtagctgagcgctacatcgccgagtacaagaaggatgccgagggcctgggcgtccgtccggccaatgtgcatccccgtgccacagaggtagtggacaagatcatcgagatcgtgtcccacctggtggaacagggctatgcctatgagtccaatggtgatgtgtacttccgtgtccacaggtttgaggactacggcaagctgtcccatatgcccatcgaggatctggaagccggcagccgtgtggatgtcagcgagatcaaggaagacccgctggacttcgccctgtggaaggcagccaagccgggtgagccctattgggagtccccgtggggcaagggccgtccgggctggcacattgagtgcaccgcgatgatccagaagcatctgggtgagaccattgatattcactgcggcggtcaggacctgaccttcccgcaccatgaggacgagatcgctcagggtgagtgctgcaccggcaagccctatgcccgctactggatgcacaacggcttcatcaatgtggataaccagaagatgagcaagtcgctgggcaacttcttcactgtccgggatgtggctgagaagttcggctatgagcccatcaagtacctgatgctgtccagccactaccgcagccccatcaattacagctatgacatcatcacccagtgcattgcagccctgcagcgcctgcacaactgccgggatcacatggactttgcgctgaccaccgctgtggatgcagccggtgagggcgatgcagccttcatgaaggagatcgaccagtgcgtggagaagttcgtcactgtgatggatgacgacctgaacactgccgatggcatcaccgctctgttcgatatggtgaagattatcaacacctatctgactgagccccggagcaaggaggctgtgaactatgccatccgtcggtttgacgagctgactgatgtactcggcctgctctacaaccgcaagaccgaggatctggacgcagagatcgaggatctgatcgctcagcgtcaggctgcccgtgcggcaaagaactttgccgaggcagaccgcatccgggacgagctgaaggcccggggcatcgagctgaaggatacccctcagggcgtacagtggatccgtaccaagtaatccgaccggaaaaccaaccggatataaaacagaccgtgtctgccgcttccatcgggaagtggaacagacacggtctgttgttttttgcggggctggaaaacaatgcggattagtccgttgcctggctgtcccgttccagtgtgatgacgagtctgtaagccatcgcagtttcccagagtgttactgcttttacgacccatccgtcagcggcgtaaatgttcatctgctgttcagcctcttctgggtttttcgcggtgacaactttatattctttcgtggaatccaccctccttatctgagcttttttcaaaatcaccccagacggcggagccccttgggatagtggttcttcacagtgcccttggaagccttgccccagcccatggagaagccgtccactgtcaccagcacatagccggagagctcagggctgccggagatggcttcgcctttcagataggcgagggtgcgggggtcatcggcagtgagatccagggcctgacgcacatcgccgggacgcagtgccatggcaagggcgtgatccggctcaaaccggcccttcttgagctggcccagggtgagtcctgcccggatcacccgcagaccgctcagatcgggcagggtgtcgggcagcaggctgaggatgtccccggcaagttccagccgtccggtgagcgggacggtgagggtctggcggcagaactcctcccaggtggagaggtccggctgcttaccatttttccgatggggctgcacggaggccgaaccgtgcacaccctcctcacccttacgcaccagtctggcggcaaagtggccctcgccgcagaggtgatgggggaagagccgggctgccttttcgatgccgggtgcggcgggggtgtaccagtccgcccgggcgggcataaagccggggtagtcgggcagctcggagagctccagttccgggtggcgttccagcagccgggagagggtgccctcgtcctcatccggggcaaaggtgcaggtggagtagatgagccgtccgcccggggcgagcatctccagggcggcatccaggatctcatcctggcggcgggcacagagggcgacattctcttcgctccactcctccagagccaccggctccttgcggaacattccctcgccggagcagggagcgtccacgacaatgcagtcaaagaagcccgggaaccgctctgccagccggtcgggggattcattcagcacagcggcattgcggatgcccatgcgctccacattccgggagaggattctggcacgctgggggtggatctcattggagatgagcaggcagccatctcctgcaagggaggccagatggctggtcttgccgccgggagcggcacagaggtccagcacccgctcgccgggccggggagcagcgatttccgccactgccatggcactgggctcctgaatatagtagaccccggcatcatgccaggggtgaaggccgggacgcagttccccgtcatagcggcgtccggtgggacaccattccaccggagcagtggggaagggcagttccaggtcagggcccgcctttagcaggttcagccggagcccccgggcagcgggctggtcataactgttcagaaaggcctcatattcatcgccgagcatctgccgcatacgggtcagaaagggttcaggcagcttcatgtaaaaatttacctccattgcagcattctattctgcattataccggttttgggccgggattgcaaatgctgtccggacacaggaagggctggtttcctggaaaaagctgtatcctcttgtgaagtttggaaaaatgcgttatactgaatctggctatacacaattcgactgtttcgaaaaagatgaaaggaaactttcaggatatggaataaaaaagaaaaatcccggcactgttatggtgaccgggattttggaacggtggtgtgaatattggacatcaacttggagtatgtcagccgtgccaaacagggagacgcacagagttttgccatgctgtatgatcaggtggcaaaggatctttaccgtgtggcgctttacacactgggaaatccacaggatgcggaggatgtcgtcagcgaaaccttcctggaagcctataaaggccttcggaacctgcgggacgacagtaaattcaaagcctggatcatgcgtatcctttcgatacgctgcaaacggaaaatctccggttatatcacggcaaaacagcagatcagcctggatgatttcatcgaaactccggacgatgtatcggaggaaacggcagactgcagtgaccgtgtgaccctgtcccaggcgctttcggaactggcgccggacgaacgggcagtggtagtactgtccgctgtacagggatatacaacccgggagatcggggaaatcctggatcttccgcatggcacggtcagttccaaactctatcgcacattgatcaagctgcgcaaaaaactggagcagcaataaagggggtgatcagaatgcggatagaagattttcatgatcttggcctgaacgaggaagagctggcggaactggaacagagtttgcagctcatcggacaggctgtacagcaggaagaagagattcctttgccggattctctacggggcgaggcattgctgcatcttctggatggagtggagcaggatgcccctgacgaggaaccggcgcaggagaaaacaaaacccgccggcagactgatctttggggtgttcccgcagaaatatctggcagcggcagcaatgctggcactggctgtgatggtaggtgtagcctataaccgcctgccccggacagcggagatcggcaccaatgagatcggttcgtccatggcgtcccaggaggcgccggcggactccggcagttcggaggaagttgtttcaccagcggattccgcaccctctgatgcacagggggaaacgggatatgcatcggtgctcaatcagatcaatgaccgctataaccgggaggacaaaccggtgtattaccggggcccggtgagcgaacaggagccccaggcagaggaaagccagcagaaggacaacccccagagcggggagtaccggacagagcctgatgaatcggaggaagctgccgaggagcccaaaaaggacagctcgatgccgaaggcgccgggaaatacagcggatcaggctgttcagccggaggcggacagtgtggattccagttctgccgatgcgggagccgccgcacaggaagctccgcctgccaatgagagcaacagcctgatgacggcacagggcagtgtccaggcggacgcagccaatggaattgccgcggatgaggcagagcccccggcaaaggagccggaaacagcggaggatacagaggaagctccgtccaccacacagttccgtgtggcatcgatggaaaaccgtctgagtgtggaagcggataccgggtatacctatacactggtgccggatgaacagggtcagtgtcaggctgtgctgaaggtcacttcggagagcacttccgcggaaccggccctggtggagatcaccagtgaggagccggtggcatacagccgggtgctgtatgatgacggcaatctgattgttgtggggaacctgctggaatatcccgaggaatatctccagatgacccgtactgtgtatgaggaagtggggatcgaaggcaaggaggtcaccagtgacctgcgcaacagctttaccgagatgacccaggtcaccgtgtacagcgtatcggaggagaacccggcggatctttcgctgagccgggactattaccaggccggctggtgccgggacgccgcagtcaccgagagcggaaccctgtatactgtcaccaacaagagcatttacggggtgaacggcgtcaccgaatacctcaccgaagtgatcccggtggtcgggaccaaagcagagctcagctatctggatgtgaaccggatctatgtggatgatctcagcagtgagctggacagctatgtagtggtctgcggactggatctcaccagggcagacagtacattggatgctgtggcatatctgggcgaccagatgccggtggcacgcattgcagaggatggaatctatctgggacgcaccgtcaccggagagggcgaggccaccagccggatgatccggtttgaaggcagcaatctctcctctgtgaccgagtcggagaatatcagcggtctgctcattccccggagttttgtatccctgccggatactggctgtgctgtcctgaccggtcagtcggaaggtaccggggggtgcatttcggaatgcactgttctggtgctggaccggagccttggcactgcggcagcagttcaggtgccggtttcgcccaaggaaatcacctcagtggaggttctcagccagaccatgctgatccatacagccgagaaaacctatcaggtcgattttaccgtacccttgtcaccggaagtcagtgtccgtgtctgagcgggttcggaaacgcaaaaaaaggcgtctcctgcgagacgccttttttgcgttctgaagtcagttttttcaggagcgggagggatcgtccggacgctctgccgggattcccggattaaagcagcagatctcttccaggctgagccgttcccgggaggccgcagggtcaccgtcggggtagcccagtgccaccaccagacagatctcctgtccctgggggatacccagcaggtcctgaagctgttttttattgcggatggtgctcatgatgcagcttcccaaccccagatccgcagccgccagacagagggtctggaccgcggctcccaggtcatactggtacatgccgaattttttcacggcagtccggtagagggggttcgggttttcagacaggtcgctgaccacagcgatcagtaccggagcctgccgggcatggagattgctcttgagcaggggattgctgatatagctggcggcccggttcttgagctgagggtcgtccagcaccacgaaccgccatggctgacagttcagcgaagagggggacagccgggctgcgtccagacaatagagaatatcctcccggcgcaccgggtccggacgaaagctgcggatggaacgccggttttccacacagttacgaaattccatggtatacaccctcctttaacgaagtattttgtgaagcaggtccagtttgccggtcagaggcggatagcgcaccggcagatccggtcggaacggctttgacagaatggatttggcatgggtgaaggtctcatacccacagcgtccatgataggctcccataccgctgtccccggttccgccgaaggggagatagggggtggtgatatgggagatggtgtcgttgatgcagccgccgccaaagggaatggtctccaccacacggcgctggagcttccggttacggctgaacaggtacagcgccagcggacggggccgggagaggatatatcccagtgcctcatggatgttgtcatagggcacaatggggagcagcggcccgaagatctcctcggtcatcagcgggctctggtcgttcagagtggtctcgatcagggtcggctcaatcttgagcgattcccggtctacccgtccgcccacagcgggatcttccggcagcatggcagccagccggtcaaaatgccgctcattgacaatccggggataggcgctgttctcacagggatcttccccgtagaagcggcagatggccttctgcatctcccggatcagggcgtccttgcggctgcgggccaccagcacatagtccggcgccacgcaggtctgtccgctgttcaggcacttgccccagatgatccgtgccgcagccaccggaagatcggcagtttcgtccacgatgcaggggctcttgccgcccagttccagcaccaccggggtcaggttctgtgccgcagctgccatgactttccgtcccacagcggtgctgccggtgaagaagatcatatcataggggcgggtcgtttcggcagcggaaacctccgcgccgccggtgacagtccggcagaagcgttcttcgaagcagacatccagcatcttctccaggacagcagccgtagcgggagcgtattccgacggtttgagcgtgacacagttgccggcggcgatggcagaaatcatcggccccactgccagcaggaagggatagttccagggagcgatgatgaggcagacgccccggggctcccggacaatccggctgctgccggggaagtgcatcagcggggtggggacacgctggggccttgaccactcccgcaggtgacgggccgtgtgccggatctcagtcagacacatcccgatttcggacatatagctctcctccgcggattttcccaggtcgctccggagcgcctcgaggatctgcggttcaaagcgtttgatcccccggtagagggagcgcagctgggccagccggaattccagcggcagagttgcaccgctctgaaaatattctttttgtgtcaggaatgcatccataattcttcttcctcccgaatttgtacaatatcagtataccatctgtttgtgaacatttcacacattgtatgaaaacttaccccgaagccccagaaagttttgccaaaattcctcccagcgcataggataggaacaaggacattttgcctgcaattcaggaattgacaaatatatacctttgtggtattatttcaacatccagtcagttagatacgactaaccgatttagagcaggtaaaaaaggaggatttgtccatgaaccatgaatttcttgcggtaggcatgacgctgatcgctggactgagtaccggcatcggcggactgatcacatatttttcccggaaacccaatgcccgttttctcagcatcagccttggcttctctgccggagtcatgctgtatgtatcgatggtggaactctttgcccagagtaaggagactctgtccgcggccctgggcggcagcggctatcccatagcggtgctctccttcttcggaggcatgctggcgattgccgtcatcgaccggctggtcccggagtatgagaacccccacgagatgacctatctggacggggcaggggaggacgaactggctgcgaacagcggcaagatgatgcgcatgggcctgattacagcgcttgccatcaccatccacaacttccccgagggcatggcgacctttgtatcggcgcttcagggggaggagctggcgcttcccatcaccatggccatcgccatccacaatatccccgagggcgttgccgtggcagtgccgatcttctacgccacccgagaccggaaaaaggcgttctggtattcgctgctctcggggctttcggagcccttcggcgccattctcggctatctgctgctgcgcccgttcatgagcgataccctgatgggcgtggtgttcggcgccattgccggcgttatggtctacatctcgctggacgaactgctgccctcggcagaggagtacggcgggcatcaccaggctatgctgggactcatcgccggcatggcagtgatggcagtcagtctgctgctctttgcctgagatccggaactgatccggctgcaaccctggaatttcccgggaaacagccggatttttctgtattttttcgcaaaatgtaaaggaaaaccccttgacatctccgggagggtcgattataataaacaaagcagcgatggaaagtatgtgacctttacatgaaggaggcatcgacatggcgaaggatctgagtatttcgtatctgctcgatttttacggtcagatgctcaccgacaaacagcgggaagtcaccgagttctattacaacgatgacctctccctggcggagattgccgatcactgccatatcacccggcagggtgtgcgggattccatcaagcgggcggaagcccagctgcgtgagtatgaggaaaagctcgggctggcccggcggtttgtggagatccaggcgggtcttgacgaaatcacccggtgtgcccaggatatttccatctacaacgacaaattcctcggttctgccgaggtggagaagcgtacagcccggatctgtgagctggcttctcagctcaacgattaaaccaagcagcgtcagaccggcgtaagcggtaaaggaaggtgtctatggcttttgaagggctttcgggaagactttccgaagtattcaaaaagttaaagggccgtggcaaggtcaaggagagtgacatcaaggaggtcatgcgggaagtccgtatggcacttctggaagcggatgtcaactacaaggtcgccaaggactttgtggcatcggtgagtgaaaaggccatgggcagtgaagtgctcgagagcctgactcccgcccagcagatcatcaagatcgtcaatgacgaactgaccgaactgatgggttccaccaatgcccggatcaccttctcgtcgaagatccccaccgtcatcatgatgtgcggtcttcagggtgccggtaagaccacccactgtgccaagctggcccggtatttcaagcagagcggcaagcgtccgctgctggcagcctgtgatgtctatcgtccggctgcgatccagcagctgcagatcgtcggcgaacaggctggcgtgccggtgtttgagatggggcagggggacccggtggagatcgcccgcaaggcggtcctgcacgcccgggactacggcaatgacatcctgatcctggataccgccggacgccttcacatcgatgaagagctcatggacgagctgcggcgcatcaaggaagcggtacagccccaggagatcctgctggtgatcgatgcgatgaccggtcaggatgccgtcaatgtggcaaagagctttgatgagacactgggcatcgacggtaccatcctcaccaagctggacggcgacacccgcggcggtgcggcgctgtcggtacgggcagtgaccggaaagcccatcaagtttgtgggtaccggcgaaaagctcgacaatctcgagccgttctatcccgaccgtatggcttcccgaatcctgggtatgggcgatgtgctcaccctgatcgagaaggcccagagcacggtggatgagcagaaggccatggaaatggcaaagaagctcaaggaacagaactttgacatgaacgatctgctggaacagatgcagcagatcaagcagatgggatctctcagccaggtgatcagcatgttccccggcgccggcaagatctccgaagaggagaccgcggcaggagaagcccagctcaagaagaccgaagccatcatcaattccatgaccaagcgggaacgggaaagaccggcaatcatcaatccgtcccggaagcgtcggatcgcagccggaagcggtaccaaggtggaagatgtaaaccgtctgctcaagcagtttgaacagatgcagaagatgatgaaaatgatggggtcttccaaattccgtcgggccgccaagcgcggacggctgttctaactttggtttttatgtccgtccgggcgtaaaaatagataaattttttcaaatacttacaggaggtgacagtcatggctgttaaaataagactgcgtcgcatgggtgctaagaaggctccgttctatcgtgtagtggtagcggattcccgtttccccagagatggtcgtttcatcgaggagatcggttactatgatcccaccaaggaaccggctgttgtaaagatcgacgctgagaaggctcagaagtggatcgccaacggcgctcagcccaccgataccgtaaaggctctgctcaagaagaacggcgctctttaatcacacgggatggtcggatagtttcctgtccgaaacataggtcggaaaaggagattgcttatggaagaactgatcgcagcaatagccagaggtctggtggaggacaaggaatccgtcactgttaaagcggatgctcctgctgaagatggtaccattacctatcatctgcatgtagcggaagatgatatgggccgtgtgatcggaaagcaggggcggatcgccaaggctattcgaacagttgtcagagcggcggctaccaaaaaagaaatgaaagtggttgttgaaatcgactgacactggaaagggaaagctgggactttcccttttttcatttatatagggggaaatctgtccgcggccttgctgtccggggaatctgccaacgccctatccgaaatgaagatgcacactgcataaaatgctgaaaaccaatgaatgacagattacaggagggccttatgccgaaggaatatttggaatgcgggaagatcgtcacaacacatggagtccgtggagaagtcaaggtacagccctggtgtgacggcccggaatttctcaagcagttcggcaccttgtatctggacgctgccggcacccgtccggtaaaggtgctgtccgccaaggtagccgggaatatgagcgtcctcaagctggaaggactggatacccccgaagaggcacgcaactggcggggccgggtgctgtatctgcggcgtgccgatgtcaagctggctcccggggattactttatccaggatctcatcggcctgcgggtcattgatgccggtgatccgtcggtggaatacggcgtggtggaagatgtatcctccaccggggccaatgatgtgtaccatattgcccgggaaggccgttccactgtgctgatccctgccatcaagcaggtgattgccggtgtggatctggaagaaggcgtgatgcatatcacaccgctggagggcctgtttgatgaggattgagattgcgaccctgttcccggatatgtgcgaaacggtgctcagtgagagcattatcggacgggcccggcgggccggcaagctggacatccactgccgcaacatccgggattataccctggacaagcaccgccgggtggacgacaccccctatggcggcggcaagggaatgctcatgcaggcagagcccatctatcgctgttatgaggcggtgtgtgaggacttcggcgcccgtccccatgtgatcttcatgagccctcagggcaagccgttcaccgaaaagcgtgccattgagctctcccagatggagcacattctgatcctctgcggtcactatgagggtgtggaccagcgggtcattgatgagatcgtcgatgaggagat

SEQ ID NO: 4073 - DNA, 21322 bp, Unknown
  16S sequences of unknown bacteria
tttttaactgaaaaagccagacctactttgtagatctgactttttcagtgcccttatataatcgggcttttcgcaggagacatcttttttgtctccacattatggcggagatggagagattcgaactctcgagctcgtttccgagctacacgatttccaatcgtgcgccctcgaccggactaggcgacatctccgtgcgattatttacgctgttttacagcggcaagatatattataatcggtggcgccataaaaatcaagtgtttttttcgtttttcttgaaaacgcggaaaaattttgctaaaataggtatggtgatagtatgttaaaacccgaagtaatagaaaatctcaaagaaataacgcccgaggagcgggaaattcttgacggtcagtcggaaattgaccgcaatatttatatgcagggcagcgggaacacggtcaacagtcaaaagctgcttgagctcggtaagcttataaccgtgagaaagcacacgcggtttatagattttcccgagcatacgcatgattatgtggagcttgtttatatgctgtcgggtcagaccgtgcatatcgtggacggtaaaaaaataacgttaaagcagggcgagctgctctttttggggcaaaattcaaggcatgcgatagaaaaagccgaggaaaacgacatcgcgctgaattttattatcctgccgcagtttttcggcagcacgctttcggttatcggggatgaggacacaccgcttaaacggtttttgatagactgtctgtgcggagacggggataacaactactatctgcattacagggtctcggatattaccgaaatacaaaattcggttgaaaacctgctgattactgttacgggcagcgcgcctaacaagcgcaagctggttcaaatgacaatggcgctgctttttatgcagctcatgggcagaaccgaaaatcttgaggtgaagtcaagagaagacaccgactttttgaaaattttaaattacatagaaacgaattacgcaacaggaactcttgctgaggcagcggagggactacattacgatataagccgagtatcccgtgagatacaaagaaaaacgggcaagacctacacaagccttgtgcaggaaaaaaggctttcgcaggcggcttttctgcttaaaaacacgggcaggcgggtttctgacatatcggtcgcggtggggtatgagaacgtaagctattttcacaggatatttgaaaagcgctacggaatgtccccaaagaaataccgtgacagcgccaagctgcaagaaaagacactttttcggcaaaacaggacatttgaattttaaaacatttgtgataaaatataagtaggagggcgtgtgctatgcattattttttggcagttgatataggcgcttcaagcggaaggcacattttgggctggcttgaagacggaatgttaaagcagcttgaaatataccgctttgaaaacggtatgaaaaacgagaacggctcgcttgtgtgggacacagagcacctggtaagcgaggttaaggcaggtcttaaggcatgtaaggcagcgggtaaaatacccgaaacggtggcaatcgacacctggggcgtggattatgttttgcttgataaaaacaaaaaggagattacaccgaattacgcttacagagacagccgcaccgacggaataaaggaagaaattgataaaattattccgcgcgcggagcttttccgccgcaccggaatacagccgataaatttcaatacaatctatcagctttactgtgataagaagtcgggaaggcttgaaaacgccgagcatttcttaatgattcccgagtacatatcctacaggcttacgggcgttatgaaaaatgagtacaccaacgctacgacaggggcgatagtgggcgccgagagcaagaagcgcgatacagagcttttaaagcttttgggtattaagaccgatatttttgaggagctttccgtgccgggcgatgttatcggaagcttcagcgatgaagtaaagtcggagttgggctttgattccacggttattttctgtccctcgcacgatacggcttcggcggttgccgcatgcccggtgggggataacggcgtatatatatcctctggcacatggagtcttataggcaccgagaacctaaagccgattttaagcgaagacgcattaagcggcggctttaccaatgagggcggtattaattaccgctaccgtttccttaaaaactttatgggaatgtggcttttccagaatataaggaaaaatctcgataagaaatatacatatgatgaaatgatgcatatggcggaggaaagcgattttcgcgagcttatagacccgaacgccgcggaatttaccgcccctgaaaatatggttgaggctattaggaaatatctcggaaaacccgatttgccgataggtgatgttttaagctctgtttaccactcgcttgccgcttcctacaaagcggcgggggaaacggtagaaaacgtatgcggtaaaaaaattgagcttataaacataataggcggcggcagtaaggacgcatatttgaacaggcttacaaaggagtacacgggcaaaagggtgctcgcgggtcccaccgaggctacggctattggcaaccttatagcgcagatgatgtattcggataaatctctcacgcttgaaacggcgcgggaaattgttaaaaaatcattcagtataacggaggtttaaaaaatgagcagataccttgacgcgaaagaaatgtacgcaaaaatcggtattgataccgataaggctatcaatacccttaaatcggtgcctgtgtcgcttcactgctggcagggtgatgatgtaagaggctttgaccaaaaggttgattcgctctcgggcggaatacagaccaccggcaactaccccggcagagccaccacacccgaggagcttatggcggatattgacaccgttttaaagctttgccccggtacaaagaagcttaatcttcacgcttgctacgctatttttgacgatgaaaacggcggctgggtagacagggataaaattgagcccaagcactttaaaaagtgggtggatttctgcaaggagcgcggcctcggctgcgactttaaccccaccttcttctcgcaccccatgtgcgacccgcttacccttgcaagcccgaatgagaagacacgcagattttggatagaccacggcaaggcgtgcattagaatttcgcagtatttagccgaggaattgggtcagccatgtattatgaacatatggacgggcgacggctttaaggatattcccgccgacagaatgggtccgcgtgtgcgctacagggagtctattgacgaaatactttcagagccgtacgatttcaataaggtaaagccctgcgttgagtcgaaggtattcggcataggggttgaagcttacaccgtaggcagtgcggagttttcgctctcatacgccgccgcgaatatgggcaagtgcataccgcttatggataacggtcactaccacccgacagaggtggtatcggacaaaattcccgcgctgctcgctttcttcccggaaatcgcgctgcacattacaagacctatacgttgggacagcgaccacgttgtgctgcttgacgacgagacaaaggaaatatgcaaggaaatcgttcgctgcggcgggcttgacggcagggtgaaaatagcgcttgattattttgacgcgtcaattaacagaatttccgcatggaccgtaggcttcagaaacgttcagaaagcgctgctttcggcgctgcttaccccgaatatgaccgaaatgcagaacgagaaccgctggaccgagcttatggtacgcgcagaagagcttaagacaatgccgttcggcgatgtttggaacgagtactgcaaaaaatgcggcgcacctgcggacggcgaatggtttgaaaccgttgaaaaatatgaaaaagacgtattatcaaagagaggtaactgaaaatgaaagacattttaaccgcaccgtttgttgaagaaatgaaaaaggtgaccgccaacatgtaccgccttggctgggatgaaagaaacggcggcaacataagctacatgctggacgcggaaacggtaggggagtaccttgacctgaataaggtcatccgcacaattcccaccggctttgacgcggcagagcttaagggtaagatatttatagtgaccggtaccggcaaatactttaagaatgttgcggacgaccccgaaacaaacctcggaatcatacgcatagcggaagacggcaccaccgccgagctgctttggggctataaggacggcggcagattcacaagcgagctgcccgcgcaccttatgagccatatcgcaaggcttaaacagaaccccgaaaacaggatagttatgcacacgcacccgacctatacgcttgccatgacccatgtgcacgagcttgacgataaaaagttcacccacacgatttgggagatgtgcaccgagtgcatagttgtgttccccgacggcataggcgttctgccgtggatggtttgcggcaacaacgaaataggtattgccacagccgaaaagatgaaggattaccgccttgtggtatggggtcttcacggaatttacggcgcgggcaaggatatggacgagaccttcgggcttattgaaaccgtggaaaaagcggcgcagctttatatgctgaccgcgcatctgccgcatatcaacaccatccatgacgatgaattaaaggcggttgccgacgctttcgggcttaaatacagaacggatttcctcgatctttaaaaaaatatcgaaatttgaaaattaatgcttgcattttattttaaaatgtgatatcatctatatgttatcgagtttgaaaggggtgacaaagatgaaggaaggtattcatccgcagtatgaaaaggttactataaagtgcgcttgcggcgcggagttcgagacacgctcaacgaagaaggatatccgtttggatatctgttcaaaatgtcatccgtttttcaccggtaagcagaagctggtagacaccggcggtcgtgttgacagatttaaaaagcgtttcaatatggaataatattaaccttttactccgcagtcactttaagcgactgcggatttttttgattcggcaggggtttgcatatctaatatctaaaatctaacatctaacatctaaattggggtggtgaaaacggaaggctatattacggttgtgggcgagacagccgccgaatatacagaaaagcgctcgcggtttatagcaacgctaaagcattgcgaaaccgaagaagaagcggcggaatttataaacgcgcttaaatcaaaatattgggacgcgcgccacaactgctacgcgtattcggtggaaaacggcgcattaaagcgcttttcggatgacggcgagccgcacggaactgccggaaagcccatactttcggtaatagatggcgcgggaattacaaatgtctgtattgtggttacaagatatttcggcggggtgctactcggcaccggcggacttgtgcgcgcctacacaaaggctgcgtcagacgccgcgtcgaaaatagcaaaagcggttatgacgcccggcacggttttctctgccgagtgcgattattccgccgccgaaaggcttgaaaagttaatttccgacgcaggcggcagtgtggagaacacggtttatgccgaaaatgtaaggtatgagttttttataagcgatactgaaaagcaaaaatttaccgaaaagctgaaagaggtcttttgcgcgcgcattgcggcagaggagataaaaaatgaggcaagaccggtggagattaaattaaaatgaaaaggaaatataaagtattgatttttgtgattgcgggaatagctcttttaatcggcattacggcgatttctttaagtgcatatatggttaaggcaaccgaaaaaagcatttttactgccgaaacctttaaaagcgaaaaaaaggcggactgcattttgattttaggcgcgggcgttaaggacggcaagccgaagcctatgcttcgcgacaggctgcttacgggcatagagctttataaaagcggtgcggcagataaaataattatgagcggcgaccacggcagagcggattatgacgaagtgaatgttatgcgcgctttcgctttggagcagggcgtaagggcggaggatatttttcttgaccacgcgggcttttctacctatgacagcatttaccgcgcaaaaaatattttcggcgcggaaaatattataatagtaagccagaaataccatttataccgtgcgctttacattgcaaaaaagctcggcgcggaatctttgggcgtagctgccgaccttaactcttacggcggtcagcttaaaagggatatacgcgaaataatagcaagggacaaggacttttttaagtgcattgtaaagcccgaggctgaaattatgggcgataaaataccgcttgacggcgaaggaagcattacgctcggttaaaatttaagaaaaattcaaaaaaatagaggtttttaaacattttcgtctaatataataaataaagggggaaaatgtcatatgaacgcaagagaaataagcgaacaaaacgaacggcttatactgtgcgataaagctatgctaagcagtgaaaccgccggcagaagatttcccgaagcggaaagcgacctgcgcacctgctatcagcgcgaccgcgacagaattatccactgcaaggcgttcagaagacttaaacacaaaacgcaggtgtttttatcccccgaatcggatcattacagaacccgccttacccacacgcttgaggttgcgcaaatagcgcgtaccatagcgcgggctttaaggctgaacgaggatctgaccgaggcaatagcgttaggtcacgatctggggcatactccgttcggtcacgcaggcgagcgggcgctgcaggagcttacaaacacgggctttacccattatgagcagagcgtaagggtctgcgagagactggaaaagaacggcagggggcttaacctcaccgccgaggtgcttgacggaatacttcaccacacgcgcggcgtggaggcacacaccttagagggcaggattgtccgcacggcggacagggtagcctacataaatcacgatattgacgacgcggtgcgcgcgggggtaatagccgaaagcgatataccgcgcgatattgtaaggacacttggagataccaaaagccgcagaataaacacgcttgttgaggcaatagttaaaaacagcgacgatacaattaaaatggatgccgaaaccgagaaatattacgatagactgcacgaatttctgtttgaaagcgtttataaaaacccggttgcgaaatccgaagaaacaaaggtttcgggcatagtggaagggcttataaaatacttccttaaaaatcccgaaaaaatgcccgaggaatatttaaaaattgcagccgaggagggtgcggagcgcgccgttaccgattatattgcgggaatgaccgatcactacgccgtgacggtattttccgatatttatatcccgaaggcgtggtcaatataaaaaaataaaagcgaggaggcggttttatgatacctgaggacattataaacgaaattaaataccgtaacgacattgaaaccgccgtatcgcagtatgtcaatttaaagcggcgggggaaaaatcttgtggggctttgcccgtttcacagtgaaaaaacgccttcttttaccgtttaccccgaaaacggctcgttttactgcttcggctgcggagtgggcggggatgtctttacctttacgggccttattgaaaatcttgattatatggagtcgataaagctcttggcagagcgctcgggaatatccctgccgcaggacggctatgacgattccatgcagcgccttaaaaagaagatatacgatatcaaccgcgatacagcaagatttttccacagctttttaatgtcgccgggcggcaaatgggcgcttgattatttgaccggcagagggctgaccgtaaaaaccataaagcatttcgggctgggcgccgcgcctgatagctgggacgcgcttatacaccacctaaaggaaaagggctatacagagagcgatatgctcgccgcaaacgttataggcaaaagcaatagcggaggtatttacgaccgtttcagaaagcgcgtaatgttccccataataaacatacgcggcaacattgtcgccttcagcggcagggcaatgccgggggaggataaacagggcggaaaatatgtgaacacgtcggatacgcctgtttataaaaagagcgaaaaccttttcggaataaattttgcgaaaagcgtttgctcggaacgcgtgatattggttgagggcaatatggatgtaatctccctgcaccaggcgggttttgaaaataccgtggcgccgttaggtacggcgttcacaacagaacaagcgaatctgctttcgcgctacacgaaggagattgtgcttatgctcgacgccgacgcagccggacaaaaggcggtgcgcagggcgtcgggactgcttgaaaacacggggctttcggtcagggttgtggtaattccagacggaaaagacccggacgaatatataaagaaaaacggcaaggagcgctttgcggcgctgcttgagggtgcggtcagcgatatggaatacaagctgctgaccgccgcaaaggacattgaccttaatagcgaggacggaagacttaaatatttagccgccgcagcggaaataatagccgcaacggacgatattatgactcgggatatttacataggcaggctttctgaaaagtacggagtttcaagaacagcgctcacaaccagggtaaacgagcttcgcaaaagaaacagccgccaaaagcagaaaaaggaaatatccgatattattcgaccgaaatttacaaaggacgacataaatcccgaaaggcgaaaatcggtaaagggcacggcggcggaggaaacgcttatagcggtgctgctgaaaaatcccgatttttataaaaatgcccttgataagctgccgcccgaaaaaatgcttacctcgcttaaccgcaggatatacgaaaccataatttcggtgcttgaacacggcggatctcttgatatttcggcgtttgccgaaaagctgctgccggctgaaataggatatcttgtatcgctgcaaaacagcgaaaaggcgggtaaaaacccggaaattgtattaaaggattgcataggggtaatattagaagaggatatgctgctggagtctgccgaaaaggcggaaagctcggtggaggaatgggctgcgggtcttcaaaatcttatcgctgaaaaatcgaaaggaaattaaacatggaaaagaacaaaaaaacagaagaaatcaaagaaaagactccgtccgatgccgatatttttgacatcgaggaggacagaaatcttacgatcgacgacattgaaaacgctcccgacgacccggacgagctgttttcggagccgcccacacttgatatagattttgacgaggaacccaccgacgacgaattaaagcttgaggaaatggatattgacgcgctcgacgatctttccttcgacaatatgaaccttgacgacccggtcaagctttacctgcgcgaaataggcagagtgccgctgctttcatccgatgaggaaataaagctggcggttaaaatttccgagggcgacgaatatgcaaagcaaaggcttaccgaggcaaatctgcgcttggtcgtaagcattgcaaagaagtatgtcggcaggggaatgtacttcctcgatcttatacaggagggaaatgtcgggcttattaaggctgttgataagtttgattaccagaagggctttaaattttcaacctatgctacatggtggataaggcaggcaataacccgcgcaatagccgatcaggcgagaacaatacgcatacctgtgcatatggttgaaaccattaaccgccttaaaaaggtacagagccagctgctccacgaaaacggcgttgaaccgagtgaggagcttattgcagaaaaaatggatctgcctgtagagcgcgtacgcgagataatgcgcgtggcgcaggagccggtttcaatggaaacaccgataggccccgaggaggattcccgccttatggactttatacgcgatgaggacgcattggctcccgatgaagcggcgcttaagaccataaccaatgaggatattgacggggtgctcagaacccttacaccgagggaggaatcggttatacgcctgcgcttcgggctgcaggacggcagatgccacacgcttgaggaggtcggctcggaattcaatgtaacaagggagcgaatccgccagatcgaggcaaaggcattaagaaagctgcgccacccggtacgcagcaacaagttcaaggaaagataagaggcataaatacaatggaattttcatataaaactaaaggagtatgctcaagaggaatcctcattgatgttgaagacggaattgtaaagagcgtcaggtttgacggcggctgcaacggaaacacgcagggtgtggcaaggctcgttgaaggaatgaagattgacgatgttatagaccgccttgacggtatcaaatgcggattcagaaatacatcatgccccgcgcagttagccgaggcgctaaaggaatataaagccgcaaagggtgagtgaatttgtgttcggacatcgacattaaaattgcgggcgaaaagccttcacaggaaataaaaaaacgcagagaagtatcacttcagcccgaggagctcaaaaaggatgatataaagagcgcacgtgactggggcgccgttgttgcgcgcaaatttatagacgatgcgcaggataacgcaaagggtacggaacccgataacagtgaaatgataattcagcgcaggctgcttttgtcctttacggcgacagtcggctttgagcaattctgcagtgacgacgcactgtgcggcatagcgcagaagagctttatcgataccgtgaaaaaagccgaccccgagctttaccgctcatcgggtgatacaggagccttttcgttctattatttggcataccgccgcggcatcgagatagaccgccgcataggtcagacctttgccatgctttgctcccatgacggcgacccgatttatcaggagcttggcgaagcgctctactgctggtttttgtccgctgtaagaaaagcggcaagggaacttggaatacagtaatattgacctaatatattaaactgtttaaactatgcaagccgtaacggaacctatgctccgttacggcttgcgtttgttttgaatattagatgtagatggtagataaaattgcctccccggtgcttgggaaagtgtcatgcgtagctatgacggagaggttgttacaggcttaaattatttggaaaactaattgtccatatatactatgtttttcatatttaatcgatggtttataaataggctttagtttctaacaatccctcagtcgcctaacggcgccagctccctttacacaagggagccgatggtttgcacaaaagttgtgatttggcacaaaattgcctccccggtgcctggggaggcaatggtttgcggcgaattattttatctcatagccaccgacggggcgtatattaagaacgcagcagctgttctccccgaaaaccgactcgatcatttttttataatccgctaaaatttcggtggggatatagcactgtatagttcccgcaaagccgccgccgtggactcggcatgcgcctttgccgttcaggaatttctttgtgagcgctatcgcaagcggcagaccctgttctgcgacatccgaattggagtagagattctgcagataatcataggaggattcgccggactcgtttacaagccttaagaagccttcaaaatcgccggatttcagcgctgccttttgcgcttctacgcggttttgttcattaaagaagtgaaaagcgcgcagcactgcacggtcgccgcaggaacggcgcagctcggagatactgttatagaaacgctcggaatcggcgtcgcgcaggaaatccacgcccagcgcgttactgatctttttgcattctattgtgatatcggcataatcctgcgttaaatttgcatggttgccgccggtatcgacaacgcagagggtatagccgaatgaatgaatatcaaggttaatcttttcggttatcggctctgcaggatcgaagaaatcggcataggtaaatccgccgagtgagcttgccatctgatcgagaagaccgcatggcttaccgaaatattcacgctcggcatactgcccgatttttgcaacggtaatctcatcggcttttgcttcaaagaacataccgtttacgatattgccgaccaaaacctcaaacgcggcagatgaggaaagccccgagccctttaaaacatttgaggtggtgtaggcgttaaagcccgaaagggtgcagccaagctccttaaagcgggaaagcacgccgcggataagcgcggaagcgcggccgtgctcggcttcgttcttttcaagctccgtaatatctataacgtccatatcgtagccctcggacttaatgcgaaccttgccgtcattattgggagcaaccacggctataacatcgaggttaacgccgccggcaagcacgcagccgtgctgatgatcggtatggttgccgcccacctctgttctgccgggggcggagaaaaggcgaatattatccctttccgaaaatatatcgcaaaagctgtcacacgcggcggtatagcgcgcgcgggcggcgctcacatcgccgtaaagcattgaaaaatccttatcaaaagcgccgttttcgattttctgtttgatttcggtgatattcataatagcctccgattattttgaaattatggcaagcgtatctcttgcgatggcaagctcctcgtttgtggggataacatagacatttacgcggctgttttcggtggagatcttaacctccctgccgcgcagcttattctgagcgtcgtcgatttcgacacctatgaagctcaaattttcgcaaacatatttacgaagctcggggtcgttttcgccgattccgccggtaaaggctatggcgtctacgccgttcatggcggcaatataagagcctacaaatttgagaatttcatatctttgcatttctattgcaagctgtgcgcgtttgttgccagcctctgccgcggcgcaaatatcacggttatcgtttgaaataccagaaattccgagcatacccgattttttattgcagattgtatttacatcctcgggggataagtgctccttttcggctatgtaggtgagcgccgaaggatcgagcgtccccgagcgggtgcccatcataaatccgtcaagcggggtaaagcccattgatgtatctacgcagacgccgtcctttacggcggtaatggagcagccgtttccgagatggcaggttattattttgaggtcttttttcggcttgtcctcgattgcggcgaccctgtcgcttacaaagcggtgggaagtgccgtgcgcgccgtatttgcggacgccgtacttctcgtaatactcatagggcagggggtacatataggctttcggcggcattgtctggtggaaggatgtatcaaacacgaccacctgcggaattttatctccgaaggtctttatgcaggcgcggattgccagcacatgagccgggttatgcagcggggctaaagcgccgagctcctcaattttatcaataacatcgggtgttacaaggcagctgttcgggaaaatgctgccgccctgcactatacggtgaccgatagccgaaatttcatcgaacgaatcgattacctttgcgtcgctttttgtaagggcatacacaaccgcctcaaaagcctcgctgtgggtgggcatgggggtttcggcagagtattctcttccatcggctgttttgtgcgaaatagcgccggtaacgccgattctttcgcaaagaccctttgcgagcacctgctcgttatccatatcaataagctgatatttcaaagatgagctgcccgcgtttacaacaaaaattttcatacttaaaacttccttcggtaaaaaaataatttattcttgaaaaatattactcaactaatatataatactgtatatacagcattttttcaagttttttttgcaaagaagtgatattttgtcggcaatcggcgttatagcggagtttaaccccctgcacacggggcataaatatcttttaaccgaggcgcgccgccacggcacggttattgccgcaataagcggaaattttgtgcagcgcggcgatgtcgcgatttttgacaagagaaaaagagccgcggcggcacttgcctgcggtgcggatattgtgcttgaaattcccgtaagctacgctatgtcaaccgcgcagaattttgcgcttggcggagtatcggtattatcggcgttcgggtgtgaaagccttatcttcggcagcgagtgcggagatataaaaaggctcgaaaatgcgtcagatatgctttcgaccgatgaatacatggagaggcttcaaaaatatcttgataccgggcttacctttgcggcggcaagggaaagggctgcgggtcttgaggacggtttgctttgcggcgcgaacaataatcttgcgatagagtatatttcggcggcaagggcgataaacgccgatatgaagtttttgaccgttcggagaacgggtgctccgcatgattctgaggtgcccgaaaacggctatgcctcggcgtcgcttttgcgtgagaaaatgcgggcgggggatattgatttttgcaaaaaatatataccgccggaggcgtgtgagttttttttgccggaagacgcggcggatataaaaaggcttgaccgcgcaatacttgcggtcttaagacaaaaaacgcccgaggaccttaaaaagctgcccgatataagcgagggaatagaaaataagcttttttccgcaataaggcttgcaaacagcatggaacaactgtataatacagttaaggtcaagcggtatacccacgcgagaataagacggcttgcactgtcggcttttttagggctggataacgaattctttatgaagccgccgccgtatgttagggtactcggctttaatgaaaagggcagagagcatttagcgaaggctgcgggaatatcaccgataccgattataacccgcgtatcggatattgaaaagctgtcctgcggtgcaaaaaggctttttgccgcagagtgccgagcgacggatatgttctcgcttgcgctgcccgtgccgcagccctgcggagcggagtataccgcgaaaattattaaaacggagtgattttttatggtaagcataaaggaaattgaaagctttaaggattacgggcgctgtatctgcgttacaaacggcgttattgaggcgtatgtaacggtcgatatcgggccgagaataatccgtttcggttatgtggacgggcagaacatgatgtgctcaaaccgcaaggcattcggtcctaaggacgataaggaatttaccgattatttcggcgagggcaagcgctgggagaatctcggcgggcacaggatatggctgtcgcccgaaagctatcccgaaacatattatccggatttagagcctgtaagctatgaaattacagacgacggcgcggtattcacgccgaatcccgagattgaaaacggcgcagctaaaagtcttgaaatcaaaatggattcggacgatgctaatatgcaggttataatgcgcgttaagaacatttcggaaaaggataagaattttgccgtttgggggctttcggtctccgaaaagggcggaacgcttattattcccatgaacactaacgatacggggctgctttctaacagaattgtttcggtttggccctataccgatatgagcaacgaccgcatttactggggcaataagtatgtgaccctcaggcaggattcaaaatacgataagcccataaagctgggctttgaccttaactgcggcactgtttattactgccttaacgatgatattttctgcaagagctacgatacaaatcacccgaacggaaattatcccgacggcggctgctcctttgagacctataccaacgacagtatgatcgaggttgaatcactcagcgagcttaagaccgtaaagccgggcgagaccgtcacccacaccgaaagctgggcgctttgcaaaagaccgtgcgatattgattttaagaacgataaatcaatcgataatatgcttgaaaagctgtaagcttcagcagtttgaaaaaggcttcccttttggggaggcctttttctatggagtgttgcaggcttaaattaatatttcaactttattctgtatatataatatttaattttcgaataaccgtcagcttccgacaatcccgcaccctaaacaccggggaggcaagagtttgcgctattccgaaattatgccgctgatctcggtttcgcgacacaggatattagccgagtgcttgccgaattttccgctgtcgcacaaaaaatatttaagctcggaattgccgagaacgacacgccttatatgcgtttcctcggtggaataatcggatattatgccatccgaaaatccgcttgaggaaaagaaaaagtaatcgtaatacaccttttgcgccatgccgaccgcatattccccggtaaaaacctttgatgtggctttataaaatccgccgaggcaatacacattgtttacgccgtactgcgctaatgtttcgcacaggcgggcactgtaggtgtatattgtgatgtgctttttatctgcaaggtagggcgccatatgcaggcttgttgaagacgcgtcaataaaaacggtggagttttcctttataagctccgccgcttttttggctattgcgtccttttggcggtgatttttctgcagccgcatttcaataggggtgtttatactgtcttttttcagctccgcgccgccgtagctgcggaccacgagtcccatatgctcaagctccgcaagctgcctgcgaacggttgattcgctggcgtagaccgcctttgctatgtatttcacggtggcatagccgttttcctctattattttcagcagtctgtcaatttgttcttccttcataaattactcccaatcggtcaaaaatacgcaagtaaaatgcgtgttttgctcgatttaaatgatttttttgcattataagcgccgattattgcgtatttgtgcacttgtgttataatattatcataaaaaaatgcggaggtcaagaatattatggagcgaagcaaaccaaagctttttgcctttgatctggacggaacgctgacgcagcacaaaactccgctgtcggccgaaaaccgcgcagtgcttgaacggctgtcggacaaaggcctgctttgcatggtaggggcgggaatgtgccgcagaatttttgagcagatggggcatttcccgatagatataatcgggaattacggtatgcagacggcaatctacaacagcgccttaaaggacattgaaataattgaggacaacaaggttcctgcagaccgcgaatcgattgagcggcgcgtgacggaattaagggagcgctacggctatacggatttcaagggagataatgttgaatatcattcatcgggctgcataacctttccgttacttggtactaaagccgagcaaagggataagcttgccttcgatcccgacaggaaaaagcggcgggcgttttacggcgaggtcaaaaagcttttccccgaatacacggtttttgtgggcggctcgtcctcgttcgatatggcgccgaagccctacaataaatactatgcgctgaacgcttactgtaatgagcgcggcattgcccacgatgcggtgatttttgtgggtgatgattacggtgagggcggaaacgacgaatcggtatatttatccgatttcggctttgaaaaggttgacaattatttggatttccctaaaataatgagaaaatatacggaggaataaaaaatgaaaatcgtaattataggctctggtatgatgggctcggcaatggcggtgccggcgcttgataacggtcattcggtagtattggtaggtactccgctggatacggaaataatctacggcttgaaggaaagccattaccacaagacgctgaaacgcgaattaaagggcgatatttcattcaagcagtttgaagaaattaagggaaatatccccgaatgtgatattttaatctgcggcgtttcaagcttcggggtcgagtggtttgcggagaatgtaattcccgcactcaaaagcgggcagagggtgcttgcaatcacaaagggtctgcacgaaaatgcggacggcaccttgtcgccgtttccggtatggttttcgtcattaagacccgatgtatcattcaatgcagtgggaggcccctgcataagctttgagcttgccgacagaatacataccgaggttgcgttttgcggtaaggataaggatatactaaacgagctgcgcgcggctttgaaaactgaatattaccatatttccgtaacagacgatatagcgggaattgaaaccgccgtagcgctgaaaaatgcctatgccatggcggtaagccttgcaataggcgcgtatacaaaaaatgacccgtcattacccgaaaaatacaatgcgcaggcaggactgttttatgaggcggcgcgtgaaatgcgcgctataatcaagctgctgggcggtcaggataacgcccttatgttcggtgtgggcgacctttatgtaacggtattcggcggcagaacaaggagactcggggtaatactcggctccggtactgaatttaccgctgcgcgcgaaatgcttgccggcgttacgcttgaatcggtggctattatagaattgctcggcagatatttcggcagtaaaatatccgaatatccgcttatgcagcatattcatgagcgcataacgcagaacactctgcctgatattccgtgggatgaatttatttgcgattatttttcagagtaagctttagagggtgaaaaaatgattgaaagaaaatgcagctgtgaaatgggtatgcaccgcgcgccgcttgagagatatataatagaaagcggggctgtgaaccgtctgccagaattactcagagattataacaaggtttatatggtatgtgatgaaaatacataccgcgttttgggcgaaagggcggagcagatattgaaatccgtcggcaaattttcgcacaagcatattttaaagggcgatgttttgcccgacgcgcggaatatcggcgatgtgctgatacacttaaacgacccgaaagccgattcggatatttttaaatactcgccgcagcctgattttattctggcggtaggctcgggcgttgtgaacgatatctgccgggtggtttcctaccgtttgggtctgccttacggaattgcgggaaccgcgccctcaatggacggatatgcctcagcaggatcgcctacgctgtttgacggcacaaaggcgacaattaaatgcaccacgccgaaatatattatagccgaccttgacgttatgaaggaagcgccgtttgatatgctgctttcgggcataggcgatatgttcgggaaatatatcggaatactcgactgggaattggcacgcgattataacggcgattattactgcagggaaattgccgatgaggtaatagaagctaccgataaatgtatgaaaaacggctatgaccttaaatcgcgcagcgccaattgtattaaaaacataatggagggctttttggtaacggggctcggaatggcgtttacgggcaattcgcgcccggcttccggctctgagcacatagtagcgcatgtgtgggagcttgagagtgttgaaaggggcgaaaagccgaatcttcacgggcttgaggtctgcgagggtacaaggattatggcggaaatgtaccgtctgctttatatcgaaacggatgatgagcacttaaaatcgcttattgaaaaatatctgccgtattttgataagattgaagaattctgcaacaaaatggatatgccgaacgtcacaaccgattatgatacgatttataaggctataaagcgtgcattgggcctgcgcgacaggtatacgattttgttttatctgcgcgataagggtcagcttgaccgttatgccgattacgcggcgaagaaatttcttgaaaggataggctgatgaaaaacggttgttttgaaggaataaagcttttcctttttgatatggacggcacgctctacatcggcaatcggctcttcgattttaccgaagaattgctcgcgtctataaaaagagcggggaagagatatctttttattacaaacaattcttcaaaaagcgtgagcgcctatgtcgaaaagctgcaaaggctcggtattcgcgcggtaaccgatgattttcttacctcatcgcaggcgacggcttggtatttaaagaaaaattatcccgataaaatactttatgtgtgcggtacggaatcacttaaagcggagcttaaagataacggttttgaaattaccgaggataccgaaaaagccgagtgcatagtaatgggatttgacaccgagcttacctttaaaaagctcgacgatgtatcgaaaatgctttgtactaaggatttgccctatattgcaaccaaccccgattatgtgtgccctaccgaatacggcagcgtgcccgattgcggaagtatttgcgatatgatattcaacgcgacggggaaaagaccctttgttataggcaagccctcgccgcttatgattcggcttgcaatggaaaaggagggctgctcgcccttagaaaccgccgttataggcgacagaatttacaccgatattaaaagcgggctgaacgcaggcgcgctatcggtgcttgttatgagcggggaaacaacgcccgaaatccttgaaaaatcggcggataagcccgatattgtgcttgaaaacgccggtcagataatgtaaatcaatcaatatactgttaaaggactgctgtcatcggatttgccgatggcggcggtttttttatataatgcctgctgaacaattcaaaagtaccttaacccgagcatgtcggtataaacttttgaattgttcaggtgcaaggtttttgcgcaattttgcgaaaaaatcttgcactttaaaaagaatcacattttgattctttttaaaatcaggcgacaatcaatgga

SEQ ID NO: 4074 - DNA, 32759 bp, Unknown
  16S sequences of unknown bacteria
gtgtacgtcatttctggcattttttgcagagcaaatgcttgcaaaaaggtgaaggcccgaagggctgaagtggcgagcacacgaagtgcgcaggcacggaacaccgcgcaagcgaagcgcaggggcgcacgaaggccgccgccagtggcggaaacaggccgtagtaagcccaatgaagcagggagagccacaagcgagcttgcgagcgcagtggaacgaccatgctgaattgagggtcggtgcgaaacgtaaaaatgcattcccgtcccggtcgctggccgttggaggccgcgaagcggctggaggcgcgagcacacgcagtgcgcaatcgaaggccgcaaagcggctggaggcgcgaggacacgcccaaagggcgtccgcaacgccggaacaccgcgccgccgaaggcgagggcggtgcgcagcgccggaacactgggccgcctacggcggggcgcacgaaggccgcgcgctgtgcgcgaaacaggccgttgccgtcgaagccccgaaggggtgaaggggcgaggacagcgcgaagcgctccgcagccccggaataccgggccagcgaagcgcaggccggtacgaagaccccaatgaagcaaggagtgccacaagcgagcttgtgagcagcggaggccgcgaagcggctggagccccgaggacacggagcgaagcgaagtccgcaggggcggaacaccgcgcaagcgttagcgcagggcggtgcgaaggtgtgggacgaccatgctgaattgaggaacagtgcgaagacaagcggccgggtaatcctcgcccacaaaccaaaggtttgtcaacgatcagtggcaagctcaaaatttttgagcctgccactgtcttgttttccgtgtcacacccgcacccatgtacccggcgcggcaatggcctttagccccgtgccgcgcacggccataatccgcagggtttccgcgtgcggcacggccaattgcggatcgcggaagaacgccaccatgtgcgcgatgaagtgatggaaataatccgactttacctcgatgagcttcgcgcccgtttccatttccacattggtgaggaagggactcccgtgggcaaagccggtgatcgtggccttgcgcccatcggcaaattcaatggccagcgtataccagccctcgcccggcaggtacatcacgcgcgcggcatccgcgcccatcaacatcatcacgggttccaactggtggatggaataggtctcaaattcgttcggcccccaggtggaaatggccttgattccctccagcccctgatattcctccgcatagcgcaaggcggatgtggaatagcacggcgtatggctctcttcggcaatggcgaaaatgcgctgcgcggtttccaggtcgggcgcgaacgtcttatccacatacacgggcttgcccgagcgcagtggaagctggcagagctgttcgtgcatttcgcaattgtccggcgaaagcaccacgatggcatcgcaggcttccaccacctctgcgatgcttttcgcctgcggaatgcccatatccgcgcaccactgcgcgttcgtgcggccgccaatcgggctatcgatcaggccaaaggccagcgacacttccattgtcccgccggaggcttcccgaatccattggggataattgttcgcgtgccactcatccaaatagtaatccacaaagccaattttcatagatatcctctttctgccggtgcaaatccggcctgtattgcgcagtcgcgaaaaggtaccttttattccttttctttcaacgccgcctccagcgcgtcgatcacgatccccagcacctttaggcgggcatatttcttatccgtggactcgatgatgtgccacggcgcgtatgcggtggaagttttttgcagcatttcgttcacggccacttcgtatcgatcccatttttctcgattgcgccaatcctcatcggtgatcttccagcgcttttccggcgtgttctgccggtcgctaaagcgctcgagctgggtatccttatcgatgtgcagccagaatttgaggatcaccgcgccccaatcgctcagttccttctcaaactcattcatctcccggtacgcgcgcttccaggcgtcgccgcacaagctctcgatgcgctccaccatcacccggccgtaccaactgcggtcaaagatggcgatatgcccggttttgggaatgtggttccagaagcgccatagatagtgccgggaaagctcgtgtttatccggcgaagcgatgggcaccacctcatagccccggggatccaaggccgccgccacacgcttgatgttgccgcctttgcccgccgcgtcccagccttcatagaccaaaataaccggtatcttctggcggtaaatgcggttgtgaaggtcgcccaagcgactctgcgcctccttcaaacgagagcggtaatcgtcttcctccacctcttgctgcaaaaacacgtcgcacaaaagcggcatggacagcagcgggaatttttcttctgccggagcgcacgcggggcgttcccccgccagcgccgcgtcgatggccttggtgagcacgcgatagacttccagccactttgcgcgctcgctgccgtcgatgatgtgccagggcgcggcggcggtatccgttttgtccatcaattcatcccaagcgctggcgtattcctcataatgcttgttttcccgcttatcggctttggaaacgcgccattcggtatttttggaggaaagtagcttttcgaagcgctcgtcctgaatctttttggggatgtgcaggaaaaacttcaccaccaaatagccattgtccgaaagctgccgctcgaaattgttgatgctctgaatcctgcggcggtattccttgccgctaagcgcatcgtccatgcgattttgcaccgtttcgccataccagccggaatcaaaaaacacgaactgccccgcctcggggattttctggaaataccgccacaaaaagggatggcggctttcttcttccgtgggcggattgatggaaaacacgttgaaggaacgagggtcgatgttgagaatgatgtcgctgatcaggctgcccttgcccgcggccccccagccctcgatgagaaccacaaccggcaacttggcctgcttgatttgctgctgctgaatggtcaacctggatttcagcgcggagatttccgccttaatcgcagatttttcgctctcgatgggaacgcgcgccagtttttcaaacatgctctcacccctgctttgtaaattctgtctctatccggttgtttccattataaaccattttccctcggaaaacaatcatgaaaatgcgcaaaaacttttttggattttactagagaaaacatccttattgcataggcgcacctataaaagcattcccatccgcagcgcgccaaacagccgccgggccgcggcgtacgcaagcctttccgcttcccgcatggattgcgcaagcggcatgggcccatccacaattggcacaatcaagcgattctcccgctcttcaaacgcttggccgcccggccctatgccgcccaccaacgcgacaaccggcacattgcccgcgcgcgccgccacgccagccgccgccttgccaaacttgacggattgcccgtccatgcgcccttcccccgtaatcacgagcgcgcaatccgcgagatgcgcgtcaaagttcgccatttccagcaccacatcgatgcccggccgcatctttgcgcccagcacgccacccaatgccgcgccaacgccgcctgccgcgcccgcgccagggaaatccaccgtttcccgcccgagcacactggcataatgcgccatgccggcttccaaagcctcgaccatggcgtcatccgcgcctttttgcggcgcgtacacgcgcgccgcgccagattcgcccaggagcggattgctcacatcgcatagcaccgtaatttccaccgctttcaggcgcgcgtccagtccagaatcgtccagccgcgccactttgcccagcgaagcgccgcagggatacaactcccgcccttccgcgtccaaaaaccgcatgcccaacccacttagcagccccataccgccatcgttggtggcgctgccgccaatgccaatgcgcaatttgcgcgcgccgtcccgcaaagccgcgcgcatcagttcgcctacccccagcgtggtggcgcgcatggggtcgagcggctgcatctgcgtgagcgcggcgcactgcgcaagttcaatggcaaaggaaccatccgaaaggcgcgcgtattccgcccacagcggcttgccatccggcccagttacccgcgcgcgcttcttttcgccgcccaccgccatcagcagcgcttccagcgtaccttctccgccatcggcaatggggatttttatcgccacggcacgaggaaatcgttcctttgccgccttttccacaatgtccgccagcttcgccgcgctcaaagagcctttaaaagaatcaggggcgatcacgattttgctcaatagaattcacctctatctcgttccttaccttcattgtaccattgccgcccccttttgtaaatgcctttgcaccgccaaaaatagcggtcctctgcccgtatcctcatgggcagaggaccattgtaactcttaacttttcaaagcaaagatcagatgcctgcttccagcgctgccagattgcgctccatcaactgaagatagggaacttcctcgtcctcctctgcaggatggatatacgtgtgcaaaacaatggcttcttcttccccatccgaaagctccaatccatattcgcgtgcaaaatacgtcatggagccatcttcacaagaaatctttgttccttccaattgggctgtagcttcacgtatgcgaagatccatatcgctcatcgcttccacataagccgccacattctgctgatacaaatcattgtgttccgcatccatttcgccaaggatatccgctagatacgaagcgcagatcatattgtttactggaatggtcaagaaatccccgtcgccttccagcaaatccagcccatccgccgcaaagaggagccgcgctccttccacttctgccgcccaggaatcctgctcctgactcatgcaaaataggatatcggcgctttgggcatcttctgccgtagcctccggcatatacagcacctcgacatattcacccgaaatgctcttggccatgtcgtacaacggatacgccgtagccaccaggcacaattgagcctcgctttcttccgccgttcctgcctggaagagcgcgcccagcagtgccagcacgcaaaggcccaccgcgatttttttgcttttcatggtcgtttctccctgtttcattgctttttcacgcaatcgtgtcttcgcgcacatacaccgcgcttgccagcacagcggtttctacgccatcctgccggagaagcagtccaggcacaatgctcgtaatatcataagcgccaaactgcgtggcagcatccatgcgcacaaaacaaccttcatcgccattttgatccacagcctgcggattgagcgtaatgatataccctatcgcctcgccctgcaagtcttccagcacccattgcaaattttccgtttcaaataggctcatagggatatccaattccacattgcccatcacaaacttcaccagcgtaatttcctcttcctgccactgcacaagcaattcaaaggaaatgtgcagctgatacagcttatactcgcccatctcattcggttgcggcaaaatagaaagcaaattctcttgcaccgcgccagaggcatccaaaatggtttcgcgctctacctgatatggcacagcgtcattcatttcatcgaacacgatggactgaaattctcccatgctctcttcttccgccacttcttccttggtcggaatgctttcctggctcggcatagaaggttcgttctgcgacggcttttcctccactggcgcagcgctgtgatatgtgcgataggtattgccgcaccgctcgcaagtgtattcgttgtaattcgtatgcttttccacactatagttgtgcccaagagcgggaacctgctcagcaacaacgaacactttgccacaagtcgcacagtaaacgcctgctgtccgtccagggattgcacacgagggattgatcgccggttgcgttgtatagcgatgttccgtagctggcagcgtcttttcttccaccgcgccgcacaccgtgcacttgcgctgctccaaaccttctttttcacaggtagcggcgcgcacaagcgtccacgcgctccatgtatgcgctcccgtagtaggaggaatggtctcctgcgccacaagaattgctccgcacacagagcaccgcttaccctccgtcaatccttcctccgtgcaggtcgcagccttacccggcagaatctcttccacatggctcgccggaatggtttcctgcgccacgaggatttctccgcacacagagcactgcttgccctccgtcaatccctcttccgtgcaagtcgccgctttaccgggcagagtttcttccgtatggccgttcgccggaatggtttcctgcgccacaaggatttctccacacacggagcaccgcttgccctccgtcaatccttcttccgtgcaggtcgcagccttacccggcagaatctcttccgtatgcggaagctgtggtatagcttcctcttccaccttgccacaaccgccgcaaatccgcacctgtatgcccggcgctgtgcaagtcgcacttacgcgctcattccaattcccgaattggtgtcctttggccggaatcgcctcttcttccactctgccgcaaatgctgcaaattcgcacctgtacgcccggtgtttcgcagcctgctggcacgcgagtattccactggccaaaattgtggttgcaaacttcttcccccatggcgccaaagctcacagccaaagaaagcgtgatgagcagaagcgccaatatgcttatcttcttcatgctctacctccattttcgcagccatagggcagctgtatagcattggaagagtggcagcctgctcgtctacgcaggctgccaccaacgctacgcgaatttaataatcttcttccacgctatagctatcctggcagatactgcacgtataagttgcaatgcgcttggtgaagtccgcgttgaaactatacgataccgtataggaatgtcccgctaccggaatgatttcctgcgccacgagaatcgctccgcacacagagcactgcttgccttccgtcaaaccagcttccgtacaggtcgcagccttgcccggcagactctcttccgcatggccattcgccggaatggtttcctgcgccacgaggatttctccgcacacagagcactgcttaccttccgtcaaaccagtttccgtgcaggtcgcagctttgcccggcagactctcttccgcatggccgttcgccgggatggtttcctgcgccacgagaatcgctccgcacacagagcactgcttgccttccgtcaatccctcttccgtgcaggtcgctgccttgcccggcagaatcttttccacatggctcgccggaatgatttcctgcgccacgaggatttctccgcacacagagcactgcttgccttccgtcaaaccgtcttccgtgcaggtcgcagccttgcccggcatagtctcttccgcatggccgctcgccgggatggttgcctgcgccacgaggatttctccgcatacagagcactgcttgccttccgtcagaccgtcttccgtgcaggtcgcagccttgctcggcagactctcttccacatggccgttcgccgggatggtttcctgcgccacgaggatttctccgcatacagagcactgctcgccttccgtcaggccgtcttccgtgcaggtcgcagctttgctcggcagagtctcttccgcatgaccgctcgccgggatggtttcctgcgccacgaggatttctccgcacacagagcactgcttgccttccgtcaggccgtcttccgtgcaggtcgcagccttgctcggcagagtctcttccgcatgaccgctcgccgggatttcttcttccctagttgcaccacagaagcaggtaaaaatctttttgccagccgcagtgcaagtcggctccagcgttacaacgccttcatcccactcatgcgtatgatccagtaccggaattgtatcgcacccttccagaatcacaccgcacacagaacacactttgcccgcggttctgccttccgtttcgttggtcgcgggaatctccggtacgtctacaggcgtatgctggccttcgcagtcttcatagccttcaaaggtcgcgacaatggtaatggcgccgcagatttcgcacctgcgatagacgcaagcattgcccgccatgtcctccgaccactggtgttcggccagaatgctttctaccgtagaaacaccgcacaattcgcaggtcttgcgcacaatacccggagtggtgcaagtcgcttccttcagcacatgctcattccacacatgcgcttccggatccgcttccgtttcgtccgccgtgtagctgtctccgcagcgcgtgcacgtatacgtcgtgtagccgcccgccgcacacgtcggctccgtcacttccgcttcgtaatcgtgtcccagcgcttcttcgccgatctctggcggatattcctccaccttcgtcgcaccgcacacttcgcacgtgtacaacacgccagacgcatcttcgcacgtcgcttccgtatgcacgccttcgtcgtactggtgtcccagcgcttccgtgtctttctcttccgtgtagtcgcagcggctgcacttcagcgtatcatgcccgccttcttcgcacgtcgccgctacatacccttcgttctccgtatccagctgcaggtcgtgacccaaagcttcgctgcccgctaccacttccgtctcgccttcctggccgcacaccgtgcacttctctccgaccttcgccggttccgtgcacgtcgcttcgatcacgctctcctccatattgtgcgcgcccgtcgctgggatgacttcttctttctcgccgtcgcagccttccaccgtgcagtggtacaccatcttcccgtccgttccgcacgtcgcttcttctacgacttcgcctgcatcccacttgtgcgtcgccgtgatgacctggtaccctaggttcgctccgcaaacctcgcactcgtaccggccaatccccgtcgtcgtgcacgtcggcgctttcaataccgtccccagcaccgccacatgcgcttccggatccgcttccgtttcgtccgccgtgtagctgtctccgcagcgcgtgcacgtatacgtcgtgtagccgcccgccgcacacgtcggctccgtcacttccgcttcgtaatcgtgtcccagcgcttcttcgccgatctctggcggatattcctccaccttcgtcgcaccgcacacttcgcacgtgtacaacacgccagacgcatcttcgcacgtcgcttccgtatgcacgccttcgtcgtactggtgtcccagcgcttccgtgtctttctcttccgtgtagtcgcagcggctgcacttcagcgtatcatgcccgccttcttcgcacgtcgccgctacatacccttcgttctccgtatccagctgcaggtcgtgacccaaagcttcgctgcccgctaccacttccgtctcgccttcctggccgcacaccgtgcacttctctccgaccttcgccggttccgtgcacgtcgcttcgatcacggtcacttcgaaatcatggctatagaaagtaacatactcgatttttccacacgtcgtgcattcctgctttttgatgccagccacatcgcaggagccttctttcagcaccactacatccacaaatgtatggccgaaagccttttccgccttgctgatgccaagaagcagactatcttctccgctccccatcatctggccgcagcagttacaaatgtgggcgtacttcttgggttgctcacaagaagcttcctgataaaccacgcacttgaaggtggagtggcccccattgcacttctcgcattgcgcatcctcacacagcccgcatatcacgtactgatgcggaacaggacaatcgctattccattcattctctccaacaggctcttctgcatacacagccaccggcatcgcggtcaggatcatgcacagagccagaatacacacgaaaattcgccttttcatgccagccatcctttcatcagagcatagaccgcccacaacacaccgctaaacgcactttctacgtgccaacggcatcccagaagtttgtgaaaaatgcctttttcccgctcctgcaatggcaataaagacggcagagacccttctcacctcctcatcatgctgccgcaagcaccagcacaagccgccttttcgttggccacacaactgtttacccgttttttttgatgcaattctcgcaaactactcaattgcacttagagtgtgctgcacccgttaaaacatccaggcatagcttgcaaatgccttgtggatgtcgtagaatattcaatttgcgacgcgcgcacaaagcttatacttcctgatctttttggtctttagcgcggcttatgacggcctaaatctcgataatgcatacgcgattttgccaattgctgaatggctttgctctgttgctttgccaagctatgcgcataacagtccagagttgtttttacagatccatgccccatcaacacactcacggtttttgcatccactcccaattccaacaggcgcgtagcaaagctgtgccgcaagctgtgaaagtgcacattggagagttccgctcgccgcgccaatcgctcaaattgacgctgcaccgttcgtggttctgccgcatgtccatctgtgctgaatataaattccgctacacttccgtctctcgtctgttccagccataaatcatgcaatttctccactaagaatgcagggacaggaatggtgcggcgcgaataacgcgattttggcgttcccacacacagcgccgttttggggccacagttccgattttggcgtttcaagcgttgcactgtgcggcgtaccgcaatcatgccattttcccaatcgatatccgcccatttgaggccgcaaatttcccccaggcgcatgcccgtgtacattcccagccaagcgggtaaagcatgcgtatcgcgcaataccgcttccaacttgttctgttcctctcgggttaaaaccctctgttcccggcaatcgcctcgcggcacacgaatctttttgcatggatttttttcaatcaatccctcctcccatgctgcctgcaatccagcgactagcaagcgatatacgccgcgaatggtgttctctgataaatccgcctcctgcaattcctgcagaaaagtatggattgtatttggcgtgagctcggccaattccaagtttcctaggcgcggtaacacatgccggttcagttgattttgataggtttgataggtagagtcctttacactgccaagcaaagcattttccagccagaatagcatccatttttttactgtatctccccgctgcctccctgcttgccttccttgtcgcaacaattctgctttcttttgaatcaaacgctgctgaacttctatatagtgatggccaaaaacatagccaaatttcgttttaccattcgccttcttgccaatcacataacgcccttcaaaacgaccatctttgcgtcggtagatattttctccatgccgtgccacaaacgtatccccctctcaatcttttgcgatttccatcatgctgcagtataacactttatattttcatgacggctttgacggcttaaagttttcattttacgcagtcataatatattatactatcataatttgtttaatttacatgttagaaacgtcacaataatccattacaaaatgcttaaataacaaataaattcttttccaaccgcttgcacttccttccagattgtggtatactacttcctgagtatgggttcattatcgcgtgatcccatctatcccagtggaatattcgcaaattgaatattttgcgacaaaattttgtaattcacagattttatccgcaagatgcttcgtgcattgcttgcggatatttttcgctatccattcaaatttttagttgtaaatagaaagaaaaatataatatcaaaagcttaatagaagtgcggaccgccacatttttcagcaatatactgcgcatttacatgcaattttttataatagatgcgcctattttatgggtttacaaaaagcaaaatagcacggcccatccaatgcgatgatgccgtgccacctatcaatttcacaaatcagcgccttagcttttgtgcggcggattttctatggaaccaataccgtctttatgttgcgccgcttttccatatccgaaaacgcggcattaacctcttccactttgtacttcgccgccagcgcaaggattttgcccagaagctccggatgcgcttcgaggaaagcgagataggcccgcacatcaccgaatgaatactgcgacgaaccgatgatgtgcaacgccttgaaggtgatgctctccggatgaatggcgaccgtgccgctgctggaatactggcccggcacaagatatacgccgcgattgcgcagcaggtcgagtccctcggcaaaggcggatggtgcgcccgacgcctcaatcgccaaatccacccccagcccgccggtttcgcggagaatctccgcgttgattgcctccgccgcctgtgaagacagggcaaacacccgctccgcgccaaactcgtgcgcaatccgttcgcgtgcctcgttccggccagaggtgatggcaaacactcgccggatgccaagcgccttcaaatatagaagagaatacagtcccacgggcccaagtccctgcacaaccgcgctctcaacggtatccagttcgattccagctttccgcgccagggcaaaggcgtgcatggccgtgggccctgggcaggcgaatacgctcaccgccactggatccaaaccatcgggaatcttaatcaggttggcaagcggcgtaaaattcacttccgcataaccgccgtatagatagggcggcttgccgatatccccgccgttcgtcacgcccatgcgaacgcagttggcatcgtcgcctgcgcggcagagcttgcactcaccgcacggcgccgcgatatcggcgatcacggcatcgcccgccttgaggccatatgtctccccactggcgggattcagcgcgtcgagcctaccgacaaattcgtgcccaatgatgctgggcgcgggcgcatcgagcaagccgcgccaaatgtgcaaatcggtgccgcacacgccgctggcgatcaaccggcaccgcccatacccttccggcggcgcgacaacgtcgaactcgcgcacctcaaaaggtttcttcgcgcccataaataccgctgctttcgctttcattgtatttcatcccttctttgaattatgtgttgaaaaccgtcaaccgccaaccgtgacggcaaaatgctcggcatacgccgccactgctgccgcgatttccgcgcgcgtgggcggcaacacgtttttatatggatattccagcccgagcgcggcatacttcgcgctgccgagccggtggaatggcaagagttcaacgctcgtcacccgtgctttcagcaatggctcgctcatcgccgcaatgtactccggcgcgtcatttaggcctggaatcagcgggacgcgcacccgcacgcgctgtccatccgcaaccaaccgcgcgagattctcgtatatgcgaacgggatttccgccaataacgcgttcatactccgccgggcaggctttccaatcgtaaaaatactccacgcccagccggttgagcggcgcaaaggcgctgtagggaacgtcccccgccgtgtcgatcaccacggatatgcccctctctctgagccgcaggcaaagttccgccgcgcccgccgcctgaagcaaaacttcgccgcccgaaagggtcgcgccgccgccgctctcgcgatagaaatccacgtcccagaggatttcctcaagcacctcttccaccgccatccaccggccgcaaagccgttcgcgattgccttcgcgcaatctctgcgggagggatgaaagagtctctggattgtggcaccaaggacaacgcaaattgcatcccttgaagaaaacggtggtgcgtatgccgtcgccatcgccggtggaatagtgctgaatgtcggagatgttcagccgggtttcccccgcggcgtacatgccgtccatgggctactcctgctgcgtgcggctcagaatgtcgagctgcacactgcggtcgagcgtgacgaaaaaggcggaaaaacccgatacgcgcaccacgaggctttggtattgttcggggtgttccatcgcgtcaagcagcacctcgcgcgatgtggaattgatttgcatctcctgcccgcctttgcggaaatacacgcggagcagcgcgcggagcttatcgcggtttttgccttcgaacgcggaaggcgtgaacttttggttcactaccgtgccgcaggccactttggtgtaatcgggcttggtaacgctgttgacgacctcggtaacgccatggcggtcgcgcccataggtgggagacgccgcatcggagagcggctcgcccgcaagccgtccatcgggcgtagcggcgatttcgcgccccgcccaaatattgctcgtgtttgccgccatcgcgatatagattctgccgccgtcgtgcgtcctatagcgcgaaaacaaaccatataggaaatccacaaaccacacggcatagcggtccacgaacgggtcgttgttgccgtatttcggcgcggcgagcaatttctctcgcagcgcctcgtaccctgcgaaattggcccgcagggcatccgcgagctcactaagcgtggccgcgcggtcgcaaaacaccactttatcgaccgctgcgagcgaatcgcaaaccgtgcccacgcccatgagcgccgcaccgtgtaccgagggatagcgcgcgccgcccgcgttgatgtccaatccgcgctcgatacagtcctcgcaaaaacaggacaggaagggctgcacgtattccgcgggattgtagcggcagttttcattgttgaacagggcaaaatactcttccgcgccatattccagttgcgtctcaaagcggcgcataaattcttccatcgtttcaatcgtttccaccgggcccgtatcgatcccgaccgacggatggtggatgcccttgccgcggttgaacaaaaactcaaaaaagcgaggcgtgtcaaagcgcccgtcgctccacggcggctgcttgccaggaagaaaattttcgatgcagccgaccatgcaatacgcatagacgtcctcatcggcatatccacagcgctttaaagcggcgatgttgacctcgtcgttcatcagcgcgggatagcccaagccggtgccaatgacctgcaggcattcatccaaaaaatcgtccggcgtgttggccgcaatgcgcgcggaaaggttgggcccgggaatctggcattccttaacggcacgcaagacgatataagaaagcgcgtttccatcgttgctgccatccgggcttgtgccgccaatgcaaatgttgacaacatcgtcgtcccccaggcaaacgcgcctctcataaatcttgataaaggtgttttcgagcagttcttgcgcgcgctgcggcgtaagccggcctgcggcgacatccgcctgataaaacggatacaaatactggtcgatcctgcccagcgccatcgcgtagcgttcctccaggcagaagccaatgtggcaaaaccacaccaactgcagcgcatcggcaaaactcgcgggcggatggctggcaagccaacggcaacgcgcggcaatttccgcaagccgttctggcgaatagccctcgcagtcctttaagcgctccgccgcgtccgcataatggagcatcatggcgcgcagcgcgagcagcgtctgccgcatagcggcgaggtattccacccttgcgggttcttcgtgccgcgccatcgactcttctatggcgacaaggaggcccggcacgcccagttgcacaacgcgctggtaatctggcgcgaaatgatccgcattgtgggcaaaaccgcgcctgccaaaactcttgcaaattgtggcggcatattccagttccaccggatcggcttccaccatgagtgggcgtatgctgcccacaatccaatcgtttcgatatatatagggaaccgtacgcgtgaagagcgcctcagtagcgttcgcgcgcgcctccggctttttcgcgcagaggcgcttgcgatagccaagatactggaaatactggggcgcgtagacgccggacggcttatcgtccagttcgcgctttagtagcagcgtagaatgcattgcaatcccccattcaaatgcgccaatggcgttttcttaagcctagcgccagtatacggcaggccgcgcgataaggcaattgccggaattcatatatcttgacaaaattcagccaaaatgctacaatgtccttgtcaaaccaaagcagcgcggcgattccaggaggatgggcatgaagtatatcgagcctttgggcatcccggagatccagttcgcccacatatgcggcgcggattgctatgaagccacgctgcccgcacgccccagcacgctggaagtgacctatatcaaccgcggttcgctctgcttagagcagagcggaacggcctgcgaagcgcgggagaacgatatcatctgcaatttttatcaaagcgatttgcatgtgtatagttccggctttcaccgacaccatacggtctgtttccacgtatcctttggcgaagcgcgcgattccggcgttcccggcctgcgcatccaccatctgccgcttctgctcagtgccgcgaataccagccgcgcgcgggaactcatcgaccgcattatcgaggaaaatacgctctggccgcagaaccgtttgtcctgcgcgggtatgtttctggcgctgctggaagcgctcgaccatgcgctcaacccgcccgaatccaggggccgggaatccatttatgtggcaaaagccaaaaaatacatcttcacaaatttaggatttcccattcaccagcgcgatattgccaaccaccttggcatatcgccgcaatacctgtgcgacatcttcaaaaaggcggaaggcatgccgctcatgacctatatcaaccgaatgaagctcgataagatacggcaactgatggccaacgagcgcatgcatttgaagaacgcggcggcgatctacggctatggcgacccaaactatgtgagccgcatttacaaaaagtactatggcaagaacatcaccgacggcttgaactacaacgaaacgcaaaaagaaaaggcttaggaggaaacggccatgtcgtatcaggatggctgggcggccttaaatttggaaatgcccgaccgcgtgccccgaacggaatattccgtggacggataccatttcgcgctgatgcgccgcgtaaccggcattccggtcacagcggaaagtcccgcgcaggaacgtcttcgcgccgcgcaggcgttccgcaaggcgtgggcctttgatttcgcctggtccaccctgattgccaaccagatttacaaggggttttgcaccaacatgggccatgcgagctatgccgccgccggcagcgactatgacgacgcgctgtactgcccatttgaggatccggaggacgtgctggcctttgatccctgggaggcgtatgggccgatcgatctggcggacatgacgcgccagtttgaggagcactaccgcgccaacgccgccgcctatccggatgaggtgaacatgaccggcatttacaccacactgatgtccggcctgatcgccgtctttggttgggacatgctgctgatggcctgcggcatggacgggcaggcgttcggcgaaatggccaaccgctacgcgagctggatgcagcaattcatgcaggcgctggccgaagcggacgtgccctgcgtgatgatccatgacgacatcgtatggacgagcgggccgttcatccacccggactggtatcgcaaataccttttcaccaactacaaaaagtactttgcgcccattctggaaagcggcaaaaagctgatctacacctcggatgggaattacacgcaattcattgacgacatcgccgccaccggcgtgaatggattcgtgctggaaccctgcacagacatgcgctacatcgccgaaaaatacggcaaaacccacgctttcatcggcaacgccgacacccgcatcttgctttccggcacgccggaggaaatccgcgcggaagtgaagcgctgcatggatatcggcaagtcctgccccggctttttcctggccgtgggcaaccacatccccgccaacacgcccgtggaaaactgcctgatttacgaggaagcctaccgcgaaatgtgccagcggcggtaagacgacaaaaaacgaagccctccgaacgccgcgcaaagcgctcggagggccatctttttgcgattgggaaaaccttacgcgaaatagttcacggcgctggcgaacatgccattgtcccgcgcgcccggcacattgacatacaggcccgcgtcgttgcgctcggcgtgcgccatgcggccaaacaccctgccatccggggaagaaatgccctccaccgcgaaggcggaaccgttggggttgtgcggcacggccatggtgggattgccatcttcatccacatattgcgtagcaatctgcccgcgcgctgccagggcggcaaactgctccggcgaaacgataaagcggccctccccgtgcgaaatcggggtgatgtggacatcgcccacttccgtgtgcgccagccagggcgacaggttcgaggccacgcgcgtgcgcacgatgcgcgactggtggcggccgatgatgttgtacgtaagcgtgggcgcgtcctcatccggctcgcgaatctcgccatagggcaccagtcccagctttatgagcgcctggaagccgttgcacacgccgccgatcaggccgtcgcgcgccagcaaagcggccacgccctgcgccgcgcgcgggctgcgcaaaaacgcggtgatgaacttggcggagccatccggctcgtcgccgccggaaaaaccgccgggcaggaacagaatctgcgcgttttcgatgctgcgggcaaattgctccacggattcggcaaccgcctgcgcgctcaggttgcgcaccacgaggatttccgcctgcgcgcctacgcgttcaaacgcgcgcgcggtatcgtattcgcagttggtgcccgggaacgccgggatcagcacgcgcggcttcgcgaccttcgccgcgggttttgcgcggcttttcgtccggtaggacacggcctccggcgctgcgcccgccgggggcaggttgcaggcatacacgctttccagcttgttttcatacagcgcttccagttcgtccatggaaatgccgtccatagcgtattgcgccgtggtttcgcccagaagctcgccgatgttgcccgcttcgggcgaaagctccaccacaaacgcgccgggcatgggctggaaccattcttccttttcttcccggaaggcaaagccgatgcggttgccaaggcccatcttaaacacagcctcggccacgccgcccagccccacggcccaggcggaaacgatgtgccccgcgcggatttcccgggttacgagatcgaaccgcgcggcattctccccgccgcgcaccagcgccacacgcgcgccgggccgcttgaattcgggcgaaatcacatcgccattttcgcacacattcacggcgaaggacaccagcgtgggcggcacgtcgatctgctcaaacgaaccgctcatggaatccttgccgccgatggccgcaatgcccagttccagctgcgcgtccagcgcgcccagcagcgcgcccagcggcaggccccagcgctccggcacgccgcgcgtgcgcgggaaatattcctggaacgtcaaatgcgcgttccgccagcccgcgccgctggccaccagccgggccacggactcgatcaccgccgcgtaagcgccgtgatacgggctttcttccgccaggaagggattgaagccatacgccatggcggaacaggtgcgcgtgctgccgtgcagcagcggaatccgcgcggccatggcctgcgcgggcgttttttgccgcgcgccgccaaagggcataagcaccgttcccgcgccaatggtggaatcaaagcgttccgccagcccgcgccgcgagcacacgttgagatcgctcaccagcgcgcgccagtccgccgcgcggcgctcgcgcggtttgggcgcccgcacatgcgcgtccgcctgccgcgacgcgccattggaattgaggaaatcgcgcgaaaggttcacgatctccttgccgcgccagcgcatggtgaggcgcttttcctccgtcaccgtggcaaccggcgtggcctccagattttcgccatccgccagggcgataaaggcatccacatcttcgggcgcgagcaccacggccatgcgctcctgcgattcgctgatggccagttcggtgccatccagcccttcatatttcttgggcaccttgtccagatcgatggacaacccgtccgccagttcgccaatggccacggaaacgccgcccgcgccaaaatcgttgcagcgcttgattttgcgcgtggcctcgggattgcggaacaggcgctgcaatttgcgttcctcgggcgcgttgcccttttgcacttccgcgccgcaggtggtgagcgaggacatatcgtgcgatttggaggaacccgtcgcgccgccgcaaccgtcgcgccccgtgcggccgcccaagagcacgaccacgtccccgggcgcgggcgtctcgcgccgcacgttttccgccggagccgccgcgatcaccgcgccgatttccatgtgcttggccgcgtaaccatcgtgataaatctcgtccacaatgcccgtcgccaggccgatctggttgccataggaactgtagcccgccgccgccgtggaaaccagctttttctgcggcagcttgccgggcaacgtctgcgaaaccgggcgcaggggatccgccgcgccggtcacgcgcatggcctggtacacatagccgcggccggaaagggggtcgcgaattgcgccgccgatacaggtggccgcgccgccgaagggttcgatctcggtaggatggttgtgcgtttcgttcttaaagagcagcagccatttctgcgtttctccgtccacgtccacatcgatctttacggtgcaggcgttgatttcctcggattcgtcgaggtcggtgagcttgcccgtctttttgagatatttggcgccgatggtcgccacgtccatcagcgtaacgggcttgcgcacgcccatcgccgcgcgcatggcctgatagcgctcaaaggaagcctgcgcgtccgcgtcgtcaaaggaaacgtgcgcaagctccgtcaaaaacgtggtgtgccggcagtgatccgaccaataggtatcgatcatgcgcagctctgtgagcgtgggatcgcgctgctccgagcggaaataggcctggcagaattcgatgtcgttctcatccatggccagcgcgtattcccccaccaatgcgtgcagcgcctgctcgtccaggtggacaaagccctccagcgtgcggatgtccgccgggggcgcgagcgggtcgaggagcgtttccggcaaatcgagcaaagcttcccggctctccaccgggttgatcacatggcgcttgatggccgccaattcatcggccgtgagatcgccatagagcacatacagccgcgcggttttcaccaccggccgctcgcactggaaagccagctgcatgcactgcgcggcgctgtccgcgcgctggtcgtactggccgggcagatattccaccgcgaacacaaaatccccgtcgtgcgggtaatccgccgtggcgttatcgagctgcgcctcggaaaaaatggtgcgcaccgagcggtcgaacagatccttctgcgcgccctccacatcgtagcggttgagcaggcgcaggcctttcagggattcaatgcgcaaaaacgagcggatatccttcaaaagcgcatcggcttccagcgcgaagccgggctttttttcgacgtatacgcgatacaccatgggcttatccctcctttgcccgcagcgcgcgctggccgatgtccgagcgcatgtacgcgccctcgaacgttatgccgcgcgcggccgcgtaagccttttcaatagccgcctcgagcgtatcccccaccgcggtggcgccgatcacgcggccgccgctggtgacgagcgcgccatccggccggcgggccgtgccgctatggtagtagatcgcgcctgcgctgggggcaatggaaatcgccttgcccttttcataatgcgcgggatagccgccggacacgaccattacgcaacaggcgcattcctgtgaaaactccaccggcacttccgccagccgttcttcctccacggcctggaagatggtgagcagatccgtctttaagagcggcagcaccacctgcgcttccgggtcgccaaagcggcagttgtattcgatcaccttggggccgtctgccgtgagcatcaggccgaaatacaggcaacccttgaacgtgcgcccttccgcgttcatggcgcggatggtgggcaggaaaatctcttccatgcagcgcttagcaatggcgggcgtgtaatagggattgggcgcgatggtgcccatgccgccggtgttgaggccctgatccccgtccaacgcgcgcttgtgatccatggaggaaaccatgggaaccacggtttttccatcggtgaaggccagcacggaaacttccggccccgtcaaaaattcttcgatgaccacgcggctgccgctggcgccaaaaatcttttcctccataatggaggcgatggccgcgcgcgccgccgcaatatcctcgcaaatgagcacgcccttgcccagggccagcccatccgccttgacgacggcgggataggggcaggtctccagataggccaacgcttcggcgctggaggtgaatacctggtaccgcgccgtaggaatgccatatttgcgcatcaggtccttggcgaaaaccttgctgccttcgatcgccgccgccttcgcactgggaccaaagcaggggatgcccaacccgcgcaggcggtcggccaggcccagaaccagcggatcatcgggcgcgatgacggcgaaatccaccgggttttcccgcgcgaaagcagcaatgccgtccagatccgtggcggcaatgccggtgcacaccgcgtcctgcgcaatgccgccattgccgggaagcgcgtaaatggtttccacccgctcattttcccgcagctttttgatgatcgcgtgttctcggccgccgccgcccacaacgagtatgttcatgcccttttctcctcctgctttagtgatggaacaggcgaacgcccgtgaacgccatggcgatgccatatttgtcgcacgcggcgattacgttgtcatcgcgaatggaaccgcccggctgcgcgatataggccacgccgctcttgtgcgcgcgctccacgttatcgccaaaggggaagaacgcatcgctgcccagcgccacattcttcaggcccttgagccattcgcgcttttcctgtgcggtgagcggctcaggccgcaccgcgaaatactgctgccacacatcgtcgcccagcacgtcttcccactcctcggaaatgtagacgtcgatggtgttatcgcggtcaggccggcccataccctcgcggaacttgagcgccatgaccttgggatgctgccgcagataccagcgatcggccttatcgcccgccaggcgcgtgcagtggatgcgcgactgctggcccgcgcccacgccgatggtctggccgcccagcgcatagcacacggaattcgattgcgtgtatttgagcgcaatcagcgcgatcagcaaatcgcgcatggcgctgtcgggaatctctttgttggccgtgggccggttttccagcatggaggcttgcaactggatatcgttgtgcccctgctcgaaggtgatgccatagcacatcttgcgctccagcgcagcgggccggtaagcgggatcgatctccaccacgttgtaagcgcccttgcgcttgtttttgaggatttccagcgcttccggttcgtagccgggcgcgatgatcccatccgatacctcgcgggcgatcagcttggccgtaggcacatcgcaggggtcgctcagggcgatgtaatcgccgaaggaggacatgcggtccgcgccgcgcgcgcgcgcatacgcgcaggcgagcggagaaagcgcgtcgccctttggcacaaaatagatcttgcgcagcgtttcatccagttccacgccgaccgccgcgcccgcggggctcacgtgcttgaacgaggcggcggcgggcagacccgtggccgctttcagctcgctcacgagctggtagccgttgagcgcgtccagaaaattgatataccccggccggcccgaaagcaccttcaccggcaattcgccctcttccataaagatgcgggcaggcttctggttgggattgcagccgtatttcagcgcgagttccttcatcgggccgcggcctcctttcgcttgttgaagatgcgagtttccccgcccacacgcacgaacagcgcgaccttattgtccgcgtcgagcgcgtcccagatgccctgaccgatttcttccgcgccgccaacgagcgaaacggattccggctcgcccacgaacgacgggatgggattgccgtcaccctggtaggtgtgcaggtaatggcccacgctccaaaccggcgcgtactcaaagaagaagcgctggcaggtttcgccttcccgcttgaggatgctcattttgtgcgcgccattgcccttcatcaggcagctgatgcggggcgtgtagttgggcgcgtccggctcgtattcgcgggtgcgcagcgcgtcctcaaacgtgccacccgtggccaggaaatcgtaaatcgtgtccgtctggtcgccgttggtgacgatggtgcggtcgccaaacgtgcgcacggcggaataaatgatcagcgagggatcgaccaccgccgaaggatccgccgcctgcgtgcgcaggccctcaccctcagccacgaaaacgcggttgcggctgttctcgctgcgccccatgatgaaatagacgagcaccttctcgccccgctcattcatgccggccacgatgccacggccaggatagctgaccgcgcccacggcctgaaataccgtattcatagcgtctcttcctcctctgcccactggcaaaccatgtccacggcggcgggaagcagcttccactccgcctcttccatcacgcgcttttgcagggtttccggcgtgtcccccggcagaacgtccaccgccttttgcaacagaatcggcccctcgtccacgccgagattcaccaggtgcgccgtcgcgcccgtgaccttcacgccgcgcgcaagcgcggcctcgtgcacgcgcaggccataataacccttgccgcaaaacgaggggatcagcgccggatggatgtttacaatccggttttcataagcggaaacggtcttttcgcccaaaatgcccagatagcccgccagcgcaaccacctggatgccgcgcgcgcgcagcatttccagcagcttttcatcccggcggacgggatccggctccatcacgttcgaaagcacggcggtttccacgccgcgcgcgcgggcgcgctccaacgcatacgccgccttgcggttggaaagcacaaaagcgattttcccgtgctgcaggttcgcgtcgagcagagcctgcaaattcgtgccgccgccggaaacgagcaccgcgacctttactcgcatagctcaatgcctccgtcgcccttgaccagttcgcccagcacataggcgtccttcacgatggaaagggcggtatccacatcttccttatctacgatcaggcacatgcccacgcccatattgaacgtattgaacatatcgcgctcgggcacgttccccgccttctgaatcacatcgaaaatgggcggcgtgcgcacggccttcttttcaatgcgcgcgctcagcccagaaggcaggcagcgcggcacattctcataaaaaccgccgcccgtgatgtgcgaagcgccctttacttcgatccgctccgctagcgcgagcacgggttttacatagatcttcgtaggcacgagcagcgcctcgcccagcgtggcgcccagttcttccacatacagggagcggtcgggcaacaccttgcgcaccagcgaaaagccattggaatgcacgccagaggacgggagcgcgagcaccacgtcgcccgcgcgcatgtgcatacggttgaacaagcgcgatttgtccaccgcgcccaccacaaagcccgccaggtcatactcctcctcgggataaaaacctggcatctcagcggtttccccgccgatcagcgcgcagcccgcctgcacgcagccctcagccacgccggaaacgatggcggcgatccgctcgggcacgtttttgccgcaggcgatataatccaggaaaaacagcggcttcgcaccgcagcaaaccacgtcgttcgcgcacatggccacgcagtcgatgccaacggtatcgtgcttatccagttcgaaagcgatcttcagcttggtgcccacaccgtccgtgccgctcacgagcacggggcgggtcatgccggtaagatccagctcaaacaggccgccaaagccgcctaggccttccagcacgccaggcgtcatcgtgcgcgcgacgtgctgtttcatcagttccacggcgcggtagccagccgtgatgtccacgcccgcggcgcggtagctttcgctgtggctcttcattccccatcctcctccagttgggtttcgaagcggaacttgccgggattgctcggcggctcgcagggatatttgccatcaaagcaggcggtgcagaaaccgctggtgttatcgcacagcttcaccacattttcgcagctcagatagcccagcgaatccacgccgatgatcttggcgatctcttccacggtgtggttgttggcgatgagcttgtccgcgctatcgatgtccgtgccgaaatagcaggggtacttaaagggcggggcggaaacgcgcatgtgcacttccgtagcgcctgccttgcgcagaagcttcacaatggggccgctggtggtgccgcgcacaatggaatcgtcgatgagcactacgcgcttgcccttcaccgtggacgccacgggattgagcttgatgcgcacgaggttctctcgatccgcctgcgaaggctgaatgaacgtgcggccgatatacttgtttttgataaagcccagaccatagggaatgccgctctgacgcgcgtagccgatggccgcgtcaatgcccgaatccggcacgccgatgaccacatccgcctgcacgggatgctccagcgccaaaaatgcgcccgcgcgctgccgcgccacgtgcaccgaggaaccgtcgattacggaatccggccgcgcgaagtagatgtattcgaaaacgcaggacgtcttaggcgctttcccgcagtgctcgcgcaaggagcgcacgccattcttatccgccaccacgatctcgcccggctcaatgtcgcgctcgaacgaggcgccaatgctgtccagcgcgcagctttcgctggcgaacaccacggagccatccggcaatttacccatgcacagggggcggaaaccgcgcggatcccgtacggcgatcagcttgctgggcgaaaggattaccagcgaatacgcgccttccagttggttcatcgcgcgggaaacggcttcctcaatgctatcgcacttgaggcgctcgcgggtgatgagataggaaatgacctcggtatcgctggtggtgtggaaaatggagccttccaattccagcttttcgcgcagattcaccgcgttggaaagcgcaccgttgtgcgccagcgccagcgcgcctttgatgtggttgaccaccatgggctgcgcgttcagccgcggattcatgcccatcgtgccatagcgcacatggccgatcgccatgcggcccatgccgatctcattgagccggtcgctgttgaaaacatcgttcaccaggcccagttccttgtagcaatggatcacgccgcggtcgttcaccgcgatgccgcagctttcctggccgcgatgttgcagcgcgtacagcgcgtaatagcaatcggaagcgacattgctccgttcgcggcggtaaatgccaaatacgccgcattcctcgtgtactttatcaaacatgcagtttctccttattcgcccagcaaccggcggaggatctcgtgatacgcgtcttccacgccgcccagatcgcggcggaagcggtccttatccagcttttcgcccgtctttgtatcccagaagcggcaggtgtccggcgaaatttcgtctgccagcacgatggtgccatcggccgtcttgccgaactcgagcttgaaatcgatcagttcaatgcccagatcgtgcaggtactcggtgaggatatcgttgatcttcagcgcgtattcgcgaataagggcgatctcctcttccgtggcaaaacccatggccagaatgtgcgaatcgttgatcatgggatcgcccagttcgtcgttcttatagcagaattccagcaccgtgctcttcagcttcgtgccctcaggcaagcccaggcgcttggcgagcgaaccggcggcaatgttgcgcacgatcacttccaggggcacgatggtcactttcttcaccaacgtttcccggggggaaagctccttcacgtagtgcgtgggaatgcccttggtttccagcatgcgcatcaggtgattggtcacgcggttgttgatctcgcccttgccggcgatggtgccctttttgaggccgttgaaagcggtcgcgtcgtccttataatccacaatgtacaaattttcgtccgtcgtggcgaatacttttttggccttgccctcatacagctgctgcgttttttccatggtaatcacaatcccctttccctattcaaactgtgcgcgcaccgcgcgatccttttcagcgatcttttgcttcatttcctcgcgcatgcgggcgagttcctccgccaggcgcgcgtcgcccagcgacaaaatctgcgcgcacaatagcgccgcgttctgcgcgccatcgatggccacggtcgccaccggcatgccggacggcatctgcaccgtggaaaggagcgcgtccaaaccatcgagcgtggacgatttcaccggaatgcctaccaccggcagcgtggtgttcgcggccatcgcgcccgccaaatgcgccgccttgcccgccgccgctacaatgacgccaaacccgttcgcgcgcgcagttttggcaaattccgccgcgatttccggcgtgcgatgcgcggaaatcacgcgaacttcaaagggaatgcccagcttttccagcgtttccgccgccgggcgaaccaccggcaaatcgctgtcgctgcccatcacaatggcaactttcaacattgcaaagcgcctccgtacctcatgaaatcaggaaccactgctattatagcgcgaaagtcgaacatttcgcaaggtattttgtgtgattattcggaatttaatctgcgattgacagttgtgtaccgtctctgcccagccgcctattcgtataaaaaccattcccgcgcctgctcgccaaacgcctttacccgcggcgcatgcgcggcgatcaactcgcgcgcgctcatcccccggcgaaaagcgtccgtgcccagcaaatgatcgatgtgccatccgccgtcctccgccggagggagccaggcgaatcccgcctggcgacgcgcttggtcgagaaggtacagccctgtcgcgaaaggctggtaaacgcgcgcatctgtgacgtgcaacatcaacgcgttcacattttgcccggcgaatttggagaaggtgggcacaaacacggcccgccggaacaacacgcctggaagctggagcgcgcgcatcgcggccgccaattccttggtatccagccaaggcgcgccaatccattgaaacggcgtggccgttccgcgcccttccgaaaggtttgtgccttcgaaaacgcaggtgccaatatagctcagcgcgctttccagcgtgggaatgttcggcgaaggcggcacgaacaccagccctgtatccgaatacagcatgtttcgcgcgtagccttccatggggcaaacaaaaagatcgagatcaagttgcaagtgcgcgcggacgaagcgggcgtattcgcccaccgtaagcccatagcgcgtgggcatagcgtattcacctacgaaggaatggaacgcttcgtccagcaacgtcccctccatcgcgccacccagcggattgggccggtcgagcaccacgacggttttgcccgccctggcgcaatcctgcatcgcgtaagaaagcgtgtacaaataggtgtaaaacctagcccccacgtcctgaatgtcgtaaaccaaaacgtcaaacgcgtccagcatttgctgggtcatccgccgcgacgcaccatacaggctgaagacgggaacgcccgtttccgcgtccacttcgctttccacatggccgcccgcctgcaccgcgccgcgaatgccgtgttcgcaggcgaacaacgcgcgcaaatcgtatatttccgccaaaatgtccaccgtggcccgcagccgtccatccacacccgtgggccctgtgatcagccccacgcgccgccctcgcagcagcgtctgcgcgcgcgctagcgtttccacgcccaacacaacccgccttgccatccacatccgcctcccattttttgttttcgcgcggtttttcccgtcagcaaaccccggaactcccctcttgcgccttcccttatgtgaaaattcgcgaaggaattgtgatttcccttccaaaccgtcaaatattgtgatatactatagcatggttcagaaatcgcaaaggcaaagtgcgtatagggggtcccatcgcgccgttcatgcagccgcaaaccatggcggcgccaatccatccgcgcgctttagaaagttgaggtgtaaacattatgatgcgttcaaagcgattgatggagcgccttgcggcacgcggcatttcagcggcactcattcacaagcgcgtgaatatgcgctaccttagcggctatacaggcgaaggttgcctgctggtgacggatgaagggatgacggtcttcaccgatttccgctatgtcgagcaggtttcccgccaagcgcccgagagccggtgcgtgcgcacccgcaacgggcaggaactgcatgccctggtgcgcgaagcgttgggcgggcgccaatcgctggccattgaggatgatttcctttcgcataaggaatattgctatttcgcggataacctgccgggcgtcgcgctgcattccatggagcgcgaggtagagcgcctgcgggaaatcaaggaggaaagcgaaatcgcctccatccagcgcgcggccgccattgcgtgcgcggcgttcgataagctgctgggcctcatccgccccggcgtgacggaaaaagaactggccacggagctggattacctgatgctgcggggcggcgcggagcgcacgggcttcgataccatcgcctgcgcgggcgccaatggttccctgccgcacgccattccttccgattacaaaatccgtgaaggcgaactgatcacgttcgattttggcgcggtggtggatggatataccagcgatatgacgcgcacagtggcgctgggcaaaatttccgatgaattgcgcgccatctacgacacggtgctcaccgcgcagcaaatggccctggaggccatccgtcctggcgtggtgtgcaacacggtggacaaagtcgcgcgcgatttcatcgacgcgcgctatcctggcgcgttcgggcacgggctgggccacggcgtgggcctggaagtgcatgagaacccgcgtttcaaccaaagctgtgcagacgtgctcgttccgggccatgtgatcaccgtggaaccgggcgtgtacgtgcctggactgggcggctgccgaattgaggatatggccatcatcaccaaggatggctttatcgacccaatcaccgcgcccaagcatctgattacgctataaatttgagggggaataaaaccaatgatcagcgcaggagattttcgcaagggcatcacgctcgaaatggaaaatggcatttggaccatcgtggatttccagcatgtaaagcccggcaaaggcgcggcctttgttcgcaccaagatcaagaacatcgtcactggcgcggtgctggagcgcaccttcaacccgacggacaaattcccgcgcgcgcacatcgaaaccaaagagatggaatatctttataacgatggcgagctgtactatttcatggatctggaaacctacgagcaactgcctctgaataaggaagccgtggaggacgccatcccctacgtaaaggaaaataccaacgtgaccgtgcgcttcttcaagggcgcggccttctcggtggagccgccgaacttcgtagtgttggaagtgacgcagaccgagccgggcttcaagggcgacactgcttcttcgaacgtcaccaaagccgccacggtggaaactggtctcacggttcaggttccgctgttcgtggaaattggcgataagattcgcatcgacacgcgcgtgggcgaatacatggagcgcgca

SEQ ID NO: 4075 - DNA, 6126 bp, Unknown
  16S sequences of unknown bacteria
agccttgtctaccatgcctgcgcgcgcgaacagctgtgccgccgcttccctgtccatataccgccgctcgatccgctgtttctgatcgatgatctctgtgaccttcgcttccatctctgcccgcagcgcatcatcgcagcgaatgttgtcaaactcacaatataatccatcatccaggctgtgctccacgcgcacgccggcttttggatgcagcgtgtgcagcgccgcggcgatcaccaggctcagcgtgcgctcattgaccggatcgaccaggatatgctcatccctcatcatagcgctcccgctcctgattctcggcgatcatctcctcgatccgctgctgcggataggaaagcagcgcgccaaactgataggcgatggccgcgcgcaccgtgaaatactccttgcgccgcagcgcctctgccttgacccgcttcaggttcagatagctgcggatgacctgctcatcccgataaaacaagatcacgcagcgcccttcgctgaacgagatgggaaacaggtcgctgaccagcagcctgtcttccagataatagttcgtgtgatgcttcgcacagctctcctccacgacaggcagcagcgcctttctctcctgaacgctggcgaagggctgagagatcgccagctgcttcatcccgctgccgaccatctcgttcagcgcatcgatcgtctttccatgatcatctttctgattcatcgataatccctcatttctcttttttatccattttactacagaatcgggcagagggacaatgtccgccaggccaaagaaaaagagatacgcttccgtatcccttttcctctataactccgaatcaggttacagtcttttcagacttccggatgtcctgtatctctcaccaacgcatccgtttcgtccatttcccctgatttcggacatcgccgcggccttttctggatctcttatcctccttagatcagctgagccatccttcatcatcctgtcttatgatcccagatgaattgctgctccccctgatcacaggcatccgcgccgactattgacagattctctgctgcttcgctgttttcgatcttatgatctggcttattttctctacacttccgaaacagcccgtgaggctctgtgttataagctctttctttgttcgtctatatcttagcacacttctggaagaagtcatccccttggtcattttcggccggttttccggcaaattcggcaccaaaacaaaagagcagcgttcgctgctctcatcattatttcgccagttttgctttgacaaattcgaggacctcatctgcagtctgcttgtttaccgcttctgcagcgagctcttccatttccttcttgctcagaccgttgatgatcttgcgtgccttcaggatctgcgtagctgacatggagaactcatccaggcccaggcccagcaggatcggcgccgcatattcctcaccggccatcgcaccgcacatgccggcccatttgccttccttgtgcgcgccttcgatggtcatcttgaccagacgcagcacggacgggttgtacggctggtacagataagacacatgctcgctcatgcggtcagcggccattgagtactggatcaggtcgttggtgccgatcgagaagaagtccgcatatttcgcaaactgatcggcgagcacggctgcagccgggatctcgaccatcatgccgacttcgatgttatccgcaacctgtacgccttcagcgatcagcttggccttttcctcttcgtagatcgccttcgcatcgcagaattccttgaccgtagcgatcatcgggaacatgatgcacagcttgccatatacggaagcgcggatcagcgcgcgcagctgcgtacggaagatatccgtgcggtccaggcacagacggatggcgcgatagcccaggaacgggttcatctcttccgggaacgtgaaatacttcagcttcttgtcaccgccgatgtccagcgtacgaacgacgaccttcttgccgcccatgccttccagcacggccttatatgcttcaaactgctcttcctctgtcgggaagtgatcagaatccatgtacaggaactcggtgcggaacagaccgacgccttcgccgccgttcttcaggacgccctcgacatccttgatgccgccgatgtttccggccagctcgacctgatgtccgtcggtcgtgatcgtcttggcatccacgagcaccttcagcgcttccttttctgccttgaacgcctctgccttagcctcatattccttgaccgctgcttcatccgggttgatgatcacattgccatcgaccgcgtcgaggatcatcagatcgccctgcgcagccgcattcaggacctcttctccgcagccgacgactgccgggatctccagagagttcgccatgatggcggaatggctcgtcttgccgccgatggccgtcgcgaagcccttgacatattcgttaagctgcgccgtatcagaaggcgtcagatcgtatgccacgatgatggaatcttcatcgatcgccgtcaggtccggaatggtcagaccgagcaggttgcacttcaggcggaacgtcacatccttgatgtctgccgctctttctctgaagtaatcattatccatggattcgaacatcgtcaccatctgggtagcgaccgcgtcagccgcatactccgcattgaccttgtccgtttcgatcatgttcacgatctggctggcaaactcagggtcccctgccatcatcaggtgcgcatcgaataccgccagttcctcttcggacagacgttttgccgcgcgctctttcaccccttcgatatccttcttcgtcttttcaagcgccgcgttgaatttctccacttccgcagccggatcgccttccttctttacaatctccaccttcggtgcttccagcttgtaaactctggcgatggaaataccggcagatgccgcaataccttttaacatacataatcctcctcttttattgactttgccatatatgttaatcatgatgaaagcagttaaatcgcttacatctattatgatatcatttttcattcacagaagcaatcaaagaatcgtttcagcccctcttttttcagccgtttctgctgtctctgcgtaagcggagaaaggcttcttttctccagatacaccttgcggatgaaggcctcggtcatgaccgggcagcgcgccagcgcctcgtcgatgcggtccgccacatcgctcagatgctgctgttcctccatcgtcctgcacttgcgcgatctggccgtgacatactgcgcactgagctcttcgatcctcatttccatctcatccagttctccatccatcttgatcactccctgctcccctcatacgccgctgatccaaacgcccctattcctccgcatgtttttactcgttttcatccttccgtttgttatgcagaggacggcgcagcagcatcttgccgcaggcatgggcatcaaaggggatcagcggatacagatatcctctggttcccggggcacggctgctgatcagcagcagcacgagcagggcaagggcgatccacagcccataggcaggaaacagcgcgatcaccgccagcatgagcatgcgcaccagcttgatcgcataccccagctcaaagctgggctgcgtgaaattggccagcgccgcaaacgccatatagaggatgatctccgcgtcgaaccagcctgccttcaccgcgaaatcgccgaggatgagcgcgccgatgatgctgaaggagctgctcagcgaactgggcgtgttgagactggccatcttcatggcgtcgatgccgatctccaggatgatcagctgccagaatatgctgatgtttgcaccgccatcgatcagcgtgaacctgaacacctccggcatcaggtccggattgctgttgagccagaaccacaccggcgtcagaaactgcgccagcaggaagatcaggatgcggatgatccgcagatatgtgccgatcagcggcgggaagtaatagtcctgcgcctcctggacaaaatccatgagtgtcaccggcagcagcatgaccgagggagaattatccgtgatcaccacgatgcccccttcctgcacatgcgcgcttgccacatccgggcgctcggtatagcgcacgagcgggaacgggttccaccaatgcttgtcaaacagcacctcagccaagctttcctgcgccatcgtcagcgaatgcacctgcaggacgcacagccgctttttcagcgcggcgtacagctgttcatcgcggcagccggccagcgagcagaggacgacgtcatccttcgtctctccgacctgcacatgctccatccgcagacggacatccctgacccggcggcggatcagcgccgtgttgaagaccagcgtctccacgaagccatcgcgggacccgcgcagcacacggtcatcctccggctcgctcatggagcgcgtcgggtatgtgcgcgcatcgaccagcacgaaggtgtcatcatgctggcgatacaccgccatcacgccgctgaggacctgcagggcagtctgctccacatcgccgcaaagcgtcacctcgacatatggaaacagctcctgctgcagctgcggcatcgcttcgccctgcgcatcgctgtcgatcaagaattccatcatcttctccatgatctcatctttgacgaacccatccacaaaataaaagtaatacgatccggatgcggcctgcagcacgcggcgcaccagatcgaagctctctgagagacagagccgttcttccagcgctgtgttcagctctttcatgcatatcaccctctgcagtatggacaagatcgacaaggataaacaaaagacggccgatggccgcctatgcgttctgttccagctgttcgctgtattcttcccatttctgcatcagccggtcgatctcgacatgcacatcgtcgatctgctgatccagctcattcatcttcttgaaatcatgataatattccggttcgaagcgcagctcccgcagcgcctccagctccgtttcctttttctcgatctgctcctccagctgacggatcgccttggcatagttgaaattgcgcacatacggcttcttaccgctctctttggtctcatgcgcctgctccttcggcgcctgtctgtccttttccagatactcttcgtaagtcagcgggtaatacaccgcctggccatccttgatctccaggatggcggtggccagcttggagataaaatagcggtcatgcgaaacgaacagcatcgttccttcgtattcgcccagcgattcctccagcgcctccttgcccagcagatccagatggttggtcggttcatcgagcatcagaaagttcggcttggacaacatgagcttcaccaggctgagacggaccttttctcccccggacaggcagtccacggtcttgaacacctcatcctgggtgaacagaaagctgcccagcgcggtgcggatgctcgtgcggtcaaggtccgggaagctgtcccacacctcttccagcacggtcttgctggaatcgaactgcgccagctcctgatcgaaatagcccacatcgatctgatgcccgagcagaaatgtgccggaaagcgccggcacctgatgcatcagcgtcttcatcagcgtcgatttgccatgcccgttagggccgatcacggcgacgcgctgtccttgcgtcacgctcaggctgacctcgcacaatgggtgatcatagccgatctgcagatgctcgacctccagcacgcgccggccgcccttgcgcgccgtgtgaaagcgcgcatggaacgtatgatcgtcgctggtcggatcctcgatcttctccatgcgctccagatacttgatcttggactgcgcgaacgccgccttgttcttcttataccggaacttttcgatcagctcctccatgcgggcgatctccttctgctggcgcgcatacgcgctcttctgcagctccagatcctgcttcttcgtattgacataatgcgtgtaattgccgggatagcggcgcatgacgtcgaactcgatctcatagaccacatcggtgatgtgatcgaggaaggtgcggtcatgcgagacgacgaccacggccttgcggtaacggctgg

SEQ ID NO: 4076 - DNA, 3017 bp, Unknown
  16S sequences of unknown bacteria
aactgttgagtcaccattttgatggttaagctaaagaaaaaaagacaagagggattttatgagtgatatcagcttgcaattgagcataaaagaagaaaacgggatcttgttcaaacgatgcatacgcaaactgctttcttccacgtttatcctgcgggataaggatgagaagctgtatgcgtttgtctcccgcgaatccaatcgtcaggatatctctgagtatctgcgcatgatcggtcttgacgttatgatcgaagacaaaagcggcgtatgcatgctttgcatgagcgaagaagacgaagagaccgtcggtctcaaacgtgccaatgtggtgtcgtttaccacgacgcagtatcatctgctgctcgtgctgtggaagatctatctggagaatctgggatacagcgaaggcaatttcatcacgaaaggcgatctcatcgataagatcttatcttatggcgatatcgccagcaaacaggagctgtccgccgcgctcaagctgttcaagaagtacagcctgatcaattttagcgacaatgaggaaggagaggatatgctcatccagctgtatccttctctgcagtttggctgggacatcccgcagtttgaggcggtcgtcaacgaatacatcaaggaagaagacacagcggcacagagcgatgatgaggagggagatgcatgatccagctgactaaagtacgcctgatcaattggtatgcgttttcccatgagacggcgccgatcggacaattcacgctcattgccggcaagaacggcaatggcaaatcggtgctgctggacgcgatcaagtatgcggcgtatggcgatacggtcttcaacaaatcatcagaaagcaagggcagccgtacgctgtattcctatacgcgcggcctgcttgatgcgacggctggcacatatatgcgcccggcggaacggtttcccaatgtatacagccacatcgtgctggagtatcatgatgatctggccgatcgatcgttcatcctgggcaccgtcatcgaaacaagcgcgacgaacaattaccggacccggcgctatgtcatggaggatacgcggctggaggaagtctctcatacgtatatcgaggatggcaaggaacagccttattccgcagacggtttgcaaaaggcctattcgctgatcatgatggatcgggaaaagggactgcccaaattcctgcagatgaccgggatgaagatggggctgagccagcttcccgcttatttgcggcgtttgcgcgggatcatgacctatgatcccagtgccaaggtagaccggttcatccgtgacagcgtgctggaagaaaagcctgttgatttcaccaagctcatcgaggcaaaagaaaacatcgacaagctaaaccgtacgtttcagctgatcgaagaagaagtcagcgaactggatgggatattgaatgaatatgacacttgggaaagagaaaagaaccgactgttgatggatgacatcaagcagtgttacaaaaagaaatgtgagctggagcagcagatcggccgtcttgcgcaggatcgtcagctggcgatccggcagaaagaggaggtcagcgcgcttttggggacgttggaaaaacgtgccaaagatacagatgaacggctgatccaggctcaggtcaatctcaatgcgatggattgtgccaagatgattgcggaggaacaacgccatctggacgagctgcagcaagaagcgcagcgcctgcaaagcgacatggacgagctggagcgtttccagcagaaagtaaaggaaatgctttccttgctggaggaagaagagatcatattgcctcgttccatcttgctcgggctctgtgaacgcagccgcttttctgtcatggataaagagtctgcagcggaagaactcaagatcgcggtcaacgatacgcttgaaaagctgattgtcaggcttgagcagctcagggcgaaactggtcaagatcaatgatgatatccagcggcagctgcagatcatcgaggaatgccgcaagcatcgcagcgcttattcatttatcccggaatatgtcggcttgcgcgaagagatcaatcaggaatttaagcggcgcggcatcgcttcagaagcaaagtttgcctttgagtatgtgatcgctttgcaggatgaggcatggcgtgatgcgatcgaagcctttctggggtcgagacgttacacgatcctcgtggatccgcgctactatgatatcgcagacgatgtgctgaaccgctctgcgcataaatacgcgcatttgttcaatacgaagcttctgatgcgcaagacgatcaagccggaaagcgattccccggtgcgttttctaagcatccgcaatgaggtggcacagcgctatttcgactatcagctgggccgcatgcatgccgtagacatcagcgaagtgcgaaattatgagaatgccatcgctaaagaaggaagagtgtccattgccatggacagctacttcctgcgctttgaacgtatacattcttattatctgggtcaggagagctttgagctcaatcgcatccgcgccgaaaaggccgcggaacagctgaacgctgaaaaacgcgcgctgctgcttcagcaagaagagctgtgtgcacgcaagaacatgctcaaggatgatcgggagcttttccatggttatcgctacgatgcgcatgacgcgtatcagaagacgatgacacaggtcaatgcgtccaagcaacagctcgcacagctgatcaaggcacaggaggacaatcaggaatatatggagctctttgcgctcgtggaaaagctgcgcgcacagagcgagacgatcaagcaggaacaggatgagcaaagaaagcaggtcactcgcttagatgctcgcatcgaaaccgatgagcgattgctgggtgaacagatgcaagcgcaggaggaagccgaacagcgttatcatgcctatgagcaggatcattacgcgctcttgcagaaagcggtagaatcgtatgagaaatacttacagaatggcagcagcgg

SEQ ID NO: 4077 - DNA, 11227 bp, Unknown
  16S sequences of unknown bacteria
aagaaaagccccccttgtgcaaaggggggacagcatggcaaagccatgcaggggggattgcgaagccgggggaatgattcagctggttttctattgtcgggtgcggcggctcgccgtcaatccctcagtcggcgttcgccgacagctccctttgcacaagggaggtccggtggccggacggccatactgtctttgccttggctcgttgtgcttgcctgggcaaagagcgtatgacagcccaggcactgggcttgcccagcgcggcagcgcagtatgggtgcagcgtcacgctgctagatgatgcctttcatcaccagcacaaagaggacgcaggtgatgagccccaccagggacaccagcaaagcgccccaatttttgcccccggccttctggctctgggactggggcaccagcccggcccggcgcagcgcggtgaccaccggcttataaagcagcatggtgacagcggcattgatgccgcttttcagcaggttgaagggcaggaaggccgggatgagcagctcggccacagcagcccggggatagcccatataataaggagtgatcaggtagttccacagcagcatcacggccaccataaaaagaacgccgatgcccagacccagcatagcgcccttctggtcgtggcgcttcttatagatgtatgcagccgggcaagcgaaagcgcaggtggagagcacattcatcagaagcccccaataaccggtgtcgctgacggtgaacatctccaccaccgagaccagggccgagaccaggaaagcgctcatggggccgtagatgaatccggcgatggtgatgaccacatctttggggtcatacttgaggaagagcaccacggggatgcgccccaccaccatgacgatgaacgacagggcggccagcatggccagtacggtgagttttttggtgtcgagcttgcgtttttccattgttgattccctccggaacagattttttggacgaaaaaagcacccggaaacggtattgtctccgggtgctgtgaaaggcggacgcaaagaggccttaaaggcccttcaccgccaaaaaattctcgcacatcttcttccatccagactgtactgtcggtaccggagttgcaccggttcctgcgccagaggcgctcgcggactttaccgccgatcgggaatttcaccctgccctgaagacatctgttccctattctcttttcgtaacagacagtataccaccttctcccccaaaatgcaagcggcgagccgccgctcccatactctccccgggcagcgtgacgctgcacccatattgcgctcccgcgctgggcagtagagctaaggccggttgtgtgcatcccggcaaagaaagtatggccgcggcgccacgccgcccaggattgcacccaggcccttcccgggtgatggtttatcacacccggagcacgggggccccgggcgcatccccaccggagacaggaacgggtccagcggcacgctggcggcttgccagagggagtgctacacatccggcttatcgaatcaacgaactgaccattgcgtccagcttctcttcatcctctttgctcgggatgtcgccatgcttaaatcgtttcgccatctgggccatcgtgaccatcgtttcgttgccttcgtcaaatagaggaacattaagatagtctgtgacacttgttccaaggctcaatgccgaagaataggcattgatggcatcggcaaccatacgggaattgagaaatgatgtcaaatacgctgcctcatcctcagattgcactgggacgaaatagaccttatggtccggaacgactattttatcctcgccacacaaatcacacgaaccgacataagcggcaacaaagccacatccggacatttccttccagactactttatagggtgcaaaggtgtagtcgcctgtggaccagatggaccaaaagggctttccttgctgaaaacgcttataactggagcgttgttcaaggatcgcacggaattggctgaggaatttaaatgtgcgggggcgggtagctggcaaagtctcatcgccgaacatcccatgctgagggacaataacacactgttggggttgtggttctgcgcagaaccgttgtacatcacggcccctaagcaaggggaatatatcattcttttcaacggttgcgcgtttctttacaacatcgcggcggcggccttcgctggggtcattggtgatgttcacaaatctgcggtcggcagctggctggatattcacgaaaaaaatgccgttagcatctgttgtgacaccttttcttgcacgatagtttgagttgcctgcggcgttaaacaattcaggccatacccgtatttcatcctttgtgccaatcagccacggcccggcatcggttccgggaacaggaattgcctgaagatcctcataggatgagagattgggggtcgctcctctctgcataccgttaaaacagcggtaccggaccggatagctggttgcttgattattgcggcgaatcagcaacagcgtgggccagttggctactccttcaaacgggcgcagaggtgcgtaatcctctacaatttcaaccgtcatgggctcaacaccgtctgctgtgcgaagtctgaaacgccggaaaccttggctggattcatttttgaacaccgttccggtaatgagaaatgcaaggcttccgccttttttcacaaaccgttccagcgcatgatatgtcacgacagttgaaatatccgactgtataccgcccacccatacatcctcgctgaatatatccatccgatcgcacatgggcttgatgaattcggcataaggacggggaagatggctccatttgacccatggagggtttcccgcaaccaaatcaacattcctgacacatcccgcctctatgcggtcaaacagaatcaggcaccagataccgttccaatgattttgatgcaaatcgataaggctttctatcgtctgcatcagtatgcgcgaatcaaaatcgttaagttcgcagactgtgttggaaatggcgcgcagcgattccatggtgtctttgcggcccagtccggcatcgatgcagattctgagctgatccatggtggaaaagaactcgggggactcagcaaggccaacgggaatggaaaatgtccgcacgcctttttctgtcagaatagagtgtgtgaacaccccatcagatggatctgcggtgttgattgcgtcggcaagaaacacgggcagcagaaccgggtcagcgggattgaaccgtccagataaaaataccacaatggatgctcgcgccgtcaaaacagccagaggattgaggtcaaaaccataaagtccgtccagcaattttcgtgccggggtggtgggagcggcgatttccagccgcctgcgcaatccttccagaataaaagtgccggaaccgcaggtagggtccagaagcgattgtccggggttccatcctgccgtctctatcacatgtgaagccaaccaatccggggtatagtattcacccagggcatgacgcatgggcgcaggcgtgaaccccatatatagtcctttgaacagatcgcggatggattccgggcttttcttctcaacattgaaatcaatggttctcagacgctcaagcaacagcccaagcggttggtccagctcctggtttatgtcgtcgccaagataccaggaaaagaaatccgtccccagcatattctcaataccgaacatcttaaaatattcgccgctctcaatatttttcagaaattctctggggccggatgacaaagttggaacatcgtcagattgtgaggcaagcgcataaacggcacaagtcttcgccaccagtgcgatgtatgtgcttaatgcaaacacatatgcctgtggagcagcggtataatcagtcccgtgagtacggcttgcattctccagatagcgagcgagccgttccgtctccgttccgtcaacctgtccgaaaagacgagcccattctgtataaatgagttttgttctggttgcggagccggcatcgcaggcctggcatatggcccgaaacaaaaccgggagcagacggcgcccgacctcagtatccggtccgacagactgtttcagcagcatcggactcaccagcggccgcccgccattcgcaatcagagccaacagccgattcaggcagagtgcgtcaaatgcccttgccggctcccatgcgaacttatctccggatgtgcatccaaatgtaatggttttgccatcccaggcaacaagagaatacttgctgatatgccgcccttcctctttcgaaagcagttcagcgtattcttccgcctgcatacgcgcatgtcgaagctgtgcattctcggatgatttgaatgagcacggaggttcatactcaatgatggtagaaccgtgaaccgcgtcaaccctcctgttaccagatttgaaacgatgttcatatgtatatgagttccagaaaatatcccggcttctgcacaatctttcaagggttccctctgctttcattttgaattgctcttcgttttcggaaatgtgagcggcatcgagtaatgcaccaacgatctcggtcgactcttctggtgtcagtaaaatatctttcatacattattctccattttccattcattgctgcattgcggcttcggagcaaaatatgatggaggcaatacacttccatctcactttgcctcggaatgctcatttcctggctctttaaaatggatatttccacctgctccggcccatactcatgaaactctgattcatcagaacctattgagtaggattataacataatagtgtttttacttctacaatacaagacaaaaactttttctataatctgcgggagccgttaagcttgtgcggggggcgttcttttggtatactgtcttttatctgaagaaaaaggaggcgaaggcggtgaagtggatcaaacagctgaaaaaaggcgactttgtcgcctttgccctgattttgctgctggccgggggcatctggggtctgggtctgagccgcggcaccggcgatctcaccgccgaagtgcggcaaaacggggtcctggtgcagcgcatcgccctcaccggtttaaatgagccggtcaccttcaccctcaccggggaatacgaaaacaccatcctggcggaaaatggccgggtgtgcattaagtccgccacctgccctcaccaggactgcgtccacaccggctggctcacccgggcgggccagagcgccgtctgcctggaaaaccgggtgagcgtcacggtggtctcccaggaagaaaatgacgcccccgatgccatcgtccgatgaaatcccccgccaaaggagccttgcccatgaccctctcccggaaaatcgccctcagcggcatcctggccgccctggccctgtgcctctcccttttggaggggatgctgccccttagcctgctgcttcccctccccggcttccgcctgggcctttccaatatcgtcaccctggtggccctcgtcactcttggccccgccttcaccctgggggtgtccctctgccgggtgggcgttttgtatctggcctcggggaacttcaccagcctgtttctctccctgctgggtgctcttttctccctgcttgccatggccctggccaaaaaaggcctgggcaaggtgttctccctctatggcgtcagcgtcatcggcgccgcctgccacaatgtgggccagatcctgggggcctgtatcctgatgaaaagcctgggggtcatctattacctgcccctgcttttgatcctgggcctgtttaccggctgcttaaacgccgccgtctcccaaatctgcctgaagcatctggcagcgtgacgctgcacccaacctgtggcggctcgccgccagacccttgtaaaaacgaaaggaagcggctcagccgcttcttttttattgttcttttgtctttcgccggagggaaaacccgtcgatggccaggatggcccgctccagccccacggcccggaacagccgcccccgaagcagatccagcgccaccccggcgatcaggaacagaaagctgaaacccatcatggccgccgccagccacagagcgcttttttcccccacataccgccgggtccagggcagcacataggcccagacgcagggatgcagattgagcaaatagaccccaaaggccccggaggaccagcgggcgatgctggcccccagcttttggggaaggttacaccggctgaacagcagcagcaaacacacggcggagagcagaatggtgggcgaacaataggacaccagcccatcaccgctgcaccgcaggagaggaattcctcccagggagaaatttttgtccagggacaggattttgcacacccatgtcagccccagcagcccgccccaggccaggatgcactgtttccgggagcacctttcttcccaccggcattttttgatgacggcgccgaaaaaatacaggatcatcagccagatcaggctgtatccttccgccagattgaaattcacccatgtgaatgtgggcacaaaggaaaacaccaccgtcatggtcccgaagagggccagggttttgggcgacaggcccctcacggcggcatccagcaccggcataaagaaaaacagacccatataggccgtcagataccaataccggttggtgagcaagggaaaggcgccctgcagcacatccctccaccccaccggccagggagaaagggcgcagaacagcagcgccactgcaacgccgtaaaaaatcccctgggcccataaaaacagcagattgctgggtttgtgccgcttccctttttcccggtagcccacatacccgctgatgagggcgaacagatcggtggcgccataggccaccacctccagcagccagaagaccccgtatacctgaggcagcccgccgggctccaggccgccgctcaacagaagctgatgcagcaggacgacaaaaaacatggccagaaggcgcagcaagtcgatcccataatttcttccgcccatcgtcccttcagtcctttctctctcttttccaaaccgaaaagcatattgcaatgatagcacaagcaaattgcacagtcaatgcatttcattgcaaattgcaatgaaatgcatagcatagcgtaactcgtgaaaaagagggcatccctataaaatggataaaaagaaaggggatgagcgcatggatgacctgtcctttgccatcgggcaaaacatccgaaaataccgaaaactccggggactcacactggaaaagctggccgatgtgctggaaacggagacaaactacctgggccaatgcgaacggggagaacggcggttcagcctggataagctcattcgtctgatccagtttttcggcgtcaccgccaacgatatcatccctgtgccgcaggaggatgaccacctggcggaagaaaaggccgcctgtctccaggagatccacgccctgctggaaggctgcacccccaatcagctggccgtcatccggaaccttttaaaagaaacggtgccgtttctgaaaggatagcaaggcataaaaaagctccccaatggggagcttttttatgggttcatgttggccgtatatcatcacacattgaaaagtaaaggcaaaaatgttatactgaaaaatatcatctcccctatttaagaaggtgacaataaatgatctcaaaccgcaaatatatcgattctgatatccaaaccaaatatgaattttttgattatggacatgcactagaaatactgtatgaaagttttccggaagaatggaacgaaatacaaactgctctacggcgtctcaaactaactgtaagcgacgtctccaaatctggaggcaatgaatcgcccattcctaaaaagttcgatgatgttttatatccgtacggctggcgtgaaatccgcatttccggtgatttgattgtaaaaaaatatccccggcagacccgccagcgcagaggccgctttgcatcggagccctttgaagaagaaacgattgaggggtatatcgatggccataatatcgattttttaaaaaacaaagtcgcttttgatctggaatggaacagcaaagaccagacttttgaccgtgacttgctggctatgcgaacctattttgattgtggccttatcgatgtaggtgttattgtcacacgatcagaggaattgaacgaaatattcaaagaccttaacatcatggtcaaatacggggcgtccactacctggatgggaaaactgctgtaccgtttggacagcaggcgaaatggtggttgtcccattttagctgttggtataaaaaaggagtgcgtggaaggatatgagtaacttagacctcaccgtaaaagacctgctaaccttcacaaatggcaaaaaatataatacaatctatgccgatccaccatggcgttttcaaaatcgtacgggcaaagttgcccccgagcacaagcgcttgaccagatatgaaacaatgacgctggaagatataaaacaactgcctattccccagatagcagatgacaaatcccatctgtatctttgggtccccaatgcattgcttccagagggattggccgtaatggatgcttggggattttcttacaaaggaaatattgtgtgggaaaaagtccgcaaagacggattgcctgacggcagaggcgtgggcttctattttcgcaatgtcacagaacttcttctctttggaataaaaaagaacagtgcacccaaccgaacattaccccctgcccgatctcaggtgaacctgatccggtcacaaaagcgggaacacagccgaaagccggacgaaatcatccctattattgaggcttgcagcttacccaatcgaatcgagttattcgctcgaggagatcgtgaaggatgggatatgtggggaaaccaggccgattccagttatgaacccacctggaatacttataaaaatcacaccgtgatgaaagcaccacagcaacgcattgacagcggagtgaatttctaatttcatcctattgcataagaaaagccgccccgaagggcggcttttttcttgtttatttcccagccttgggcagcagcacttccttgccgcccatataggggcgcagggcctccggcacacgcaccgagccatcttcctgcaggttgttctccaggaaggcgatgagcatccggggcggcgccaccacggtgttgttcagggtatgggggatgtagttggccccctccttccgccgcacccgcaggcccagacggcgggcctgggcatcgcccatattggtgcagctgcccacctcgaagtatttctgctgacggggagaccaggcctccacatccacgctcttcaccttcaggtcggccaggtcgccggagcagcactcaatggtgcgcacaggaatgtccagcgtgcggaaaaactccaccgaatggtgccacagtctgtcaaaccactccatgctctcttccggcttgcagaccaccaccatttcctgcttttcgaactggtggatgcggtagacgccccgctcttcgatgccgtgggcgcccacttccttgcggaagcagggggaataactggtgagggcctggggcaattcgctctcatccaggatggtgtcgatgaatttgccgatcatggcgtgctcgctggtgccgatgaggtacaggtcctccccttcgatcttgtacatcatgttctccatttcggcgaagctcatcacgccatccaccacgctgctgcggatcatgaaggggggcacataatattcaaagcccttgtcgatcatgaaatcccgggcataggacaaaatggcggaatggagccgggccacatcccccttgaggtaataaaagccgttgccgctggttttccgggcgctgtccaggtcgatgccggccaggctctccataatgtccacatgatagggcacgggataatcgggcaccttgggctcgccgaatttctccagctccacattttcgctgtcgtccttgccgatgggcaccgaggggtcaatgatgttgggaatgaccagcatccggcggcggatttcttcgttcagctggtttattttttcttccagctcctgcaattcctgagccatggcagtgacctggctcttggtctcctcggcctcctcccgcttgccctgggccatcagcttgccgatctgcttgctgatggtgttccgctgggagcggagataatcgcaccgggttttggccgcccggcactcctcgtccaattcgatcacctgatccaccagctccagcttttcctcctggaactttttgcggatgttctctttcaccgcttccgggttcatccgcaggaatttcatgtccagcattttggtttcctcctgttacaatgttctgccgggccggagcgctttttcccgaaaaaaaaagaaaaagcccccgatcccatttcctatgggacggaagacttccgcggtgccacccatgttgccggcatgaaccggccgctcttgtgcgctgtacggggcgcgccccccggctcttcgccgcaggctccgaaagtggaaaagcggttttgccctgccggcttccaccagccgccggctctctgcaaaggcgctgccgccgcttctttcctcatggcctatatgggaatagtataccccattccccctcaaattgcaagcccagtgcctccagcgtgacgctggacccaacctgcgctcccgcgctaggcaacagaaccaaggatggttggttgcaatcgggcaaagagagtatggccgtcccgacacgggaccggcatgccatgtcacctcgtttttcttttattataacctgtttcaggttataaatcaataatctaaaacaggttatgccatacttcccttgaggtgaagtctatggcaaaccggctgcgtgatctgcgggaagatgccgacctgactcagaatcaggtggcgcaatatctgaatatgtctcagacaggctattccaaatatgaaaccggggaaaatgatatccctacccgggtgctcatcgctctggccgccttctatggcaccagtgtggattatcttttgggcattacctcctgccgaaagccctgctccccataagaaaacaagaaaaagccgcccaaaatgggcggcttttgtctatgcattttaccaggactgcacccggcctggttctgctgcccagcgcgggagcgcagtatggcagatcggaagagc

SEQ ID NO: 4078 - DNA, 8189 bp, Unknown
  16S sequences of unknown bacteria
gaggccgtagaccgtctcagtcggaaaggcaacgagcccgccgttccgcaggatctcgccgcctttccggaatatttcgttattgtgcacaacatcatctgtgagaacacaaaaatcggtcttcaataatttattatcagataacataaaattcacatcttgtcactgttcaatgctcttcgcgagctttgccgccgtgtccgcggtcgcgagcgcggtcagcatttcgtctatgtcgccgttcaggaagttttcaagcgagtagagcgtcagtccgatgcggtgatctgtcacccggctctgcgggtaattgtaggtccggatccgctcgctgcggtcgccagtgccgacctgactgcggcgctcggacgcgattttctcgtcctgctccgcctgagccatgtcgtagagcttcgttttcagaagcttcatcgctttgtcgcggtttttgtactgcgagcgctcgtcctgacattctaccactatgccggtcggcttgtgaatcaggcggatcgccgactcggttttgttgacgtgctggccgccggcgccgctcgatttgcaggtctcgatgatcaggtccgccgggtttatctcgacctcgacgtcctccgcctccggaagtaccgctacagttgcagtagaagtgtgaattcgtccctgcgcctcggtctccggcacgcgctgaacgcgatggacgcccgactcgtacttgagccgcgagtacgcgccctcgccctcgatcatgaacgtgacctccttgaagccgccaagctcggtctcgttcaggttgataatttcggttttatagccaactttggcagcgtacatcgtatacattctgtacaaaacatacgcaaaaagcgccgcttcttcccctccggcgccgccgcggatctcgaagatgacgttcttgtcgtcgtttgggtcgtgcgggaggagcaggatctggagctcatgctcgacgtccgggagcgcgtttttcgcttcggtcagctcgacctccgccagctccgcgagctcggcgtccccaccggcgaggatttcctccgcgtcggcgatctgcgatttcagccggacatattcacgatatttgtcgactatcggcgtgagccgcttgtgctcgcgcatcagcttcgcgaaacgctccggatccgccgctacctccggcgtcgacagatcctcagcaattttttcgtaatttttctcggtctcgcttagtttttcaaacatgagaatcctttacaaataagttacaaatcataggacaatctgtaatatcacaccgatcagcaccgacataatatacaaagtgcccaaaatcgagaaattctgcttcatcgaccggttaacgcggaaaagcacaagcataccgacgcccgcccccgcggaaagccccgccgtcagcgcgccgaagctcagacttccggacacgaacagctgggacagcacaacgcttgccgcgcagttcggtatcagcccgatcagagccgcgacaaaaggctgcacgacgctgtttgtcagcaggattttgccaagattttcctctccgatgaaataaataacgatattcagtaacaaagaagttacaattatgaagacaaaaatcgaaagcgtccgcttgagcgcgtttttgaagatcccgccgtccgagtcgcactcgtcacagtgatggtgctcgccgctctcgtggatgtgaaccggcgggtgattgatgtggatgctcgcgtgatcgagtttcagcaatttgaacaaaccattcaccgcgaatccggcgatgatcgcccacagaaacttcacaccgagcagcggaagcagccattttacgctcccggaattcgacgcgacaatcggtatcgcctcgtcggacgtcgaaataaagaccgcaataagcgttccggcagtgataagccgctccgagtagagattcgccgccgcgactgaaaaaccgcactgcggaaagagcccgagagctgccgcgctgattatcccgagacggctgttcgcgagcgccgcgcgcatcttgtccgccgcccgatgctcgataatttcgatgacaaggtagaccgcgaacaggaacggaagcgttttcagcgagtcgaggagcgagtcaagtataacttcagtcatttttcccctttgctattttgggacgatagtttgcattcccccacccggatgggcggaggaatgcgggcaatttatcgcacgctgaacgcgtaaatggtcgtcgtgtcgtacttttcgccgaccttcagctcggtcgtcgggaagttcgggtggttcggcgagtcgggcgcgtgctgggtttcgagacaaattgcgtgtctcggctcctgttttacgcctttcttgaacggaacgtcgccgtccatcatgttcgccgcgtagatctggacgcccggctggtcggtgtaaacgtccatgaccctgcccgacttcggcgagtacagctccgcgaccttcttcacggttccgtccggtttgagattaaagttgtggtcgtaaccgccgccgaacgcgatctgcgggtcggacttgtcgtttattctcgcgccgaccttctcgggctttctgaaatcgaacggcgtgccctcgaccgggtattccctgccggtcgcgatgagattttcgtcgatctcggtgatcgagtcggcgtcgacggtcagaatctcgtccagaatgtcgccggaatcgaagccgtcgaggttgaagtacgagtggttcgtcatattgacgatggtgttcttgtcggtgaccgcttcatagtgaatcttcagctcattcttgtcggtcagcgtgtaggtgacggtgacgtcgagctttcccgggtaattttcatctccgtcggggctggtcatcttcaggatgagcccgctctcgtcagccttctcaaacggcgtcacgtcccagatcttctggttgaaaccgacatttccgccatgaagatgattggaaataccgctgttttgtgcaagctgataggtcacgccgtcgagcgtgaagcggccgttcgcgatgcggttgccatatcgtccgatcagcgagccgtgatagccgccgccgttcagataatcgtcgaccgtgtcgaagccgcagacgacgtccgccagcttcccgtcgcggtcgggcatattgatctgctgtaaaattccgcccatagacagcacgcggatgctcgcgccgttcttattttcgaccgtgtaagcgtaaacttcgcagccgcagggcttctttccgaataattctttcgttatcatgccgaaatcctctttgaaatgtaaaattattgtagcgaaactattacttcgcgtcgtaaccgttcggattcagctcctgccagtgagcggaatcacggcacatatcctcaattccgaactttgcctcccagccgagaacctcgcgtgccttggtcgggtccgcgtagcactcgtcgatgtcgccggggcggcggggagcgatcttgtagttgatcttcttgccggtcgccttctcgtaagctttaacgatgtcgagcaccgagtagccgtgaccggttccgatgttgaaaacgtcgagtcccggcttcttgtcgagccagttcagcgccgcgagatgagccttcgcgaggtcgacgacgtggatgtaatcgcgcacgccggttccgtcatgtgtcgcgtagtcgtcgccgaagaccgacaggcactggagcttgccgatagcgacctgcgtgatgtacggcatgaggttgttcggaatgccgctgggatcttcaccaattttgccggactcatgcgcgccgatcgggttaaaataacggagaagcgcggtgttccatgtcgggtcagccttgtggaggtccttcaggatgtgctcgatctggagcttcgtttcgccgtaggggttggtcgcctcattggtcgggaaggtctccttgatcggaacgctcgcgggcttgccgtagacggtggcggaagagctgaaaactatgttcttgcagtcgtatttttcgagcatttcgcacagattcagcgtcgagatgaggttgttctggtaatatctgagcggaatcttgcaggattcgccgaccgccttcagacccgcgaaatggatgcaggaatcgatcttctcggacgcgaagacgacctcgagagccgatttatcgcagagatccgcgcagtagaacttgaagtccttcccggtgatctcacggattctgtcgagcacgacaggcttagagttgacgaaattgtcgacgatgacgacgtccttgccggcgttcagaagctcgacaacagtatgggaaccgataaatccggctcctccggtaacaagaatagacataattgttctcctttattctatgtatctgtttgttatttccaaagaccgtccgggtaggtgcccttcgcgatctcagatgtgatgaagttgacgaatttcggcttgtcgtcgtgataggtgacgccgtaccacttcgcgctcgtttcgagaaccgtgaccgtgcattcgtcccggtcgatctcgtgctggacgagcgagggcaggaagaattccgccttcttcgggtcgggcgcgtccggcagagcgcgcaggaattcggtgaaaccgtcgcggagcgccgggaatatcgacggtttgaacgcccagcagttcatcgagacgatggatcgtctgtcgagatcgtgccactcttccccttcgaggtactggatcttgccgtcgttctcctgaatcttggttctttcggtaacttttaccagtttgccgccttcaacttcgcagattccgcgcgcgaccgagccgttctcggtgatcgtgttctcgagaacgtagcccgccatcgcccagtccttctgatcgccgtccgacgcgaggaaatcgtgcaatttgacgaaagcgtcgcggccgtagtaatcgtccgcgttgatgaccgcgaacggctctttcacgacatccgccgctgagagaaccgcctgaccggttccccacggtttcgtgcgcccttccggaacagtgaagccctcaggaagtgtgcccattttctggaacgcgtaggagacgtcgaccttctttccgatgcgttttccgacggtttcgcggaaatcctcaaggttttcttccttaataataaagcagaccttgtcgaagcccgccgcgagagcgtcataaatcgaaaaatcgatgatgaattccccgtgcggggtcatcgggtcgatctgtttgggtccgccgtagcggctgcccattccggctgccatgatgagtagtgtcatgatgttttcctttctttgcacaaattgacgaatgataaattattgtccgagacccatctgccccatgagttttttgttgaattcgacggcggtgtcgtagcccatttttttctggcggttgttcattgccgcgatttcgaggattacggcgaggtttctgccaggctttacggggatggtggtcgtcgggatttttatgccgaggatttcggtgtattcggtttcgagaccgaaacggtcgtacattttgccttggacccacggttcgaggttgatgatgtaatcgatcttttcggtgtccttgacggcgcccataccgaagattcttcggacgtcgacgatgccgatgccgcggagctcgacgtagtgccggataatttccggcgcgctgccgacgagggtcttcgcggagacgcgcttgatttcgacggcgtcgtcggcgattagccggtgcccgcgtttgacgagttcgatggcggtttcggattttccgacgccggagtcgccgaggatcagtattccttcgccgtagacttcgacaagaacgccgtgccgcgtgattctcggcgcgagactgacgttgagggacgcgatgagcgccgccatgaacgcgcttgtcgtttcgggcgtgcggaggatcgggacttcgaagtactcgccgagttcggtgaattcggggaaaacctcgaggtttgaggagaagacgacggcaacaggctttgtctggaggaagcccatgatggcgctgcgccgttcttcgtcggagaggaactcgaggtatttgtgttcgactttgccgatgatctggatgcgctggggctcgaagtggtcaaagaagccggcgagctggagcccggggcggttgacttcggtgagatggactagtatatcgtccgaatcgtccggcaggaagaccttctcgagtgagaattcgtcgatgatcttcgagagcgcgaccgaataattttccgtcattgtgttatcctttcgcgtcgggctgaggggcgcggcgcagttttcaaacttattcatcctatattatactacatttccgcgcggaatgcaatcccttttcggaaaattctcacgcggtcacgaaaaatttacgcgggcggcaaaattgacttgacactaccccgcgcatatgttataatatagttgatattttgtggtaactctttcgacgcactatgtttgatgaggcaggagcttcatccgacgcacaaggaaaccttgactatgcccccggcggctcgccggggtcactatggtggaaaaagtggtcacaggagtggtggatttttttaggggtgtaatgtataatataggtatcggatttgagcctgttaatggaggggcttgatgaatagggagaagtatttgcttgaggcgtatgaacctgggcatagtattgagaatactgagatattggagcagcacgcggagatattcaggcggaatttgcattgccatacgcatgacttttatgagttcacaatggtggaagagtgggatgcgattcattttgttaatgatcattattgccgggtggggcgcgggagcttgacttttgtacgggcttcggattatcattgttttacggtgtttaatactgagaagtatactatgttcaatatacggctttctgctggtgagttcgcgaagattgatgagtttatgcgggggattcccgcggagcttactacgccggagctgccggtcagtgtgcggataccggagactagtctgactcggtacgcgtcgactatacgggagcttaacaggatgagtccttcgccgcggcgcggggtcgagcttaagattctgttttgcgatatgttcatggagctttataagtcgggggcggagcggaaggacggcgggtttccggcttggcttaacgctatgcttgagaggctcgcggttgagtacgatcaggagattgacccggcggagctggcacggagttcggggatttccagggagcatatgtgcaggtcgttcagacggtatctgggcgtttcacttacgcagtacgtgaattcgctgaggacttaccgggcggcttggctgcttcgtaatactgaccgtgagatcgcggatatcgggtgcgcggtcgggttcaataatcttgggtatttttacaaagaattcacaataagtttcaatatggcgccgggagagtaccggaaggcggttctccggagccgcgccgaggaatcggcgggagttctgaaacaggtaaaataaggatccgaaaaaaattacatattacatatctggagggtttgatattatgagacagaacgctttcctgcttgcggcgattatggcgctgacactcgcggcggcgtcctgcggagatgccgcgggaaataatcctgccgcgacggacgatacttcgtctgacgtgacgtctggcgatactacgccggcggagacggattacctcgagacgcttgagcttaagaattttgacggctatgagtaccgcataatcgcgcagtcctacgatcagcgacctaacctcccgctcgcggacgaggagacgggcgagattctgaacgatacgataatcgcgaggaacctgaaggtcgaggatttgcttggaatcacaattgtgaatatgccgttcgagaaccgcgacgaggtgaagactaaggtcaggacggcgtcgatgtcggatgaggacgcttacgatcttgtcattacgtcgattaatttcggcatcaatacgttgattaccgacggttgtctgtacgatatttcggcgcttccgaatcttgacctcagtcagccgtggtggtgccagagtatccggagcgactacgaggtgaacgggcatttctatttcacgtccggcccgatctcgccgttctatttctacacgccgggcattgtcgcgtacaacaagaccgtgaccgacgcaaacgg

SEQ ID NO: 4079 - DNA, 32759 bp, Unknown
  16S sequences of unknown bacteria
ggctcccgtgggaccggtagctcccgtgggcccggtggggccggttgctcccgctgcgccttgaacgccttgcaagccctgaggaccttgaggccctgttggacctatgggtccctgaactccctgcaagccctgaggaccttggggaccggtggctcccgtggggcccgtcggacccgtaggacctccgccggggcctgtgggacccgtaggcccgatgggacccgggcaacagcaaccgtggtttggcgggcacggattaggacggcacggatcctgtccgcacgaagcgttgccttgattgcaaccgcatccgaaacggccgcaattgaaaaaactgaacatggttttatgactcctgtgaataaattggcttatgtgcctacaccattttattcctgagatcaaaacgttgttatcaaaatgcgattatgtttaagatttaaacgataaacaaaaaaaagcgcgttaaaagcgcttcaaaaaaatttataaaaagagaacaggggaaaaaggagaaagcgtaataaactcttcgaaaaataccgtcagataaaaggtatgccttccagtgtcagtaaaaattttttaatttccaaacctccgttaaaccccgtcaaagagccgtttttacctattattctgtggcagggtattatgattgcaatcgggtttcggcttatcgcgcgtcctgccgcccttacggcttttgcctgtcccgcaaacgccgccgcatctgaataagtcgccgtttcgccgtaaggcacggtaagcaggaatttaagaacttcgctgctgaaacgggaaacggttttaaacgaaatcgggatatcgaattttttacgcgcgccttcaaaatattgtttaagctgatttgcggtttcctctataataggggtaattctgttagtggcgccaaagggcgctatggcaccgaacgacagccccgtaaggcgattgtcctcatcggtaagcgttaaattgcccacgggggaattaattgtgaaataacttctcattttatatcgctcccatgtaatgcggtcatgtaaaaaaaagatagcagtatattgcaaataaaacttttttgattgtaaaattatttctgcccgattgtcaagcgtttggtcggcaaccaactatacaaaatcagctttacaatgaaacaagcgatacaacaaagtcaaaatggaaataaaaccgaaaatcaaagccgttgacaaaagtaattttaaaaagtataatctggaaaacgggaaacagataaggagattttatgaaaattatattgtccgtttcgtcttcggacgtttttttctatatcacgcttgctttaatagccgtgactatgaccgtgcttgtatttacttttgtaaaggtattgcgtcagactttgaaagaaaaaaagaagatagaggaagatatgaaagcccgaaagtctttaagtgacggggaaaaagccgatgacgaaggctttgtgcctgttttcgacgtaaagaacagcgaaacgaaagacaaaaaacagccgtaaaaatcaggctgaccgattgcgtataatgacaaatttatacgttaaaatgaaaatacgaaatttttgtatttttttaagtttttttatgaaaaatcaattgtatattttacaaaaaaccggtttttaagcataataattgcaattttttaaaaagtatgttatcatgtataaaaaccgtgttttatttcatcggcaaataagttaaagtactttgtgtttttaatcggtttttttgttaaatatcattaaagcaaacagtttggttaaaattgcggcttatatataaaaataaaattaaggagggtgcaatgaaaaaatacgatgcggtcgtaattggcgcgggcaacggcggtctggttgcggcgataaggctgctgcaaggcggtgcgaaagtgcttctggtggaaaaacataatcttccgggaggatttgccacaagtttcagaagaggcagatttgaattcgaggcgtcgctgcatgagcttaacgacttcggtacaaaagacaacgcgggcgacgtgcgtgatcttttcgactctttaggagttacggacaaaatcgagtggctgcagatacccgaagcttacagggttatagtaaaatccgaaaagctggacgctaccatgcctttcggtgtggatgattttatcaaaaagatggcgttttacgttcccggaagcgaaaaatccatgcgtaaatttttcgaccttgccgaagaggtgcgtcttgcccaggcatattcaagttccgtaaacggcaaaacggattcgaaagttatggtaagtaagtacggtaatttcgtgaggtgcggctcttactccgtcaatgaagtgcttaaaacgatcaaaatgcccaaaaaggcaatagatattttaagcgcctattggtgctatctcggcgcaaaccttgacgatatgagtttcgtgcattacgcctccatggttaacagatatatcagacgcggcgcaagtatgcccaaaatgcgctcgcacgagatttctctcgctcttgtggacagaattctggaactaggcggagaagtgcttttcaacacggaggcggtaaaattattgcaggataaatcggacggcggcgtcgcgggcgtagtgcttgacgacggtacggaaattgcgacaagacacgttgtggcaaattgcgcgcctcatcttgtgtacggaaagatgatggattcggtatcgcagaaaatcgtgcgcgccaccaacgcaaggaaattcgccggccgcgggtttaccatgtttttggggcttaacaaaaccgcagacgagttgggcgtcgaaaaccacaactattttctttacgatacaagcgacagcgtagttcagtacgaaagaatgaaaaccattgccgataacaccgctcaggctacggtgtgccttaaccgcgcttatcccgaatgctcgcctgagggcacctgcatgatgtatttcaccacgctttatatgtccgacgactggggcaacgttaaacccgaagattatttcaaaaccaaagacaaagtcgccaatatgatgattgaccgctttgaaaaggatacgggcgcaaaaatccgcgacagcatcgaggaaatttcggttgcgactccgcttacttacgcgcgttactgcggtcatcccgagggcgttatttacggatacgaatcgcagtactgggacggccttatgcccagattgcttatgatggacgaggacaagtatgtccgcgggctaaggttcgcgggcggctattcgatgcgtttgtcgggctattccagcgcgtatttttcgggcgatatatccggaagacagaccgtcggcgatatcaaaagggagggttaaaatatgaagttcgtatttaaaaaacagatattcggctttttggatttgttaagattcaaaaaactggtacccaatcgccgcgaaaaactggcggaaggctccgaaaagccgcttcctcaatcttacagagtaaacgaaaccgcgaaaatcattcatcccgggtatttcaacgccacgcttaaggaaatcgtacagaatacctctgacacaaaaacctatgttttcgaggcggaaaaacctttctatttccgtgcgggacaataccttaccgtggggtgtaaagtgggtgacagctatgtcgcgcgtccctatgcgatttcttccgcacccaaagcggcgttaaacaaacaggtcgccgtcactgtaaaaaaatgcggatttttcagcggctatttgttcgataaagccgtagtcggcgacgttttcacgctgggcgacccgtcgggcgagttctgtttcgagcccgttaaggacagtaaaaacgtgcttgctattgcaggcggcagcggaattacgcctttttacagcatggcgcaatcgattaaggacggtacttcggatttttcgatgacgattttgtacggcgcaaaaaccgaaaaagacattattttcaaatccgaactcgacgcgcttgcttcggataaaatcaaagtggtttacgtgctaagcgacgaaaagaaagacgggttcgagcacggctttatcagcgccgatatcatcaaaaaatacgtttcgggcgacttcaccgtcatgatgtgcggaccccaggccatgtactctttcctcgataaggaacttaaggaattcaatctgccgcttaaaagggtcaaaaaggaagccaactgcgtgggcgtgcgcgacgtaaaggaaacggagtacaaacttaccgttcatatcggattcgataaatacgagattaaagcgctcagcaccgaaaccgtgcttaccgccatggaacgcgcaggcataaacgccccgtcaaagtgcagggcgggcggttgcggcttttgccacagcaggcttgtttcgggtaagttttcccttgccggtgccgataaacgccgtcttgcggacagtaaattcggctatatccatccttgctgcagctatcccgattcggatatggaaatagttgttcccaaagcgtaaactgttgtttaataataatttttaattccgattggcttaaaaaattaataattaagtcgggcggcgcaattatgcgtcgtcctttttttgtacaaatattatgctttataaaacggttttaattaaaattttatattcatgttgaaatttattgaattttatgttatcatatatacagttacttttactgtaaattgtattttttactaaaacattttaattttgggcaggagtaaagaaatgggagaaaggcaaaaggttttaaccaagaggtttgtggcgataacgttggcgatattattgcttgcaggcataattttcgtagtgtggggaataccgcgtattcaggcaaaacgcagctggtataaagagcccgaaaacatacaagtgacgatatacgtcgacgataccgaccaggggcaaattacgacgaatttaataaaatgggatgacaaaagagaagcgaccaaggtcagatttacgggatataaatatagtaaagatgaattttcggagaagcaacctgaaattaaaattgttgtaggaaataatatcgtaatagccaagaaacatgttcccgatacaccggggaaaggatatgtcagaaacataaaaacaaatagtagcgggacaaaggaagaaaattataaaaacttagtattttactattctttttataagacaaaggaagaagatcacaaaggcttttttgcccaaatggaagtaaatattgtattagctgaatagtagagacattgatagtagtttttgtataaataaagacaaaaaatgttaatatttttacttaaataagggggaagtaaagaaattgtagaaaaacagagaaaattgttaaaggaaaagataacatacataaaagtcaggagaggaatgtgatgctaaaaaactaatcaaaataattttaataatgaacttaatattggcagttgcaatgcctgttacgggctgcggcaataagcctattgtgtatgatctttatgtaatggtatacgacggagacggaaaagaaatagccagaagtaacgaagccgaaggagacagtataatattttcacttggagatacgccaattgaagttcccgcaggggtaagagaaccggtttttccttatacttggaagttttttgttaaagtaccgggaggagatacacttctggagccagaagaaaaattacttaatgaaaatgattatttaattaaattttattataagctttataatgacttaacccaagaatgggaatcattcggtataccatggcttgaaaaaggacaggtttacagacacagacttgaaataaaggttaaacaacttaaagataaaagtcactatgacggttttaaggaaatatgcgaagatgtttatttgtgtttgtatttttcatataaaggtgtttaaaggaggtttatcatgaaagagggttggacaacaagatggaaggcattgtttgtgtggttatgcggttatctcaatattgtggcatttgcgttggtaggcggctatatgattgtgaagtcagatgacgaagaacttaaaaatacttccaaaaaagttttaatcgttacgctgatttttaccgcagtatcgatgtttttgtcgctttacaacaatatcggaggcatggcggataattattattcgtctaaagcttattctgcttatgacattatgagtaatattacgaatattgccaaaatagtggtttttgcggtttgtgccgcgatatctttctttaaaaagagaaccgataaagcccaaatgccgaccgaacaaaaaaccgaagattcttctgtacgggaagaacaaaaagactgattttaataaaacagttaccgataattatattgaaaaaattgtttgtcggataaaatcagataatcataaacaaacaaaacagacgattttacgaccgttgacttatgcgaggaactatgctaacctgcgcccccgaaaaagcaatgttcggagggtatagacaaagcactacgacagagaaaatacaataaggcaatatacacggaaaaatacgagagagcgaaaaagcggaagttcgcccaagcggttcagcgggcgactccgcttcgctttcgctttccgttcagccttattattttgtagcggcgtgtgcttgtctgggcgaggcgacgccacttgtctatgccaagcacacgccacggtgtcaatttaaattttaatatgattttcaaattatgataattgtgtatagaaatcgagcataatttgtaataccctctgcaagaaaattaaaatattttggaaaagacaaaacattatcacattagatacacatacgagataaaacgcacaaatttgaatcgcacgcatatattgacaaatttgaagataaatgttataattttcaaaactatttcatagtttcaatggaagggtgcctatgaaaaagttattttgcatactgataagctccgttttgcttgtatgtgccgtttttgctcttgccggttgcggaccaaaaacgcccgaagataacagagctgttcgggcattagacactagtttcgtaaatgcttggcaaggttcggatggcaccgtatatgttgagctaaaagacttcgagcatgacgactatcaatccataagcgatagcggacaaggtgctacctccattgaattttcactggacggtggtagtagttgggcacgtcaagaccctgttgaatattttttcaatcagaccgatcgcggtatctattctatcttgtcgcatgatggcaatgaatttacttgctatttgacaggttatgaaggcgagaatatgccccaaaacccaaaattcagtgctggcgccgatctttcaatcaccttccgtattcccgagtcggacacgtataaagcgagcgagtggtcgacggcgacaacttatacgctcaaagctcccggcacagataacagcgaaatttttgcaaacttttacgggtcattcctaaacaataaagaacagtacgaatcgggaaatatcatttcaacaaacactttcgagagcaacggtttcgtggtttacagagatggtgacttgctcaaatttggtaaaatagcttctaaggtttcctctgccgaaagcggtaagtatgactacactttcacccctcaagaggagttgggcgaggcagataagaacgagattgcaaagttcgaatacaagtttgtatccaaactcgaatatgaacaaaatgcaacggcggagagtacagatctactgacctcaatcacaccgcatatacagacttacgaagacaatttacttatgtctggcacatggacggctgtaactgtcgacggttttaagtttaatgcaaccgacagcaacacttggcaatacaatgttgaagaatccaatgccagtactaatgaaacggagacttacacctataaatcattcattctgttggtgcgcattaaggcaactgactcaactgtacattcgggagttcacgttcttgaatatcaactttcgtacaagcctgtagaataaacaacgtgctttgcaagtattgtttgtagcgacgagacaatatccgacagaaagactttatgcggaggtttaatgtatgagttttgtaagacaactgataagacatattggcagctgtattacggcagaaaaaggcaagcgtattttttacgccgttgttaacattgcatttatagcgatagcagtgctttccggttggggcgttttaaaggcatgggaaataatgttcagcgaaacctttattgggggattgctattattgattgcatgcgctacgtttgcgattctttctttgatcgacggcgtgatcggtcagttaattcatactgttgttaattttatttttatatttaaccgagaagagcgtggctatgcaatctgtgcattcattatcgctttactatctattgttgcaatggtggtggtaatggtcattttattaaattaaatatttgagagtataaatccaataaaaacgaagaacgacctctgatgttcagaggtcgttcttcgttaaatccagactgctttttgtatttttcagactgtccatttttgttattctacccttcgagcagcgattcaaggattataccttcgggagagtccggaatgttctccatagcggatacaagtttcactccgttttctttcaatgtgtgcttatggatagtcatttcgtacttgtcccgcgaaaagcggtcaagtttataaacgaggacgtaatcgaacgattttttgtcactgtctttgagcattttctggaattgctcacggttgtcgtttgtgccggtggtagcgcggtcgatacaggtgccgacaataacgatgccgtttctctgcgcgaattcccggcatacccttatctggccttctatcgactgttcggtctgattattactgctgtacctggcatagattgttcctgttttcatgttgtacctccgaatagtttttggagtattgtaggaattaaactcgcagcctttttgcgactttaagaaaaaagttccaaaaaatctcaaaaaagaaccgaaacagtataatctcggcaggccgctgtcttttcgacggacacaacaaaacgggaaaagaggggcagtcaaaggcgaaagggggaagccccgaaaaattattgcgttcatggcatagaaaagccgagaggaaatcctctcggctgaaagttttaagtgataatttttccctttgacggcaacgaatttttccgatacaaacaaacggcgaaaagacggctgagatgtctttcaggtgcttttatggtacacaatagctgccatttaggttacaaacaggctacttttgtatactcacgcatctttgccgctttgccttataatagaggcaggaggtcagagatgaagaaacaagaaaagcaaattgaggtggaggtgaacggaatccctgatttgaacaaagcaccaaaagatttactgcaacttatttgtgcggcgatgttggaagtgatagagttgttagataaggaatcacgatagatttatcaatttgttttaatagtcttttgttttatccagatgggacttgtccaggcaaatctgccgtcgtcaagttccaatcgcagatagtaaaagtcttcttgtagttcgtgtttataatcgaaaaacagtgccgaaggatgttttattacgcagtaatcgcgtaaattctttactatagtaaccttctttatcggggcgtcggcaacgatattataccatattgttagttcgtcgtctttgctgatttcgaattcttcgcccatccaatgtccgtttattctgaaatcaattgtaatcttgccgcccatgaaaccgtaacaccgccttgctttcaaggcggcaaatatgctttcaagcgtgttttcttctgcccatacgcctgtaagacccgggtagttgaatgggtatgcagtatcgttaagtataagcccgtttttgcagaagtggtcgtcggagcctgcaatgcaccccatatgagcgccccttgcaagcgcgtcttgccagaatccgccgcggcacatcgaatcattttcgtttgcgggattgcccatatattccgtcgcatccccgcgcgaatatatctctatgagcggagtgagcagaccgacgggaatggcgctcaggtctgcccccgcagacagatgatacgtgtcgtgcggtacgatgagtatatctttccgttcaagcgccgcgcgcagttcgtcggcggttatttcgccatctcttttaccacggagcatttccccctcgtgtgaactgtaataaattatcatgttgttataaaaggggtaggagtcacgttcgtaagcaagaatggtggtgaatttccccggttggtagtactgctttacttttgattttattatgtcccatttagaaggggagccaacccataattcgggctttcccacacctccgtggtcatgatcggaaactgctgcaaaatcaactttcacattgtcgcgcagattgataaaatattcatctatcgagggattcccgtctgaaagatttgtgtgtccgtgcatctctccgataaagtttttatattcgggtgcgggcggatcaaacatatgctgcgctttatcgagtgcggcgtaaagtttgcttggttcgccttcgccgctgtaaactatgtctgtaaaagttctacatctgccaggcatatctatactttttgcttgttttctgtcggaatgtgtcatttcgtttttaatcattgtattacctcattgattaagtttactattctgccggaaaaatcgggggggggtagctaaatctttatttatggtagctgctttacggtatttggaaggcgtcagccctgtatcttccttgaatatctttattaaatgtgcagagtcggaaaatccgcaagattgagcaatttcagctaccgattttgatgtggttgtcaggagttttattgcttgattgatccgcaattttctcaaatattcaaacggggtcatcttaaagagttgtttgagtttttcaacgtagcaggtacgcgattccatggcgtaatgtgcaagttcgctcaacgaaaaagcttctgaaagatgttgcttcatataattcgtggagtttattatgaatatatagtttttttggcagtggcaatgtctgttgtattgtattgtattgcttttccattagagcggaaagataatagataagagcgatttcataagtttcaaaaatgatcttatgttcggaatatttggcaaactctataagcatatccatttgagatgtcagctttttaagttgcaacgggttgagtttaagaaagaatgttgtcgacgcaatatgttttcttattcaggctccgtttcgaacagaagcgagtacccgttgatactgttgagttcggaagaatacttttgcaggagtttttgttcgatcagaaggtgaaaaatgcttccgtcattattttccatccaatagccgtgagataccttcggaggtattacgaataccgcccccggcgatacgggaaagtttttatcttttatatagtgccgaccgctgccttcaacgattatattcaattcgtaaaaatcatgcttgtgcatgagtaacggaaattcattgtcgtgatagtatgcaagccgttcgcgcaaagtaaaacgggcgtcattgggattgaatgattctgtcttaatgtgttttggtaaaaattcgggataatcgagcatatttatcacttcttggattcaattataattctttttcacaaaaaagtctatcgtttcttccatcttcgtacttatatacaatttttacggacggatattctatattttctctaaatatagtgctataattaaagtacaggtcaaagtttattctcaggaggaaaaagatgaaaaagagacttgtgacagtaggcttggctatgatgacagcgataactttgcttatcgcgggttgtggagaagaaaaaaattacattgagatgtcttattacaagcacacgcctaattgccaaagtcgcaaaatcctttcgagtttgaaagtaaaaacaatagcgtttacaacccggtcaagccattgatttttgcggtgaaaaatggtataattatcttgataaatcgacacctaaaggagcaacgatatggatattcgagaagtaaaagaaaataaaaagcgatatatctcgttgttactgttggcggatgagcaagagaatatgatcgaccgctatcttgatagaggtagtatgtatgtacttatagacggtaatgttaaggctgaatgcgttgttaccgacgaaggtaacggaatagttgaaattaaaaatattgcggtaatgccaaaagaacaaaaaaagggatacggcagagcgctgatcgaatttcttgttcgtaaatacaaggggcgcaattccgttttacaggttggaacgggcgacagtcctctgacaataccgttttacgaaaaatgcggctttgtccgctctcatcgaattgcaaatttctttaccgacaattacgactgcccaatttatgagtgcggtgttcagttaatagatatggtttatttgcaaaggcacttataaattcaagtttgtacattgctttttctatcgtcgattaaagggtgtgttcggcataaaaaaagggagcgttgaaactccctttacgttaaagattaagttatctgtttgacgtataaaatttgccgcccacttcgatttttccgttcgtaacgttcggtttattcaatgcacaggcacgaagcattattttgtcgggcaaaggttcggtttgcctttcgatatttccgtccgtaaagttatcttctttgccaacggcgataatatcgaaacctttttcgacgaggaaagccgagagctgccaaagtttctcgaacataccgtaagagtccataataacggaaatattcttttcggggtgataagcggtaatgcggtagtagtttgccatagttttaatctcctttgcggttaagccgctaattgttttatctttctgtttgcgtaaggcagccactttttatggacgaagtttataacttcttctgtgggcttcgaatcgtggtcgccgtaacactgtaaaatgcgcttttgtgccggcgaatactcaatcgtaacgaacggaacgtcgggttgctctttggtgcggataaagaatataagcgattcttctctcgcaaatttttgatcgtaacccatacgtcctacgcaatggtgaagcagttcgccttcgtgaatgagatccgacggcttttgtgcgataatcgctatatagaccgactttttatcgtattcaagccctaaatacttgcttgctacggcggcaaatctgtcgtaaagggctttacgttcctgctcgtctttcaatgcttttgcggtgttgtattcgtctatacgaatatcgtgccaacgtttgaaatcgtggggaaagcggttcttgttttccgtcatatccaagccgagataattgcaggcgcgcaagtaatcccgatacgaatacgggttcgtgttctgactgcggatatacaaaacaaacttttcaaggtcgtttttgaagaatgttcgtagctctttgagttcggcttctttggataactgcatacggtattttttatacgcttgcaagtcggcaaccgtatgttgtttttggcatagaaaaagccgagaagaaatttcttcccggcttcggagttaaaaatatttgatttttaagcgatattttttcgcattgacttctgcgaaatctgtgctacgatggctaccacgaaacggcaaaatttggagaaaaaataggcggcacttaccgcttattttgtatagttgccgtgggcatctcttttctgtgtcaagtagaagtttgatagttgcgggacataaacttcggtgtcgattatgatgccggcaacacccttgatacaaaaataacagagccgcgggttcaaacgcgactctgtttggcggagagagggggattcgaacccccggtacccgattagggtacgcacgctttccaagcgtgtgccttcgaccactcaaccatctctccaagcgtcgaagattattataacagaacaaaagaggattgtccagcggttttggtaaaaaaataaaaagtaattttgtgcggattaatcaatgcggtcaaaaatcgtacaggatttacccgggcacgtattatgcctgcaaacatcagtaaagaaagtcatgttgaggcgtgcgcgcaaagtttaaccttacaataacagcgttcatttgtgtaagacgcattacgaagcaataatacggctttcaattttaaaaatttatgcctgatacatcggcgccggtaaaaagcgtaacatatttttatttgagcaacagcaaaaataaacatttattcccgaggaaatttaccttatgttgaggttgtacccaatcgtattcaacggcttataaaaaagagggttaaaaacggttgcgtttaagtttgcaaagatatataatgttgtccgatattcgagaattcggagtacaaatgaaaagagtcaatgaccttgggaacgataaaatgtttccccttgttttaaggcttgtaattccttcgatgttggctcagcttgtcaatgtgctttacagcatagtggacaggatttttataagccgtatggcgaacggagagcttgctcttgcgggagtgggggtctgcggaccgatagttacgcttataacaagcttcagttttctgcttggacttggaggagcgcctttacttgcaatgaagcttggagaaggagataaaagcacgggcgaaaagatattgttcaactgttttttcgcgttgattgtcgtggcggtgttgcttgccgcgttttttttggtattcaaaaaaactttgctgtatgcgttcggtgcaagcgccgatacaatcgggtacgctgacgactaccttaccgtttatcttttgggcagtatttttgccttgctaagcgtggggcttaataattttataaccgcccaaggattcagcaaaaccgcaatgggcacggtagtaataggcgcggtaattaacgtggcgcttgacccgatttttattttcgtgttttccatgggcgcaaggggagcggcggtcgcaacggtaatagcgcagttcttttcctgcgcgtgggcggtactgtttcttgttttttccaaaaaagccgacgtaagacttaaacttcagcgcatatcaataaaaatcatgtggcgtgttatgcggctgggattttctccgtttgtaattatcgcgaccgacagcgtgctgtttatcgtgcttaattccgtcttgcagaaaacaggcggcgcggagggcgacgtgtatgtggcggcggcaacgatagtcgtaagttatatgcagatgataaccttgcccatgggcgggcttacgatggcgtgtcagcctgttgtaagttacaatttcggcgcgcgcaagcccaaaagagtaaaaagcgccgttatagacgcgcttatcgtgtgtctggtttttacggcgataatgaccgtagtatcgcagttcctgccgcagtatttcgtgcggatattttcggacgacgccgcggtaagcgcggtcgccatacgcggaatgcgcgtttattccgcgggaataataattctgtccgtgcagtacgttgccgttgatttgcttattgctctcggcgtaatcgctcccgcgacgttcttgtcgttattccgcaaaatatcgataataacgcttacggcagtacttccgctttatctgggcagtttttccgcgtttttcgccgagccgattgtggataccctcagcggcattctggcggggttcgtgttttgctttgcatatataaaaaccatgaaaaagtacggcatgaattataccgaatcgcattcggaaaaagccgatattcaatcttaagcaagtaaaagtcattaacggcggatttgtgtaacgcttattaagggaaaaatatttctggcgttttcttttttgaagttaaaaaaactccttaactttgtcgccttaagcgtaaataacgaattacggcgcaatagtcaaggagttttatttattagtaaatatttgaattaaatcagtgtataaatgacgcggtaagacaagtttttttaaatgccgttgacttatagcattgaaagccgttttaaccgaaaaaaacgtcacaaagaggcttcagcttttaaaaccgccgcttttagcgttttcgatgcccttaagcatcataagcgcgggctcgaacttggggtcggcttcgaggcaggctttaaaatccgtttcggcgccttcggggtcgttcatgcccaagcgggtaagggcgcggtagtaaagaaaataattgtattttttaagcggatttttaaaagcgtcgtttatgatgcggtaattgtcggacaacagtttgacgcgcgtttcaaagtcggcggaaggagccatcgacattctcgccgaaatattgagaagcagaatttcctcgtcgtcggggaaagagtccagcagtttttcggtgcccgaaagtgcataggcgtagtcgcccaaagccaaagcgcgctgatattttgcggtttctcggctgattcccttttcgtttttttcgcatttccattccacaaaagggcggtaccagtcggctacaaacgggtcttcgccgttaagttccgccgtcgtgcagcagatattgtcggcgtaccgcgcgttattcgctgccgaaaacacttcgggcgtgtggattacggcctttaagctgtcgtaaaggtcatgttccacgggcgcacccataagaaatacgtaggggaagtaaacaaaccacatcgccttaagctccgccgttgcggtgttaagactgacgcaggcgtaaggcatctcgtaaagcgtcagtttttcgggaagagccgcattttcaccgcttatttcaccgttttttactttgtgcgcccataacggcgagcccgcgtcgaatttatataaaacattgccgcttttgtccgtgacggagtaaacgtgctcgaagttttttacagtgtcgtccgcggtgtagaaggagcatccgtacttgacaagagttttggaaagccgtttcagttctttaaggtcgaaaaggcacctgtaagaataaagcgaaaaaagcagattgcgcttttcgcgatagcttaaatccgacctgtccgtgcacgaataacttagctttatcagatagtcaagtccttttgtgtcttccgaggtttcttcttctttgttttccgcagagtcttggttttccgcgcaagcgtctttttctttttcgtccatttttttaatcctgaaaaattagtttaatagtttaaattcccgtaaaaaaagtttgctttcaaaaatatcacttccttttcccgaagatcaggggatgagcgccgtatcggtgctcgggcacggaggcgataagcttcagatcttcttcgtccagttcaaaagagaaaatgtcggcgttttcgcgtatgcggtccgcgtggacggatttgggaagcggcagaattccgcgttgcaattcccacctcaagcatacctgtgacgcggtgacgttatgtttttttgcaacgaaagcaagctgagggcatttatccgcctcgcctttaagtatggggcgccacgcttccacgactatgccgcgactaaagcagtattcaaccgtttcgtcctgttttagcgcgggatgaagttctatctgattgacggcgggcgttattccgcttgattcgacaagaaaatcaatatgctcgggaagaaaattgctgacgcccatggaaattataagtttctgctccttaagctcgctgaaagctttccaggtgcccttgttaagttcgcggtaatcgtgttcgcgacctttgggaatgggccagtgaataaggtaaagatcgatgtaatcaagtcccaggtttttatagcttttttcaaaagcgcgcatggtgttgtcgtaaccctggtcgtcgttccacaccttggtggtcacgaaaacgtcgtcgcgttttatgccgctgtcgcgtatcgccgcgcctacggattgttcgtttgcgtaaaatgcggcggtgtctacgtgacggtaaccgattttaagcgcctcgcgaacggcatcgtaacactcctcgccgtcgcggctgaggtaggtgccgaagcccacgcaaggaatttcacggccgtcgttaagcttatatacgtcggataaacttttcatgatttataccctcccgataaaattatatcatcggcggaaattaaggtcaaatcttttgccccgattatcggttgcaaattatcccgtaaaattgtataatagattaccgtagggaaaggctgggcggaattggggacttttttcactatttaaacacaggttaataattacttcactcaaagtttagtttataatattaaaaaatcgggcctgggcgaaagccgtttaaacggccttaggaaaggggagataaaacaaaatggcaaaaatactcattgtcgacgacgaggaaaaaatccgcaccgtacttaaagagtatgccgagttcgaggggcatgagtgcgcggaggcggaggacggtatgcaggccgtttccatggcgcgcaacgaaaattacgatataataatcatggacgtcatgatgcccaaactggacggctattacgcggtcaaggaaatacgcaaattcagttcggtacccgtaatcatgctgtctgctcgcgtggaggagtacgaccgtcttttcggattcgaagtgggcgttgacgattacgtcaccaaacctttttcgcccaaggaggtcatggcgcgcatttccgcggtgcttaaacgcagcaaacccgcaaaaacctcttcaatagtgtccgaagggctggaaatcgacatggctggcagaaacgtttacgtcgacggcgaaaaagtcaacatgacccctaaagagtacgagctgcttttctatcttgtggaaaataagggcatcgccatatccagggaacagcttttaagcaacgtatggggctacgacttttacggcgacgaccgcacggtggacacgcatatcaagatgcttcgctcttctttgggtaaataccgcgacaaaatagtcacccttaggggacttggttataaaatagagctttaacggctttaaaacgggggctttttgactacggagaacaaaaaacacaaaaaccgcggcagtctgatgtaccgcacatggctgtattttatcggcatgaccattgtcgtgctggcttttctgtggacgaccgaggttatatttttcaaagcctattatcaggagatgaaggaacacgaaataggcaaatcctgcgccgccgtagttgaccaatttacgggcgtggtggacgaggagtttgtgcgttcaattgaggggaccataaattccaattccctgatattcgccgtgttcaccataaacgaagggattcccgtttcggaagcggataaggaagatatcaatattctgctttacagggaccccgtaagctggcagtttgaagaaaactcattcagcgggccaaatgaatcgggcgcggatttccgtcctgaaaaagactatttcatgcttgcgggcgaaagcggagacaagccctttacttacagggtgcgcaaggacaagaacgattcttataatttcgtgatgggcgcaaaaaaaatgacaacgtcgggcgtggtgtatttctatgcgtcctatcttatggtgcccatggatataaccatttcgctgcttgccaatcagctggtgcttgttacgtgtatttgcgttatcgtatccgttatgctttcctatgcgctttccaaaaacatcactcagcccattaccgaattcgccgccaccgccgcgcttctcggcaagggcggaaaagtcaaattcgcttctaccggctacaacgagtttgacgagcttgcaaaagccttgaatcattccgccgaggaacttgaaaaaaccgaaaaattaaggcgcgattttcttgcaaacgtcagccacgatttaaggacgcctcttaccatggttaaggcctatgccgaaatgatacgcgatatatcgggcagcgacgcaaaaaaacgctccgagcattgccgcgtcataatcgacgaggtggaccgtcttacgttgcttgtcaacgacctgttggatttgtccaaattgcaggcaggcacacgcgagcccgattttaaaattgtaaatttaagcgaaacggtcaaacacgtcatggaaagattttccattctttcagcgcgcgacggatataatttcgtgcttgacgtagacgaaaactgcttcgtttattgcgacgaacgcatgttggagcagattttctataatcttatcggaaacgccgtcagctatacgggcgcagacaaaaaagtcaccgtccgcgtcaaaaggtcgggcgaaaaagtccgcgcggaaatcggcgacacgggaagaggcatcgctccttcggaaagagataagatatgggacagatattaccgttcaagccaatcgaagcgcgcggttgtgggcagcggaataggcctcagcatagttaaaaatctgcttattctgcataatgccgaattcggaatagattcggtggtcaacaacggctcgactttctggtttatgctgccgtataaaaacgaaacctcggacgcgtctgtggctgatgcggcggaggaaaagcagtcgcgtaaaaaaagcaaatcgtaaataacagtgtgcggcaaatccgataaagctttaagcgcataaacgtaaaagtaatttcggattttttgccgtgataaaagcattgaataaagttgtaaaatcagcagtttttatattttcgcggtttttaaaagtttttaatttcgttatcataatgttatcacattccataggtatacttcatcgtagatataagaaccttatatctctcacatttcttcctttatttaaataggaaaaccgtccctgttcccgggggcggttttccgttttaaggtttttgctattttgcagcggttataattcgttcttttcagtcgcggtcgtaaaaatcttctatttcttcgttttcggcgtatgttttcaggttggtttcgggtttttgggctttattttgttccgtggacgtattcgggtcgctttcatccgattcgtccgagtttttcatttctttttcaagcgggataaattcaatcgatttgtcgtaaactttaaatgatacgtcttttatgaaataagcgcacgccgctgccgccaacgaggtgacggtaagtccgaaggagtgccacgaaaacgcgtaaaacataaggcacagatgtatcagcgcgcatatcgccgtcagataaaactgccattcgattaccgaataagtgtgtttttcgaatcccagcttaggcgcgcaatttctgtaaacggttttcctgattctgtatcttgaaaaggagcatataaaggaaaaaacacataaggcggcggtaaaaatcattattatgacgtatgcggtcgtaagaggtaaatattttttttcgttgaaaatccgcattgcctccgatttcagtaaaagcggaggtacaataaacagaatcaataacgctgcgtacagcagcgcgcgtaatgtttgtgcggacttaagttcattctcacttttgctgcaaacgtatttgccttgtaacgtatcttttttctctttcatatattcagtatatcaccgacaaaaatttcagtaaagagaaaaaaagggaaaaaccgttttttttctttacaaagtcttttttcggtgttataattcattatacagttaaataaaggaggtaaaataaaatggctaaaagcgattatttcggattgggttatcttatcagtgtcattttggcaattattcccgttacatcctggatttgcggtgcaattacaagattcggagagggcaagattattgcgggcattcttcgtttagtgttaggatggaacattatttggattgtggatcttatacttatgatattaagcaaacacattcttcgtctgttgcccatttaataaggttaataaaaagcggaaccccgaatccgaggtttcgtttttttttattgtttaattttcgttcgttttaattgttttataacattcaatgtgatataatcatcaggaaaaacagcttaaaaagaggtaagcctgaaaaaatgattgacgataaatgtcccgagtgcggtacgaaacttgttgccgacgaaacgcgcgatactgcgctttgcccttgttgcggcaaaaagtacccttacagctccataaaaaaatctgcccgcgacgctattgaaagcggacgctggcaaaaagaaaagcttaataagcaagcttcggagaaaaagaacgttgcggccctcaaaaaaaacattgtcgcggcggcttgcttcggcggcgttactcttgcggcgctgattgctttttgtatcgcaggcgaccgtctttcgtttactttggcggcaattccgcttatagtgattttttatgttgtttttgcggcttttattttgttctcaattgtgcttgccgtaaaaatcaaaaaaaatttatataacggagttttgctgtatgtcaccgcaacggtaccgctcgtcctgatacttgcgatttccgttcccgtttttgtcgtttccatgcattattacggctacggcatgaataaggacggttacatttattccataagtaatgacggagtttcgattgtcgagtaccgcggcgacgttactgaggagtttaccgttcccggcgtcatcgacggaaaaaccgttgtgtcggtgggcgatcgcgtctttgagggcaatacttcaatcacctcgctttcgttgggggagggaattaaaacagtcggataccgtgccttttataacatggcaaatcttgaaaatttaagccttccttctacgcttgaatttgcaaacgttcagtcttttgcgggtgcggcaaagctcaagcagcttgttttgccgcaggcattgaaaaccttaggcaattacgctttcgcggatttaagctccgttacgtccgtaaccgtaccggactccgttacggatatcggcaaaaacgttttttcgggctgtaattcccttactgatttcaccgtgccgtatgtcggcaaacattcggacaggggaaattatacgcatttcggatactttttcggcgcgcctacttatgatatgcaacagtcctatattcccgcgtcgctgaaaaacgtcacgattacaaaggcgctttcactgggcacaaactctttttcggggtgcaataatttaacaagcattaacattctttccgcccaaaccatatcttccgcggcttttgtgggctgtacgggagtggagaggttcgtgtttccgcaaaacatcggatatgtgggaatggatgcctttatgttctggacggaaaatcagacggtagtgcttcctgcgggcgtaagcgatgccgcttgggacgaaaactggtcgcgcgactgccttgccgtaatagtacgggaataattttgcagcggtcttaaaatatatcggtttccgtaagccgccgccttgacgattgttaaggttattcatgccgaaatacggataatatttattattttaaattaatccgaatttttcttgacatttttttcgtatttaactataatagtaaagctggtttggtaagtctgttttgcgcgtccgtcgcggcaatgcttatgtaaatcgcttatgcaccattagctcaactggatagagcgtcggtctacggaaccgaaggttagggattcgaactccttatggtgcaccaaaaggttataatccgaattatttgcttatatcaagcgaatggttcggttttttttatttcggcggatatcaacgtaaaaacggatttctgaaaatgcaaaaattcggttttgcaaataaactgcgggaaaatatcaagcaaataatcgacgccgaaaaagccgtgatcatgaatgtcccgaagtatttacaatccaataagataaaaccgagaagctgcagactctttcagtgagaaaaaacggttaaatgtatctgatttaaccgcttttgtcagtaacttttttatttgttttaagcgtttgaagaagcattacaaaagacattgccaataaaaaaatccagacgcacaaagaacttaccgcacacaaaattttcatttcgccgtaaattccgccgttaaaagtcattacaagagtatattgcaacgacagcacggaaacaagcgcatcgacgaaatttacgtttcgtaggatttttacgcttaaattgcttgcttttcgcgttttaacaaaatttttgacggaaaatgcgattttgtaagttgtgtatgccgccatggcaatcgcgggtattacggtaaagtcgatttctttttgctgcagcaccatcatggaaacgggggcgattaaagcaaggtcggcaaaaaacagcagcaagctgtgagccaagtaaaatttttttcttttttcttgttttttttcttcgctcgcctttgttttcaaaaattttaattcttcggttatgacaaaagcttttatgcttataggtataatgtaatatacggctattcccatattccatgccgacttgtaaaacattgccagaaacacgttgtaaacagtatacgccgcagtaatcagaagagaaagagacgaaagcgcaaatgtcctgaaagtataatcgtttttgatttttttgaaaacggttttcgctctttcccttccttccatatcctttaccgccttatgattttttcataaacatttattttggtgaaaacaaaaattcagcttttttacgctttacggattaaatcaaatccgatttcaacaggtcgttgcctttttcaagaatgtttgccagcttttcttcgttgctgtctataacgggcaaaagttttttggtttttttaacgaccatacttttgtaaacagggtagtttattatgcacattgctatcccgatcactcctaacgtaatgccgcctataaaagcgggaatattgccgcttatcagcattgtaaggcacatgcctccacccaggacaagaacggaaataatgccgaatacataagcaaaaatgcttgccgacaaggtttttgcctgttccagactgtttaatgtgtcggacactgcctccgcttgtctttcaagtttcgtcagttccgctttgtgcttctgtttcctgtcgcgtttcagcgacagcgttacattatccaaaaacaccgatgaggaggaagtaacttcccatccgaaagcttcgtacatatccgccgctttcgcctggtccttggctttaaccgtcttggtaacgtattcataagttacgaaatctttttcattcatttttatatacctccgtaattttttttatccgccttacgtcagccgcacgcagcgcttttcgtttgactttcgcgtaagacagttgtatcatataaaaaagacgggaaaaaatcaaccgacttttgggtgcgttaaacacttcttgtaaaaccgtcacgcaggataagacaaaacgggaggaattgtatcatggaattgttgcctgaggaatatacgagattctatatagtacaagctctctttaaattgatggattcctatgaattcgataaaatcagcgtttccttaattgcggaaaaagcgggcgtgggaagggccaccttttaccgctattttaaaagcaaagaggacgtgattattttttacttcgaaagacacgcgaaagatttcgtctttaaccagagattttatcctcggtgccgcgaagattacgttttgctggtcaaacaaattctgactttattcaaagaacaaaaagctacgttaaagttgcttaaaaaagcgaagttggattcgctgtacctcaattatctcaacaaaagttttgtcgccatgtttacgcgggactatcaggataaaaacccttatttgccgtatatttatgccggaatgctgttcaacgtatccatgaaatggctggaaaacgattgcaacgaagacgaggaaaaacttgccgctcttatcgtggacgcgatttatcgggatgaaaaagcagtgctgtaaaaagcaaattaaataatcttaagtttattgaacttttatcggtttttttataaagatgcaaaatacgaaaatgcaaacaggttaataaaattaatgtcgaatgtcaggttacgtacgggtgaaaaatgaataaaagtgaccaatataattacgctgttttgaaacggctttccaatgtaaaaagcggcgatgacggaatttcggaaaaagtcaatgccgcggcggacataatgatatgagcgggactgtaaaaaagggaatatttttcgccgttgcggcggctgctttgtatgcaatcaattctccgctttccaaactgttgctggattatgtgccgtccactcttatggcgggactgctgtatctgggcgcgggcatagggatggcggtgattgcgccggtgcgtaagacgagaaaaaccgcatccctcgagcaaagccttacaaaaaaggatttgccgtttaccgtagcaatgattcttctcgacatagcggcgccgatatgtcttatgacgggactcaaattcacgacggcggcaaatgcttcgcttctaaacaatttcgaaatagtggcgacggcggccatagcgcttgtcgtttttaaggagaaaatcagcggcagactttgggcgggcattacgtgcgttaccgcggcttgtctgttgctcagtttcgaaagcggcgaaagtctgcgtttttcgttcggttcgctgatgattctgcttgcctgcgtttgctggggtgtggaaaacaactgtacgcgttctctttccgcaaaagaccctttgcaaatcgtgcttttaaagggcgttttttcgggcgcgggttcggttataatcgggttgtgcctgggcgagcgcgtaacggaagtctggagcgtttttgccgttttatccgtggggtttgtagcctacggtctgagtatttttctgtatgtatatgcgcaaaggttgctgggcgcggcgcgtaccagcgcttattatgccgtagctccctttataggtgcgtttctgtccctgctgattttccgtcagctgcccgattatatgtttttcatcgcgcttgccgttatggcggcaggggcgtggttatgctctcaggataaaccgatttttgccggaagaaaaagtaaacgttcggtgcaggaaagtatatcggcggaagagaacgaaaaaaattccattccgtccgaaaacttttgtgaaaaccgtgatgcggataacgttgagtcgcggaaagagaccgaaaacctcctaaacaaagaagaagattcaaaaaacaacgaagcggaagcaaacggaaaaaccacaaacaaaggaacgtgattttaaagctgtgtgcgcgaaaaaaactaaacggttttcgtaatcaggttaaacaataaccgttcacatacagaatatcatgcaaaaaaatccgactattgactcatttaagaaaatttgctataataaaataaacataacgtttttttatgaggaggaggtgtataaatgttttctgatgattgccgtgacgcttttacaaaagagcgggaaaagataaaatcacctcttgaatcggaaaatagcggtataatcaaaaaagaggacgaagagatttcgcctgacgtaaaggcgtggcttttgtcgcacaaagactgcgatataatagcagagggtccctccgattgtatcgaagaaatgaaaaaattgcacgacagggtgtttgtcggtaaaatttatttcgacggtaaagacttttacgacatttacggaggggggaaagccgcttcaaaatcttttgaagcaagcgaagccgaatttagaaaaacgcttaataaaaattccgttgccgtcaagcccgaatgcgaagccgacggcgcgacaaacggcttatgcgatgaaactcccgatttaaagccttgcttgaccgaggaattaaaatcgggcactataaagtgcaaggcggtaaaaaggggtacagcctttaccgtgatgagaaaggaagaagaactttcgcggcttctttacggcaagaagttcgatgaaaaactcgatgacaaaaattatttagataaaataaaatccatgagtaaagagtataaaaacaaaactctttttgccaatattctgggacttgtgggactgttgctgtgcttttccactatgtttttatggtggtttgcgtttccgaaaacaatggaatcgtctttggaaatgttctggctggagttgtttctgccatataaacctgagcagagaaaaatttgtaaattgctgttgtttataaacatcgcgctaattttggctgttgcaattgtgctcaagaaaaaaagtttaaatttcgataattacaatacggttttgacattcacggtatttgcgattttatttggttccttttttgtttctcattatgtagattttttattttcagaaataatattggaagaaagattaataacagctattttaagaatattggttaatatcaagggatttctttatgtgtcgctacccgtacttttccttatagccgcttacagaatagccgtaaatcctttatatttgaatttccgtgataaaaatgccgaggctgttaagtttttggaaagcgcagattacgaaaggtatcttcaattaaaaaacgaaataccttcttatacggtagaataacaaaaagccgtcccggtttaaaggggcggctttttcatataggggtaaaagacgttttaagcttggtataaaactttttttataaatacccgttttaacgttataaatcaagcgcatccgtcttgtttacggtcggatgcgcgttttgcttaataaacaaccgtgacctataaatcagttttggtccgcgtttttgtcggagttttcttgtgcgttttctttttcctctttgcttttcgcgattttataagaaattgcgttcatgacgaaggtggcaatcatgataagtcccacaactatcaccaccgcaagcaaacctttccataaaatatcgagagaggtgagaaggtcggctttattaaaagccgcaactaaggtacataaagcgttcatggtaaatcctccttataaaacaaggccgatgataaggccgcccacgattgcggaagcaatctgacccgaaacgtttgcacccacggcgtgcatcagaagatagttcgtgctgtcctctttaagtcccattttgtggacaacgcgcgccgacatggggaaagcggaaatacccgccgcgcctatcatgggattgattttctttttgctgaacaggttcatgacctttgcgcacataatgccgcccacggtatcgaagacgaacgccagaaggcccagtcccataatcatcagcgtctgaagcgacaaaaacgattccgcctgcattttgaatgctatggtgatgccgagaagaagggttataaggtttgcaagcgtggttttggcggtatcggcaagactgcccagaactccgcattccttgatgagattgccgaacatcagaaatcccacaagcgcaaggcttttgggcgcgataagtccggaaataacggtaataataatggggaagaagattttgacggacttactgacctttttgccgctgtaatccattcttataagtctttcttttttggtagtgcagcactttattacaaaaggctgaattatgggcaccagcgccatatacgagtaggcaaccaccattatgggtccgatgtaattgctggcaagtttcattgcgaccagtatggaagtggggccgtccgccgcgcctatgatgcctatcgacgccgcgtcgtttatgctgaatcccattaaaacggcaaggattatcgtaaggaatatgcctatctgtgcaaacgcgcccaatatcataagcttggggtttacgataagcggctcgaaatcaatcattgcgcctattccgataaatagaagtatgggcaacgcttcggaagcctcgattcccacctcgaaaagccattgaattattcccgcgccttcgcctgccgcggcgttggggtcggtaagcacgttggaaaacggaatgtttaccagaatcgcaccgaatcctatgggcaaaagaagagcaggctccatttgcttcttaatggcaagaaaaataagcaaaaagcctataagccacatcacgacgtgctgccacgtcaccgccgcgactgtttcgataagaaagttcatttccttaaataacctcccatattggacctcctacaaaaaaagaccacaccgccaaaaaaataaacggtatggtcttgtcgtttaaaattaaaccggggtaaaacccgtgttagcgatttaatcacgtaaagaaatgtaccttacgccgactactccccataaatcacttatttattatattctcgctaattcgccgtgtcaagtatatttttaccgttttatgttttgcgtatatgtttattatcgctcttaaccgcgcttttatgcaagaaataaatgcataatcgtgaaattatgcataaaaatcgaatattataaaatttttttgaatatttatgcaaaaatgcttgcttttttcgtttgaggcgcgtataatgataccatacttaaaaatcaaagaggtaaaagaaatgaaaaagtttatgattgctcttgtcgcgcttatcgcggcgtttacgtgcgttttcgctacggcttgcagcggcgataaagttaaaatcggcgtacagacgggcactacgggcgagttttacgtcaaaggcaacgaggacatgatgttcgaggggtataagaacatcgaatgcctgccttacagcaacggcggacttgccgcaaaagccatggtggacggtcttgtcgattacgtcattatcgacaacggtcccgcggctcagattgtggcgcagaacaaggacgtaaaaatgattgacatcgctttgtctaccgaagaatacgctttcggcgtggataaaaaccagcccgagcttttaaattcggtaaacgcgtttatcgacaaaatcaaagcagacggcactcttcaggcgcttttcgacaaatacaacgcgcttgaatacgacgaaaatggcaacgttatcggtggcgacgacgctattacgggcgtggaaagcgcagctaaggataccgcaaatgcggcgggtcagctggttgtcgccaccaacgcggcctttgctccttacgagtacaaaaaaggcgacaagttcgtaggaatagacatggaaatcgccaagatgattgcggacgaactcgggctccagcttgttatcgaagacatggatttcgacgcggtagtgacgagtgtgggtaaaaacggcgtggacatcgcaatggcgggacttaccgtgacggcaacgcgcagccaggtggtaaacttctccaaggcttattacgagggcgcttaccaggtgcttttagtcaaagccgacaataccgagtttgacaactgcaagaccaaagaagacgtggaaaacatacttaaaagcaagtaataatgaaacgcagctggaatcttttttatacacaatttataacctataacggatataaaacggtactcaacggtcttgtcgcgaccgttgagattgccgttttaggccttattataggtattctgataggcacgcttatcgcgcttgtcaaggttatgcccaagtataaaatcatgcccaggattttaaaccgcgtgtgcgacgtttacgttggctttttccgcggtacgcctatggtagtacaactgctgataggcaacttcgtcctgttgcccgccttgggaattcccgccgacggaattaccgttgccatagtcatattcggactgaacagcggcgcgtatgtttcggaaataatgcgttcgggaattcagtcggtggactctggacagcttgaagcgggcagagcgctgggacttacgttctggaccgccatgattaaaatagtaataccgcagtcgattaaaaacatactgcccacgttgggcaacgagttcatcgtgcttgtaaaggaaacttcggtagtaagttttattgccgtaacagaccttaccaaagcgttccgcgcaatcggtgacgcaaactacgagtacgtgataccctatctgatgcttgccgctatttatcttgtgatagtcatattgataaccgtcggcatacgctttatggaaaggaggcttaaacgcagtgacgcaagaaaataaaatcgacgccgctttgcccgtggacaacgtcgccgcgtcggattcaagcccggccgattgctcgggcgaagcatcggacgaaatacttatctcggtcagaaatcttaaaaagagctttggcgacaacgaggtacttaaaggcataaatatcaacataaaaaacggtgaaaaaattgccataataggaccttcgggttgcggaaaatccacttttttacggtgcatcaactgcatggaagacccttcttcaggctcgattttcttcgagggagaggaccttgccgacatgaaggtggatatcaacgttcatcgtcagaaaataggcatggttttccagcagtttaaccttttcaacaatcttacggtactgcaaaacatcatgcttgcgcccgtggttatcgcaaaaa

SEQ ID NO: 4080 - DNA, 32759 bp, Unknown
  16S sequences of unknown bacteria
aatatttcctgcatagggggctttttgttctgtctgtacaatctggggcgccacattccggcgcctggagggggttttcgtatgtccgtaagattatagggcggtttcccaataattgccgaaggaggtcaccgtttgaaagatattggtgatataatccactatcaccaagacgcccaaaatgagggccacggcgaaaaagacgatgaacaggatgagaaacagcttccggcgccgacgaaagccttccatctgctccgcggacaccgacttgccccgcagaaacagcggcatcccgcaggccgggcaaacggtatatccctgggggatgggggcgcggcactgcacgcagaacgccgtcttgttcttgctgctcagctgcacgatgatatacaccagagcgacaatattgaaaaagccggaaagaaccccccagagcaccggattgctgtccccccggtaacaggcgtcgttgtagacgcacagccccaggaacaccccagcggcggcctccagcaggatcaacccgagcagcccgagaagaaagcggacaatcgtgtccaccaactgcgtttcaaatccgtacaaaacaagccctccctcaagacatattgattccaataacagacgccgtcacgcagccggcgatcagcagcagaataaagaggataaaaaaggctttgcgccggcggcggaacttcttaaccttcttcccaggccccaccagcagacggccacaggaggaacagacggtatgccaccgggacaaggaatagccgcagaatttacacgtcagttcaatgggtttggccagccgggtgaccaggaaatacaccagcgcggccgggaacatcaccccggacagcacgccccaaagcactggccgcttctccccccgcaggcgggcgtcgttataaatgcaaaagcccagaagcaccagggccggcaccatgcacggcagaatgaacgccacgttcgaccaggaatcccacgcggcccccgccgccaaaatcggatgcatattcacattcgtcctttcggttatcagatcccggccgacggacaccgtccaacacttcccgagattaggtttgccgttccaacaagatggcccgcacgggggaaccgtccgcgccgtcgattttcaatggggcggccatcagaaaataggtgccctcctccacgccggacaaatcgaggccctccagcagcaccatgccgctgctcagcagctgccggtgcaccgccacggtgcattccgccggggccaccgactggccctccacccccagcagccgcaggccgctgtccgccagcacaaacgccgcgctgggactgagctccatctttcccttgaacaacacccgggagcgcaggccgggcaggagcgcctccgcctgggcccctagaagaaggccgtcgaaattaaccacgctgcattccccgatgcaggcgtccaacggcacatgggcggcgtccgtcccgtcgggaacaaagtgccggggagcgtccatatgggtgccgttatgcaggcaggcatgcaatgaggaggtattgcacacgtcgccgaactccaggcggcagagggcttccagcgaagggctggggtcgccgggatagaccggagcgctcaacatttcccgggaaatatcgactgctttcatcccttttccgcctttcttgaaacggctgtaccgctttcaacagtatagcgcaatcccacgtcgattgcaagccgccggggattgccaatccctttttctgcggacccgccggcaggacgatcgtcgtcaacagatattctctgcgtcttcccttctcgtcttatccggcctcgccatagccttccaaagacacggtaaagcgactgttcggcgagccctgcatctccgaggctttcatgcccatgacggtattgcagcggccggtttcccccacaccgagactgccgatagccggcccggtcgccttgacctgttccccgttctcgttgaaccatttcacccggacagcacaggtctttttccccgcaatcccgtcctccagccgttttgcactgcagctaaagttaaatgtgcagccgccgtccgcgtccatttttacgccggatatggccgcgtccagaatctgaaaacgcgcaccataggcggtgatttccagaggaaaggtctgcgaaaaggtaaaagcggctgcttttatcgcgtttgaggttgtgggagcggacgtcggggggatcctggtggttttcttcacggtggtcttggtcgaagccggacgcgcggttgtccgcgttgcggaggatggactttcagccgacgctgtggaagatacgccgctggattcgcccgtgctttgtgtcgtcggccccggctccgtatccgaggccgaagatccggtggtggaagcgggggtcggcttcggctctgcacaggaagccagggaagccgcaaacactaccgcgaaaagaacggctgtagcccgtttgatcaatttgattcatacctttctcttatcaatctccatcatgcagataaatagtaccgcacctgttttgggttgtcaagcttccccatggtacataccggaccggggattgccaattccttttttcaccggtatactatatctattggaaaggatgaacgcttatgaacagccgacaattaaacgccgcccgatttctcggcttcgccgacgcctatgacaaggcgcggcccgcatgcccgccgcaaattctggagattgcccgcgtataccgcggctttccgccgcggacggtggcggacgtggggtgcggcaccgggctgtctaccctagcgtgggcggaggcggcccgggaggttgtgggcatagagcctagccccgacatgcgcgcggcggccgagcgcgcagcggccggctgcccgagcgttcgcattcagccgggctatggcgacgacaccggcctgccggacggatgggccgatgtcgtcgcctgctcccagtccttccactggatggaaccggcctctaccctgaaggaggcggcccggattctccagcctggcgggctgttcatggcctacgattacgacaccatcccgctttgcaacaggcgggcggagacggcctaccaggtcctgctggcctatatccgccgtatggaggacacgcacccggcggtgcgcggcacctttcgccgctgggacaaggatgggcatttgtcccgcatccgggacagcggttggttcccattctcccgggagctggtcttcgcccatacggaggatgggagcgccgatcggctgctcgcgctggccctcagccaaggcggggtgcaagcgctgatccgcaccgccccgcaggccgtcctgccacagctggaggcgttcgagaaagcggtgcgggccgctctgggcgatcggccctgccccatgaccttcagctaccggctgcgcctggggatccgcccggacacggcagccgccacataaaaagtcccctgtcgtaccggctctggaaagaagcgcgggcggcaggggactgcttatgggggggcttgtttcgtgtccggaagaagccgtccggaaccgcggccaataaaaaaaggctgcataacgacacgtatcaactctgtacgttcatcatgcagcctgacaatcatagcgaaccttcgccttagactcatcgctttgcgtcgctggctttcgccagttttgccaaatatttacttttttaacgtgtattattataggggaaaaatgtctctttgtcaacttaattttcgttttttcgcgtgaaaattcaccacagatcgatccatgatgatcttccaacattttaccgccgcaattttgtcccggacggcacacatccccgacggaatatttccgccggggatgtgtgcgacggctgaaattacagccgatcctggatagaggcgagaaggccgcctttttgaataatattctgaataaagggcgggaaaggctctgcctggtaggttttcccggtggtcagattggtgatgaggccggtgtcgaaatccaccttgacctcgtccccggcctgaatatcccgagcggcctcgtcacattccaagatggccaggccgatgttgatggcgttgcggtaaaaaatccgggcaaaggtggaggcgatgacgcaggaaatgccgctggccttgatggcgatgggcgcatgctcgcgggaggagccgcagccgaaattcttacgcgccaccaggatgtcacccggccggacgcgagaaacaaagtccttgtcgatatcctccatgcagtgggcggccagttcttcatggctggaggtgttgagatagcgggcggggataatgacgtcggtatccacgttatccccgtaggtatgtacccgtccttgtgcggtcatgggtattcctcctttcatttacagcgacgcggggtcggcgatgacgcccgcgacggcggaggccgccgccacataggggctggccagataaacctcgctgtccacatggcccatgcggcccacgaagttccggttggtggtggacacagcgcgctcaccggcggccaggatccccatatggccgcccaggcaggggccgcaggtgggggtggacaccacggcgcccgcctccacaaaaatatcaaacagtccctcgtgcatgctctgccgccagatttcctgcgtggcgggaatgatgatgcaccgcacgccgtcggccaccttgcgatccttgaggatttccgcggccgcccgcatgtcctccatgcggccgttggtgcaggagccgataaccacctggtcgatgcgtaccgggccgccattttccccggcggtgcggcactcgtcgatggttttggtgttctccggcaggtgggggaaagacacagtggggcgcagagcggacaggtcgatggtcacgacctgatcgtagaccgcatcgggatcggcctcgtacaccacgggcgtgcgcttgaaacggccctccacataggtcatggtcacgtcgtccaccgggaacacgccgtttttcgccccggcctcgatcgccatgttggcaatgcagaggcgatcgtccatggacaggctggccacgccctcgccggtaaattccagcgagcggtagagcgcgccgtccacgccgatttccccgatgaggtggagaataacatccttgccggacacgaaccggcccagccggccggtcagcaccacctgaatggcggagggcaccttgaaccacgccttgccggtggccatgccggcggccaaatcagtggatcccacgccggtggagaaggcacccagggcgccgtaggtgcaggtatggctgtcggcgccgatgacgcagtcgccgggtcccaccaggccctgctcgggcagcagggcgtgctcgatgcccatgcggcccacgtcgtagaagtgctcgatgcccattttaccggcgaattcccgcgtctttttgacctgctcggccgccttgatgtccttattaggggtgaagtgatccatcaccagggccacccggcttttgtcgtacacccggcaggcgccgcagcgttcgaactcgttgatggccacaggggcggtgatgtcgttgcccaggcagagatcgagcttcgcctcgatgagctgcccggcccccacctccggcaggcccgcgtgggcggccagaattttctgtgtcattgtcatacccatggtttcaatacctcctgtatggttcgtcagatatcgccggtgtgaatggtgccgtcgccccgttccagggcagtgatgccggtgcgggccatttccacaatgccgaagccttccagctgggccaggaagtgatccacctggcccggacggccggtcatttccagggtgacggttttctctccgatgtccagcacccggccgccgtaggtctgggccatgcgcagcacggcgctgcggcccgccttctcggtatccagcttgagcagcagcagctcgctgcaggtacagctgtcgggttccagcacctccacagtgaggacgtcctccatcttgaggagctgccggttgagctggataaaggtggcctcgtcgccggtgaccaccagggtccagcgggagaactccggcgtctgggttttgcaggcgacgatggaatcgatattgaagccccggcgggaaaacaggccggtcacccgcagcagcacaccgggatggttcaccgtcaggacggaaaacaccactttattttcctgcatccgaatcctatcctttccgggcggtatggcccataaaaccgatttttgaaagaggaagcggcctatctctcaacctcaatcctcctccatttccagcaggatgttttccaccgtgccgccgggagggatcatgggcagcacattggcgtcgggagaaatctggcagtccaccaccacggggccgccggccgccagcgcggcgcgcagcaccggctcgatatccccggtacgggcgatccgcatcccggtgcagccgaaggcctcggccagcttgaccaaatcggttttccggtggggatcggtggctgagaagcggcggccgtagaacaccttctgccactgccgcaccatgcccagcacccggttgttcatcaccagcaccacgatgggcagattataggaggccagggtggtcagttcattgaggttcatatgaaagctgccgtccccggaaatcagaaccacccgcttatcggggcagccgaactggccgccgatggcggcgcccaggccgtagcccatggtgcccaggcccccagaggtcaggaaggtgcggggggcgcgcatctcgaagtgctgagccgtccacatttgatgctggcccacgtcggtggccaccactgtatcatcgggggtgaggcggcggagcgtctgaagaatcgccagaggatcggggacggcgtccggatccgacaggtcggggacgaccggacggcggcaggcctccaggccctggttccacgcctcatggcggcgggaaggcaggccgtcggccagacgggccagcacctccttcaaatcgcccgccacccgcacggcagcgggaatattcttatcaaattccgcgtgatcgacatcgatatgcaccacttcggcatggggggcgaagccggtgcggctgcccgccacccggtcggaaaaccgggcgccgcagaccagcagcaggtcgcattccctcgccgcccggttggccgccagggtgccgtgcatccccaccatgcccagccacagccgatgacgcgccgggaaaccgcccagacccatcatggaggcacagaccggaatatcctgggattccgccagggccagcagctccgcctcggcgccggaggagatgacgccgccgccaaaatagatcaggggctgccggcaggaggccagccgttccttcgtcatggtcagccgctcctccttgggaggttcggcggggcgggcgggcgcggcgggggccggctcgtattccgccagggcggcagtgacgtccttggggatatccaccagcaccgggccggggcggccgcttttcgcaatgataaaggctttgcggacggtatccgccaagtcctccacccgtttgacaatgaaattgtatttggtcaccggcatggtgatgccggtgatatccacctcctgaaacgaatcccggcccaggaggggcacagccacgttgccggtgatggctaccatggggatggaatccatgtaggcggtggcgatgccggtcaccaggttggtggcgccggggccggaggtggcgatgcagaccccaacccgcccggtggcgcgggcgtagccgtccgccgcgtgggccgccccctgctcatgggccgtcagcacgtgggtgatgcgatcgctgtatttgtacagcgcgtcgtaaatattcagcaccgatccgccgggatagccgaatacggtgtccactccctgttcgagcaggcattccaccaggatttccgaaccgtttttctgcatcgttgtcatcctttcttccgcagacgctcatggggtatagaaaagccttcgcctctttgataaagagacgaaggcctgtgttcctccgcggtaccactctcattgcccgccgggcgggccgctccgcgcatcagcggcggcgggcatccttacagatgtcgtccggccgtccgaatgccgtcccttctaacggggggaaaccgttcccgcctactgaccggccgggaccgggttcagcggacagctcgggggatgagaattcgccgggtccctccgccgcctcgcaccgaccggcagctctctgcaggaggtttccgggtactggttccccgtcgtcacctttatccatatgattattaggataatgatacaacgccgggcgacgtttgtcaaggggtcaggttttcaatttcatggcgtccttcagcttcaggcgctggccataatgaagcaccgaggcggtgtaaatccgcaccgacaccgccgccaccaggacgatggacaccagcagcagggccagggaaatgagaatatccatggcgggcacctgctcgttgagcagacggaagggcatgacgaagggcgaggtgaacgggatataggtcaccagacgcttaatgccctcgctgggcaggaacatggtggcgtaggccgcatagaaggagatgaggctgaccagaaccaccggcatcatagcggagttgagatcttccgcgcggctgaccgtcgcgccgcagaccgagttcatcacggcgtacagcgcgtagcccagcaggaagtagaccagcaccagcagggcggagccgaaggtgaaggaggacagggccagcggcatgcccataatggtgaagccggcgggcacgatggtggcgaagcagacggcccccaccaccaggaaggccagcagctgcaccaggccgagcacacccatggccaggcatttgcccaacaggatgcgggagggcttcgcggagaccaccagggtttccatcacgcgggaggttttctccgaggccaccgacatagccacgccgtagccgtaatagtagacagcgaaaaagacgataatggtcagcaggatgccgatggcgtagccggaaacatccattttgccgacgatctggctcgaatagctcaaatccgtcaaggcggcctgctggacatcggcggagacaccggcctgcgagagcagacctgccacgtacacgttctgcaccacccgggtgagggtttcggcgggcagcccgctcatgaaatcggtggagtagaaggtcagctccggctggccggtcttcccggcggcaatcaccaggatggatttacttttatcggtttccacctcggccttatagtcgttcagcttattcgactggccggccacgaagtcgaccgtgggctgggccgcggtcaaggcctccaaggcgccaggaatcagggaggcgtcgtcgataagataacaggtgtcggatttttccgcgggagcgggctccgccgtgccggtatccggcgcgcttttattcatgtccacgacacgcagcaccgtgcagcccgccacgataagcaccagcacgatgacggtggtgagaataaaggcttttttccgcaaggcgtcccgcagggtgaagcggaacaccgtcagtacgtctctcattgcacagcccctactttctccacaaagatttcatgcagcgacggttcccggatttcgaaacgctcgggaaagataccggccgccaccagcgcgttcaggaaggctttggccatggcgtcgccttcaattttgaagtcgcagccgtcgggccgccgctccagcaggcgcaggcccagactctcggccagggcggtcacgtcctcatggcaggacacgctcagattggtatggccgtagccggccttgatctccttcaggttgccctgcagcacggttttcccttgggtgagcagcaccagatctttgcagtattcctcgacggtggccatctggtggctggacatgacgatgtattttcccgccgcgatcagctcggccaggacgcttttgaagacatccacattaatgggatccaggccgctgaagggttcgtccagaaaaatcagctccgggtcatggatgacggtggcgatgagctgcaccttctgttgattgcccttggacagcttttcggccagcatgtcgcggtattccgtaagctgcaggcgggtcagccagcgctcggccgactcggtagcggcgcggcggctcatgccccgcagttcgccgaaatagaccagctgctcaaggaccttgtttttgggataaattccccgttcctcgggcatatagcccacacgcacccgatttctatccagcggctggccgttccagaggatgtcgccctcgtccttgttcatgacgccgaggatcatgcggatggtggtggttttccccgccccgttggtgccgataaggccgaaaacccccggttcgtccatggaaaagctgatggaatccaccgcttttttcgttccaaaagatttgctgacatgacgcacggtcaagcccatgtgtgtgtccctccctcaattcgagtacccctattataccgtataacagggggattcgtatagaccttaagataaatagatcgagtttttaagaaactcatagttttgcacgccggggagaaactatgagcgagaacggcgcaaggaaaggaggcgacgccatgatgatgccgtatccgtacacccttaacccgaaaaagcggtcagaattcctgccgccggtgattgtcggttcccagaggcgcaacgaattagccgcttttccggttgagggccggagcaaggaccagaacaagcggcgacgagcttaacgaaacaggcgggaggcatccggtgcctcccgcctgtttcgtttatggggaaagaaaattatttgccgtagtaaacccgcagatacatctccttgatttccttcatcagaggatagcgggggttggcgccggtgcactggtcgtcgaaagcctgctctaccatctcgtccagggtatcgaggaagtacttctcgtccacgccgtattccttgatggtcttcttgatgcccaccttagccttcagctcgtcaatagccgccagcagattatcgaatttttcctggttggtcttgcctttgatacccaggaagtcggcacactcacagtaccgctccagggtatggggatactggtactgcgggaaggtgcccatcttggtcgggcaatccacagcgttaaacttcatcacttcattgatgagcagggcgttggccacaccgtggggcaggtggtggaacgcgccgagcttatgggccatggaatggcacacacccaggaaggcattggcaaaggccatgccggccatggtggaggcgtcggccatccgctcccgggccaccggatcgttggcgccgtcgttataggcgcggggcagataggtgaagatgtttttcagcgctttcagcgccaggccgtcggtatagtcggtggccatcatggaggcgtaggcttccagagcatgggtcatggcatcaatgccggaggcagacgtcaggcccttgggcatggacatcatcatatcggcgtcgataatcgccatcttgggcagcagctcatagtcggccagcgggtatttcacgccggaggtctcgtcggtgatgaccgcgaagggggtcacctcggagccggtgccggcagaggtaggcaccgcgatgaagtaggccttttcacccatcttcgggaaggtgtacacgcgcttgcggatatccatgaagcgcatagccatatccatgaagtccacgtccggatgctcgtacatcacccacatgatcttgccggcgtccatggcggatccgccgccgatggcgatgatgcagtcgggctcgaaagaggccatggccttggcgccttccttggcgcaggccagggtgggatcgggcgccacatcgtagaaggtggtatgggtgatgcccatctcgtcgagcttatcggtgatggtcttggtatagccgttcttgtagaggaaggagtcggtcacgatgaaagcccgctttttgcccataacggccttcagctcagccagggccaccggcaggcagcctttcttgaaatagaccttttccggcgcgcggaaccacagcatgttctctctcctctcggcgacggtcttgatattgatcaggtgcttgacgcccacgttctcggacacggagttgccgccccaggagccgcagcccaaggtgagggacggcgccatgctgaagttatacaaatcgccgatgccgccgtgggaggagggggtgttgaccaggatgcggcaggttttcatccgggccgcaaaggcatcgatcttgtctttttcggtcacggcgttgacgtacagggaggaggtgtggccgtagccgccgtccgccaccagctgatccgctttgttcaccgcgtcggcgaaatccttggcccggtacatggccagcacgggggacagcttttcgtgagcgaattcctcctcgatgtccacgctctccacctggccgatgaggatcttggcggtttcgggcacatccacaccggcgagcttcgcgatggtgtgggcggactggccgacgattttcgcgttgagcgcgccgttgatgagaattgtcttgcgcaccttttcgatttcgtcgggcttcagcagatagcagcccctagcctcgaattccttgcgcaccttgtcatagaccttgtcgagaacgatgaccgactgctcggaggcgcagatcatgccgttgtcgaaggtcttggaatggatgatagagttgacagccagggtgacgtccgccgtgtcatcgatgacggccggggtattgcccgcgccgacgcccagggcaggtttgccagaagaatacgccgccttgaccatgccggggccaccggtggccagaatgatatccgcgctgcgcatgacctcgttggtcagctccagggagggcacgtcgatccaggcgatgatgcccttgggcgcgccggccgccacggcggcgtccagcaccaccttcgcggcggcgatggtgctcttcttggcgcggggatgggggctgataacgatgccgttgcgagtcttcaggcaaatcagggttttgaaaatcgcggtggaggtggggttggtggtggggatgaccgccgccaccacgccgatgggctcggcgatcttctggatgccggccacggaatctacttctaacacaccgcaggttttcgtatctttatactgattatagatatactcggaggcgtagtggttcttgatgaccttgtcttccacgatgcccatgccagtttcctccaccgccatcttggcgagcggcaggcgctgctggttggcagccatagcggcggcgaagaaaatcttatccacctgctcctgggtataggtggcgaaaatacgctgggcttcgcgaacctcattcatcttggccaccaaggcgtccaccgtatccaccaggccggtgttcgcggtttcggcggcgggggtcgtcagttctttcttgctcatctgctttgttcctccagttcctatttcccacaaggatagttgttatttttttaacaatttaattatatcaggtgtatccctctctgtcaactcatcatttccccggctttaaccaaaatgcagaagggcaaattatgtaaatcgaccaattacctgacagccatgcagagaacgacaaaatccccttggaagcgggcggcattcttatgaaaaatatccactatgcacataagttcccaagcagtttgcatcaaaaggccgataaatgcaaattgtttgttaaatctacaagaaactctttacagagtcctttttaaagttgtataatacatatagtttcaggcgatttttaattgccaaggctgcaaacggaaaggagtcttaccacatggaactgaaaaatctgattgcctcgagcgaaaccgtcgacatctaccgggagggagacaaagcggttaagatcttcaaaaccgggcggaagaccgacgctttgtatgaagcgctgacccatgcccgcatcgagtataccgacctgctggttcccaccattcacgaagtatcggtcatcgacgggcactgggccatcaccatggatctcatcgagggagacaccctggaggatctgatgaagaagcatccggagaacgccgacaggtatctggaggatatggtggatctccagctgaaggtgcatcaggagaaaatgcccaagctgagcaagctgaaggataagctgacccggctcatcaacagcctggacaccatcagcgattccatcaaatacgagctgctgacccggctggacagcatgcccaagcatgtcaagctgtgccacggcaacttcgtccccgctaacatcatcatcaacgacaagggcacctacatcgtggactggatcgccgcccgccagggcaacgccagcgcggacgtggccaagacctatctgctgctgtccctccagtcccccgagatggcggagaagtacatgaacctgttctgcgaaaagacccatacgtcgaaaaagtatgtccaggaatggctgcccatcgtggcggccgcccgcctgacggagaaccgtccggaggaaaaagagctgctgatgaaatggatcgacgtcgtggcgtacgaataaggcggcgcgaatcgcactgatcaaagccgggcaaatgcgggaaagtcccccatttgcccggctttttccgttttttgcggtttcgcttgcgcgggacgcccgcggtctggtataatgagcctcccgccggaagccggcggtgacaaagcctcttgtatggggacggcggagtgaaaccgcccgctcgcccgcccggccctccttgttccgccgcaagaaggagctgccggacaccatcaccgcggcggagaattggagtgttatggaaacgcaggcgcagcaggcacccccgtccaactggaagaccaaaatcgccctgtttctgaccgggcagaccatctccctgtttggctcctgcctagtgcagtacgccatcgtctggtatatcaccctgaccacccaatcggggatcatgatgatgatctccaccctatgcggttttctgccgcaggtactgatttccttgttcgcaggggtgtgggcggatcgctatcatcgcaagcggctgatcatctgcgccgacaccctgaccgcggtttctacgctgatcctggccatcctgttcctggcgggacagggcagcctgtggctgatattcctggtgtcgggcatccgctccatcgggcagggaatccagacgccggcggttcaggcggttattccgctgctggtgccacaggacaaactgatgaaggtcaacggcatcaatggcagcgtcacgtccatgatgaccctgctgtcccccgcggtcagcggttggctgatggcggtggcccctctcggattcatctttctaatcgacgtaatcacggccgtcatcggcatcagcatcctctccgtgcagcgaatcccgctgcaccaaaaggcgcgggaaaaacagaagggcggctacctggacgacctgaaggccgggctgcggtatgtgaaaagaagcggatttatccgcgagctgctgattttctacgcggtgtttttcttcctgctggtgcccgccgcgcagatgacgccgttgcaagtgacccgcaccttcggggacgacgtatggcgcctgaccctggtggagatgctgttcagcatcggctcggtggcgggtggcgttatcatcgccgcctggggcggtttccgcaaccgcatcgccaccatcgcctttgcctgctcgtgcttcggattctgcaccgcgctgctggggatcccgctgaacttctgggtctatctcgcggtgatcctgatgaccggtgtgtttgtgccttttttcagttcggcgctcaccgtactgctgcaggagcgtatccaatccgacatgcaggggcggatattcagcctgctgcagattgtggtgaccgccgccatgccgctgggcatggtgctgttcggcccgctgggggacgcgatacccatcgaggttctgctgctggcgaccgggctgctgctggtgcttctgggcggcggcatctacacccacaaggcgctgcgccgggccggggagccggtgatacaggaagagcctcccactggcgaaagcgaagctgaaacggagtagacaggagggcgcacatgcataagctgacaaaagaggagctgcccgccatcgccccactgttcgagggcgtgcaggaaaccatggtctggtcctgcctgcaagggctgatgggggaagcgtacgccgaagaggaaaccccgcccgcctgcgcccagctgctgctcggcgatttctgctttttcggcggggacgccagggcggccggggcggcggagctggcggggcacatccctcgctggctgctggcggtaccgcccgacgcagcttgggaggccctcatcgagcagagaaacccggggcggttcgagcgcgtcgagcgatacgcctttgagaaggagccatcggccttcgatcgggcgtatttggccaggctggccgccgttccggcaggataccaggagcttcccatcggccgggagctgtatgaacagctgaaagccaaagaatggagccgggatttggtcagccagtttccgacctgggaggattaccgggcaaacgccgtggggacggcggccctgtgcgcggacgaaccagtctgcggcgcgtccacctacgcgtattatgaaggcggcatcgagattgaaatcgacacggcgccggagcatcggcagcggggactggccacggcctgcgccgcccggctaattcttacctgcctggatcgcggcttgtatcccagctgggatgccgccaacccgacttcagcagcactggcggaaaagctgggataccggccggcgggagcctatgttacctatgcggtcacgccagtctgacaaaaccggatagaaaaagcgccggctgcgtacacagccggcgcttggcttatttggcgggttcttcggcgatctgaaaattggagaaggtggcggccaccttcaattcggggatcttcagggacagcagctggccggtctgcggatcggacagcatctcgaactggccgttgaccgactgaccggtgacagacagccccttatcggtcatctgcccctctcccccactgcgaaagccggcgtccagcgcgtccagaagccccttgcccagggcgctttccggcacggcggccggatccacgccgaaggacaggccggcatatttgaccgagatggtctccccgtcccactccatggacatgccgttcagggtggcgggttcggtgaattccattttcagcgtgccggcggacatccgggtcaaatgtcccttcacccgcatatcctgatacgtcatatccacatcgcaggcaaagccggtggtcaccggcttctcgggattcttattttgcgagttgcaggctgtgcagagcagcagcgccatcagcagcgccaggcacaggccgaaaaaacggcgggtcatagaactactccatttctccggctgcacagagttggccgctccctttccgccggcgaaacggagccgatgagtctccgcccggacggcggcggcccatcggcttccccgcgtttattccaggcgcaaaaacaacccgcccagttcctccagcaaatcggaaggcagcatcgcgtgctgcgaaatccgatgcgccgccgcgtccccggccagtccgtgcagatgcacgccgcacatggccgcgcgatagggctccatcccctgcgcgataaaggaagcgatcatacccgccagaacatcgccgctaccgccggtggccatgcccggattgccggtggtattcaccagcagggtctgcccgggagcggcgacaacggttttactgcccttgaggacgagaatcacctgctgctcctccgcgaagcggcgggctgtctccagccggttatcctgcacctgttcgatggaacagccgagcaggcgggccatttccccgggatggggcgtgaggaccagcggaacctgggtcgttttccttatatctatatgctgggcgacgcaatttataccatccgcgtccaacaccactggacaggaggcgtgacgcagaacgtcctccaccaccgccggcacctggccgccgcagcccaggccgcagccaaccaggacggcggtgcagcgggccagccgctcccgcagcttctcccgcgccgccatggccagaaggccgtcgccggtttcaggcaagggcaaaaacagcgcttccggcacgctgccggcggccagaggatacaccgaggcgggcatggccgccgtcacgagaccggcgccgcagcgcagagcggcccgtgcggccaggatggcggcgcccgccataccatagctgccgcagaccgacagcaggtggccataggtgcccttgtggctgtccgccggacggggctggaagcaatggaccaccatatcccaatcgataatcgactgatcggaggtgaactgatcgatgagccgctcgtcgatgccgatgcccaccacctccaccgcgccgcagacggcggaggatttggcggacagcaggcccggcttcatggcggtgaaggtaatggtgcggtcggcggccagagtatcgggatcgcacaggccggtatcgcagtccatgccgctgggcacgtcaatggcgatggtgatcgcctcggcggcgttgacctggcggaacagggggcgcatataatcgggcaaatctccgtgaaagccgataccgtatactgcgtctaccaccagctgcgcttcccgcacagcgctggctgccatatatggctcggtctccagattgagaacggaaacgccaaggccttccatgcggctgtacatctcccgggcctgggcggactttggctgaccgcacagcagtacggcggtcaccgcgaagctttcctccgccagcttacgggccacgacaaagccgtcgccgccgttgttgccgctgccgcagagaacgacggcggtgcggcccgtcaggccgtccaaggtgcggatccgccgggcggcggcgcttcccgcgttttccatcagccggcggtaatccaggccttcctccaccgccgccgcttccagcagacgcatgcctctggctgtcagcactttcatggtgttcatcctttccgaatttttaagaatgtaagcgcaggagacaagaaatgcgggccaccattcatggcccgcatgcggtttttccagaggtcccgcacaaggcacatcgagcgcaggaactagaatgtcgtgcaacatgttccatgttgcacgacatccggatcacatcgatttccttttcatctccagctccaccagcttggtcaggccggatttcagcgcgttcagcacccgctcctcgggagaaaacaccaccagggtgtggccgttcttcttgctgtgataggtgaagcaccaggtcgccgcctccatggacggcgccgccatcaccgtccgatcaaagtgacggttggcatattccgccgcgttgtagggcactaggctttcgattttcgagccgctcacggacacgatgcgcttgcgcttgcgctgggcgataatctgatcaatatcaatgtcgccgttggtgacgctgtactcatactccacattctggctggtgatcagccaccaggccccgtagccgatgccgaccaccagcaccatcagcggcggaaacagcaaaaacagggccgccgtcagaaccagggccgccagaatcaccagaaagatgatgccatattccttaccgccctttttcttggcgacaatttgctccacaaaagtatccatcggttcttccactccttattcttatggtgtcattatagcatacccttcccggacaatgcaaggaactgggcggaaaaacccatgaattttacatgaacaagcctcggcttttcagcaggctgcacagacggccgctgaaaactttggtggttatgaaagggtggcattttgttttgctttttcacgcgcattttaaaaaaatccactatttttttaataattcttgatagaacctattcaatgtgttacaataataaaaacggccattttatattccggccgtttcaaggaggagcttatggaaaaccgtgtgcaaagcatcgtgtcccgggaaaacaagtctgttaaaatcggtgtgatccccggccatttcgccaccaaccactcgcatgtcaattattacatcgacatgaccgccatcaagagccagcataagatggcggagagcggtgcggccgtcctggcggagcactatcgcacggtcacgccggtggacaccatcatctgcctggagggcaccgagatgctgggggcctttctggcgcgggagctgtcccagtccggcccgtccatgagcgcggggcgggacatctgcgtcatcacaccggagctgaacgccaacaatcagatgattttccgggacaacacccagaagatgatttggaatcagaatattctgctgctgatctcctccgcctccaccggcaagaccatcaaccggtcgctggagtgcttacagtattacagcggacgtctggtgggtatcgccgccatattcagcgccatccaggaatcccacggcctgccggtgcacgcgatattcggggagaaagacattccaggataccagacctccatctcccacgagtgtccccaatgtggggctaagcagaaaatcgacgccatcgtcaacagcttcggatactcgaaggtatagaaaaaccggcatgcagcgcgctgcatgccggttttttattttccgatgtctttgcggtagtgggcgttttcgaactcgatgtgctgcacagcctcataggccttgtccagggcggcggcaacggtatccgccacggcggtcacgcccagcacccggccgccgttggtataaaagcgaccgtccttccacgcggtgccggcatggtagaccgcgtaggcctcttgcagctgcccgtcctggtcgaggccggcgatgggcaggcccttgcggtaagcggcagggtacccgccggaggccatgaccacgcaggcgcaggcttcttccttccagcggatatccagctccgccagtcgttcctcccggatggcgtccacaatatccagcaaatcggtttgcagccgaggcagcaccacctgggtttccgggtcgccgaagcggcagttgtattcgatcaccttcggacccttgggggtgagcatcaggccgaagaacaagcagcccttgaaggggcggccttccttggccatagcgtccacggtgggctggaaaatatgctccatgcagaaagcggcgtcttcggccgtgtaataggggttggggctgatggtgcccatgccgccggtattcgggcccatatcgccgtcaaaggcccgcttgtgatccttggaggaaaccatgggcttgacggttttgccgtcggtaaaggccagcaccgagacttccgggccggtgaggaattcctccaccaccacccggctgcccgacgcgccgaacacccgatcctccatgatctccttgacggcctgtttggcttcctcatacccgtcgcagaggataacgccttttcccagggccaggccgtcggccttgaccaccgccggatagctgtcctgcagacgaatataatcgagcgcgtccgccggcttgtcaaacacctcatagccggcggtggggatgccgtattttttcataaggtctttggagaagaccttgctgccttcgagaatggcagcgttggcgcgggggccgaaggcggggatccctgccttttccagcgcgtccaccatgccggccaccaacggatcgtccggcgccacaaagaccagatccaccatcagacgggtcgccagctccaccacgccggccacgtcggtggcggacacatcgaagcatttggcgtcccgggcgatgccgccgttgccgggagtgcagtagagcttcccgcagcgggggctttccttcagcttgcgtatgatggcgtgttcacggccgccgccgcccaccaccagaatatcctttttttccacaggccgcccgcctttcctcaatgatggaacagccgcaggccggtgaaggccatggcgatgccgtatttattgcaggtttcgatcacgtgatcgtcccggatggatccgcccggctcggcgataaagctgacgccggacttatgcgcccgctcgatgttgtccccgaaggggaagaaggcgtcggagcccagggacacgccggtgagggtgtccagccaggcccgccgttcctcgcgggtcaagggttccggccgggcggtgaagaactgctgccacgcgccgtcggccagcacgtcctcgtattcgtcggagatatatacatcgatggtgttgtcccgatccgggcggcggatatcgctccggaagggcagggccagcaccttgggatgctgccgcagataccagacgtccgccttgttgcccgccagacgggtgcagtggatccggctctgctgtcccgcgccgacgccgatgacctggccgtccttggcgtagcagacggaattggactgggtatacttcagcgcaatcagggcaatgagcagatcccgcttggcagactcgggcagatcggtgttgtcggtcacgaggttgcgcagcatgtcctcgtcgattttcacttcgttgcgtccctgctcgaaggtgatgccgaacacgtctttatgctcgatgggcgctggggtgtaggtcggatcgatcttcaccacgttgtaggagcccttgcgcttggttttcagaatttcgagagcctccggggtgtaatcgggggcgatgatgccgtcggacacttcccgggcgaggagggcggccgtctgcttgtcacaggtgtcggacagggccacccagtcgccataggagctcatccggtcggcgccgcgggcgcgggcataggcgcaggccatatccgacaactccagatcgtccacgaagtagatctttttgagggtatcggacaggggcagggccaccgccgcgccggcggggctgacatgcttgaaggaagcggccgccggcaggccggtcgcctctttcagctccttgaccagctgccagctattgaaggcgtccaaaaaattgatgaagccggggcggccgttcaacacctcgatgggcagctcgcggccatcctgcataaaaatgcgggagggcttctggttggggttgcagccgtatttcagcggcagttcgttcatgatacttcacattcctttcgcagcgcaattcccgttcattgtccctggtgtttgttaaaaagcaggctcgttaccgcaccggtttccaaatcgatggaccgggtgaagagggagaccttattgtccgcgttcaggttgtcccataccgtccaggaaaaggtctccagatccccttcgatggtcacgggaaccggctctccctcgaaagagggcagggggttcccgtcctgctggtaggtgtggatgaaatggccttcgccggggcggggcgcgtcataatcaaagaaatacctccgggtggatgcgggatcgccgtcggcggatttgagaatggacaggcggtagcggtcggccttcggctccaccacgccggaaatgcggggggtatagttgggggcgtccggctcgaaggtgcgggagcgcagcgcctcttcgaaggttttccccgcttcgagcgcgtcataaatcgtgtcggtctgatcgccgttggtgacgatggtgacatcgccgcagacccgcaccggcgcgtagatgatgagggacggatccaccattttgctttcgtcgaaggctttggtgcggatgccgcggccgtcgatttcaaaaatacggttgcgggagttctcgctccggcccatgatgaagtaggcgatatagaagcagcgggcgtccgcgcttttgcccaggacgatgccgcggcccggataggtggtggcgctcagttctttggacagcgattgtatctgcatagcattctctcccttactcttgaaaaagcggccccatcctccatagaaaacggggccgggttttattcgtcaacgacggcgatgttgccttccacgcggattttcccttcgcagaacagggaaaccgccttcggcagcagttcccattccgcctgccgcatgacgcgcagctgcagggtttccggagtatcggcgggctgcacggccaccgctttttgcaggacgatggcccctccgtcggggatttcgttgacgagatgcaccgtcgcgccggtcaccttgaccccgtaagccagcgccgcctcatgcaccttgaggccataaaagcccttgccgcagaaggccggaatcagagacgggtggacattgagaatccggttgcggtaccgggcgatcaccttctcccccaaaatggagaggaagcccgcgagcaccaccagctccgccccgcaagcctccagctcggccaggagggcctcgtcaaaggcttcgggggtggcgtaagccttccggctgaccaccgccgtgggcacccgcttcgcggccgcccgctccagcgcataggcgtccggccgcgaggcgatgaccttgacgatccggccgttccggatcgctcccgcctcctgtgcgtccagcagggcctgcaggttggtgccgccgccggacaccagaacggcaatatgtaccatgataaaatccgcctttccccgtttagccgaccagctcgaccccggcgccgccagagcgaacctcgcccagcatcatggccttttcgccgtgggcgttcaggaggcgcaccgcctcgtccgcctgctccggcgccacggccagcaccaggccggtgcccatgttgaaggtgttgaacatatcccgctcgggaatgccgcccaccttctgcagcagctggaacaccggcagcaccgggacgttccttttctcgatgaccgccgtcagcccttcgggcagcatccgggggatgttctcataatagccgccgccggtgatatgggaaatgccgtgcaccttcacctgcttcatcagggccagcaggggcttgacgtagattttggtcggggtgagcagggtttcccccagggtggcgcccagctcgtcgtaatggacggccagcgttttttcgttcacgtcgaagaccttacgcaccaaggaaaagccgttggaatgcacgccgctggaggccacgccgatgagagcgtcccccgcccgcacattcttggaatcgacgatgctgtcataatcggccatgccgacgctgaagcccgccaaatcgtattcatcctccggatagaagccgggcatttcggcggtttcgccgccgatgagggcgcagccggactggacgcagccctccgccacgccggagacgatggcggcgattttctccgggaaattcttgccgcaggcaatataatccaggaagaacagaggctgcgcgcccgagcaggccacgtcgttgacgcacatggccacgcagtcgatgcccacggtatcgtgcttgtccatcaggaaggccagcttcagcttggtgcccacgccgtcggtgccggaaaccagcaccgggcgcttcatgccgctgaaatccggctcaaacaggccgccgaagccgccgatgccggacagcacgccgggcacggaggtacgggccacatgggccttcatcagttccacggccttatacccggcggtgacgtccacgccggcggccgcatagctttcgcttacgctgttattcatcgtttaagttccagcctttctttgagccttgcgggcttattcgcggcccgtccagcaatatgtgcaaacctgctccgggtcgatgccgatagaagccagcatcccctccagggtttgataccgcagggaggtgacccgcagatttttgcaaatgccgtccaccatgcgggcgtaccgctcggtgcgggcatcgatatactcctccagatggcggaagccctcctccccctccagctcttggatcaccgtgtgggtgatgagatcccggtcggaggtggaacgggaaaaattgaggtatttgcagccgaacatgatgggggggcaggcgggccggatatgcacctctttggcgccgctgtcatagagaaaatccaccgtttcccgcatctgagtaccccgcaccaccgagtcgtcgatgaacagcagccgcttgtcccggatgagggcgtccacggggatgagcttcatgtgggctacctggttgcgcaccgactgattctgcggcatgaagctgcggggccatgtgggggtgtatttgataaaggggcgggcgaagggaatccccgattcgttggcgtagccgacggcgtgggcggtgccggaatcgggcaccccggccacgaagtccgcctcggtgtccttgtcgttctgggccaggatccggccgcagttataccgcatctgctccacgctgaccccctcgtaggaggaggggggatagccgaaatacgtccacaggaacgcgcagattttcatctttttcccgggagcctgcagcacctcgtacccgtccgccgtgacgcggacgatttcccccgggccgaggctgtgctcgtccttataccccaggttgaggtaggcgaaggattcgaaggacacgcacatggcgccgtcctttttaccgagaatcagcggggtgcggcccatccggtcccgggcggcgtacaggccgtccttggtcaggagcagcagggtcatggagccgtcgatcagctcctgcgcgtggcggatcccctcggttatcgagtccttctgattgatgaggcaggctgtcagctcggtggcgttgaccttgccgccgctcatttccaggaagtgggagctgccgttggcaaaggcctgtcccaccagctcctccaggttgttgatccgccccacggtggtgatggcgtagttgcccagatgcgaccggacaatgagaggctgcggatcggtgtcgctgatgcagccgatgcccagcggcccggtcatttcgtccacatcccgctcgaacttggtgcggaagggagaattctcgatgttgtggatggcccgctcgaaccccttgtccgcgctgtaaacggccatgccgccccggcgggtgcccaggtgcgagtgataatccaccccaaagaataaatcggtgatacaattgtcatgcgaggctacgccgaatacgccgcccatatagttcctccttggtacaaagcctgtatttcctgcgattattcacccatcatgcggcgcatgatctcctgataggcttccacttccccgcccaggttgcggcggaaccgatccttgtccagcttctcatgggtgtgcacatcccagaagcggcaggtatcgggagaaatttcgtcggccagcacgatggtgccgtcggccagcttaccgaactccagcttgaagtccaccagctcgatgtccagcgtcaggaagaaggccttgagcacttcgttgaccttgaacgcgtatttggcgatgcaatccatttcctctctcgtggcgatgccaagggccagcgcgtgatactcgttgatcagcggatcgcccagcgcgtcgtccttatagctgaactcgagagacggggttttcagcaccgtgccttcctccacgccgaagcgcttggagaaggaaccggcggcgatgttgcggatgatgacctccaggggaacgatggacacctttttgaccacggtttcccgctcggacagctccttgacaaaatgggtgggtacgccttccttttccagcttctgcatcaggaaattggtcacccggttgttgataacgcccttgcccatgatggtgccctttttctcgccgttgaaagccgtggcatcgtccttgtaatcgacgatcaccagttccggatcctcggtggcgaatacctttttggctttgccctcgtacagttgttccagcttgttcatatactcgtctcctatcgtataagcattacgcctgatttagcttgtccgccagggccttatccttggcgagaaccccttcagccatggttttcttcatggcgatcagccggtttttcagcgtctcgtcgctgagcgccagcatctgcacggccagcagggcggcgttttccgcgccgtcgatggccaccgttgccaccgggatgccggagggcatctgcaccgtggaaagcagggcgtccagcccgtccagggtggaggattttaccggaatgccgatgaccggcagcaccgtgtgggccgccagcacgcccgccagatgggccgccttgcccgccgccgcgatgatgacgccgaagcccttgtccgccgccgaagctgaaaacgccgccgcggcttcgggcgtgcggtgcgccgacatgacatgaacctccacgggcacgccgaagtcccccagcttatcgatggctttgccgaccaccggcagatcgctgtcgctgcccatgataaccgccacttttttcatagtacaaaccacctaccctttcccgccgggagcttgtcccggcaataaaaacaggctgggacgccgaacgcgccacagcctgcacttgtcaaattttgcccgcaccggtattgtgaacacggcatttcctgcgcagaatgctcccgtaaccggacattccacagccggacattccatagtcctgcatattcacaacctccctgcgttttccaccccataacagacagggttcgctgctactattgtattgcaatttccggtcgaattcaagcgcaaaatcccgcccggtggaaatttgtagggataccatgggaagatcggcgggccaaaggggtttttgtttattttgcgggtgagtcctgatagctgaaataggccatgaaatcaatcgtcgacgaatacgaaaagatcattgggtgtgcattccagcacctgacaaagtatttcaatattttcataccgaatcgacttggtttcgtttcgaatcatcctgctgaaattctgatagctcatgttcagctgcctatacagccaatatttcgtacggccttgcttttccagaaggggcagaacatttaactctaccattacgcattcccctattatctaatttatacattagataataggttagtatgtccctttacatatagactattacattatataatgtaatagtctatatgtaaggaggtggatggaatgacaacctgctgctttaccggccatcgacgaattccgccggaggttgtcgcgccgttgcgggagcggctggaagcggaaatcgagagccttatccgccagggggtgcggtatttcggcgcgggcggcgccctgggcttcgacaccctggcggcggaagcggtgctggacttaaaggcggtatacccgttcatccgcctgatcctcgtgctgccctgccgggatcagacgcggggctgggcgaaggaggacgtgaagcggtatcaggcgatcctgaaacgggcggacaaggtggtgtataccgccgaacgctacaccagcggctgcatgtacaagcgcaaccgccatctggcagagcacagcgactgctgcctatgctacctgacggaaaacagcggcggcactttttacacggtgggcctttgccggcggcggggcattcccgtgcgcaacctggcggaaccggccccgaaatagagcaagcggcgggagaaaaaatctcccgccgcttgtttgctttattctttaccgattaatacatgccgtccatgccgccgggcgcagccggagccgccggggcgggctctttcttgtcggccaccagggattcggtggtcagcaccatggccgcgacggaagccgcgttctgcagagcagaccgggtgaccttggtggggtcgacaataccggccgtgaacatatccacatactcttccttggcaaagtcaaagccatagttgaccttgccggcggaacggatcttgtcgatgatgacgctgccctccaggccggcgttcagagcgatctggcgcaccggctcctccagagccttgagcacaatctggatgccggtcttctcgtcgccctcggcggcggccagcatgggatccagcacagcggaggcggtaatgagcgccacgccgccgccggcgaccaggccctcttccacagccgccttggtggcggacagggcgtcctcgatgcgcagtttcttttccttcatttcgatctcggtcgcagcgccgactttgatgaccgccacgccgccggccagcttggccagccgctcctgcagcttctcccgatcgaaatcggaggtggtgttttcaatctggacgcggatctggctcacgcggctcttgatagccgcgggatcgccggcgccgtccacaatgatggtgttttctttctgcaccttaatctggcgggcacggcccagctgatccatggtggtttccttcagatccaggcccagctcgtcggagatgacctggccgccggtgaggatggcgatatcctgcagcatttccttgcggcgatcgccgaagccaggggctttgacggccacgcaggtgaaggtaccgcgcagtttgttgacaatcagggtggacagggcctcgccctccacgtcctcggcaatgatcaccagctttttgccggcctgcaggatctgctcgagcaggggcaggatgtcctgaatgttggagattttcttatcggtgatcaggaggtaggcatcgtcgatgatggcctccatcttatcggtgtcggtgaccatgtagggggtgatgtagccccggtcgaactgcatgccttccaccacttcggtgtaggtgtcggcggtcttggactcttccacggtgatgacgccgtcggcggagaccttctccatggcctcggcgatcagcttgccgatgacctcgtcgccggccgagatggtggcagcgctggcgatatcctcggaaccgctgactttcttggagttggagacgaccgcttccacgaccgcgtcgacagccttctgaatgccccgcttgacgcccatggggttggcgccggcggccacgttcttcatgccttcacgaatgagggcctgcgccaggagggtggcggtggtggtaccgtcgccggccacgtcgttggtcttggtggagacttccttaaccagctgggcgcccatgttctcaaacgcgtcgtccagctcgatttccttggcgatggtcacgccgtcattggtgatgaggggggcgccgaacttcttgtcgagcaccacgttgcggccccgcgggcccagggtgatttttacggtattggccagctggtccacgccggactgcagagccttgcgggcgtcctcgccaaacagaatctgttttgccatgattggttcctcctgttatttcgtatagtataaaaatcttaccggaaaggatttcttattccacaatggccaggatatcgctctgccgcacgatggtgtattccgtgccgtcaagcttgacctcagtgccggaatacttgctggtcagaaccttatcgcccaccttgatatacatggtgatctctttgccgtcgacgttgccgccggggccgacggccaccacttcggccatctggggtttctctttggcggaaccggcgaggatgatgccgctcttagtggtttcctcagcctctaccattttgatgacaacacggtcagcaagcggtttaatagacataagaataatcctccttgaagagtattgataattttagcactccgtttcctcgagtgctaaatctattgtaatcggattttcagaaaaatcaagagggttcactggaaatttttcaaacttcacaatttttttacaaactggcggaaacagcgggagcccggccgggcaggcgcacgccttccggcagcacgaaggagagcgcgccgggcagcgcctggaaatgaatatccggcgcgctgaagcattcgccgtcgatgttgcagacgaccggcgagagggagctgacccgcatccgcgtgccccggaaggcttcgcagcaggccatatccatgtggcggcccgccttgtagcgggagaggaaaccgggaattttcagccgcggcatgacctttaccagcacaaagtccagcaggccgtcgtccaccagcgcgccgggagcgccgcagtaaccgccgccgtaaaaccgggcgcaggcggccagggcgaagaaatagcggccgcggcgctccaccggcccgtcgggggtatccatgacgacgtgcagatccacgccgatccggtggcagaacacgtccgcgatagccaggttgtaggacatggggccggaaaccagcggcaaattcttataccgcaccatcttctgtgccacggcggcgtccatccccatggacgcgctgttcatagaaactcggtcgccgcagtccaccgcgtccaccgggacggcccggccatgcacctgggcgggaatgtccagaaaagccgcggttcccccgtaggaccggacatagtcgttggcggatccgcagggaacggccgcgatttgagcgcgggggcagccggcggcaccggtggctgtttcggtcagggtgccatctccgccgcaggcgtacaagcgcaccgacccctccccggcgcactcctcccgggcgatggcggtagcatcccccgcgccccgggtcacccggatggcgtaggcgccctcctccgccccggcaaacgccgcgtgaatgcgagggagcagctc

SEQ ID NO: 4081 - DNA, 16337 bp, Unknown
  16S sequences of unknown bacteria
cccctcccggaaacggacagcgtccgtttccgggacagcgcgccagcgcgcctattccgtctccagctccagcccgcccgtgaagcagaatcgcgtgcccgataccgcggaaatgtccacgcggaacctgcgcccgcccaaccgaaagcgccgcttgtagagcttctcgcgcgggcccagcgcctcgaggtagcgcacctttttcccgcgctcgctctccaccgtcacccgcacgcacggccgccgccccggactctccagccgcccgtagagcgcaaaggcccgcagcaccttctcctcgctcgtcccaaaatcgatccagggcgtcgtccactgcgcgcccgccgtgttctccgtgcccagcgcgtagaccttcccgtccgcacccagcgccagcagcctctcccgcatcagccccgagcgcgcaaagccccgcaccgcgatctcgtcgtgcagcacgtacgtctcccgcgccaggtcgtattccagcacgatggagttcgccgtctcctgccccagcggcagcgcaaagtagagcctctcccggaagcagatccccgccgcgcacccgccaaagtgcggcgaaagcccctccgcgcagttttcctcctcgcagaacgtcgcgtcaaagagccgcggcagcttgcggtcatccagcagcacgatggtcgtgccgctttgcacgccgatgccgtgcgccgtcacaaagtaccccgtctgcccgtagaccgccgccgtccggcccgcaatcgtccccagctccccgctcatgcgcgtcacctggtagttctcgggcgaggtgccgtagagcaggagcgccgtcgtgctcttgaggatgcaaagatcgccccccacgctgtagaggttcgtgatcaccccgccgtcaaacgtcggcaggtccacaaacccgccgcccatctccggcgtcaccacgtccccggtccagtcgttcgggtccagcatccgcgagtagtagagccggtccgggttctccgcgtccccgcacatccacacccgctcgtagtgcagcgcaaagtacttgcccttggccggcgcgcccgcaagcgccgccgaagtctcgctcgccccgtcccagcactgcaccgggtccaccccgttgccgaagatcaggatgctgtcgtcctccttcttgtaggagagaaagccccagtcccccgccgtgcccgtgtagagcgtcttccactgcccgtcccgaaagacgcacaccgcgctgtccgtccccgcgaccacgtactccgtccgctcgccgtccgcgtccgtctcgcagaacacgtacaggctctgcgcgccgccgggcgccggcgcttcgatgtagggcgaggcgcccgcagccgaggccaggcggccgtaatccgtggtgacgttgcgcgccaggcgcgccgcggccgcgttgcccgccagctcccccgcgctctcgttcaccccctcaaaataggggatcacataccgcgccatgtcccttcccccttcacaatgcgcgccaggccgcaaaggccccgcgcctctcccgcgccgcctcggcaaggccccgctcaaaggccgcgtacagccccgccgcctcctgcgcgtttccccgcagctcctgcccgcgcgccgccgcgtagtccgccagcagcgggtgcaatgcctccggcagcgcttccggctcgtccgcgccgccccgcagcggcgcaatcgcctccgccgcctcccggccgcacagccgctgcaccgcccgcgcatagccctcgttcagccagcgcgcaaggctcggcgcgtattcctccaccacgtccggctccgccgcgtccgcgcgcgaatagcccatgttcagcaaaaacgcctccgtcatctgcgataccgtcatcgcgctccctccccctgccgtgcctccggcgggaggggccaagggggtgaccccccttggctatccccccctgtccacgtttggcctgcaaaaatggggaggggaatccgcccctcccccgccgcagcccttcttcctgctgccgctacgcctcgatcgcgtgctccaggcgcacgatccagtcgccgttcaggatcaccgcggcaaagccgtccaccttccagccgacggtggccatctggtccaagggatcggccgtgcccgcgctgcccaggggctttacgatcgtgcgcacaggcgaggcgcccacctgccccaggtccaccacgccgtaggcgtcctcgccaaagacgagcgtcgcgcccacgtccgcgctgctggcgcccgcgcctgtgtaaaccggcgcctccgagctctccaggaagatcacgccgaagagcttaccgatctcgccgttttcgatctgctcggcctgctggtacttggccttgtcctcccagaggggatcgcccaggagcgagaacttcgcgtccgggcccacgatcgccttgtaatagcccttgcccccgcggttgaacttgggcgcgccggccttctccaggctgcgcaccgcgcggcggatgcccgcaaggtccagcacatccgcgctggtcagggcgctgcgtccggttttgccgcccatgtactgcacgttttcccctgcgctgatcgcgtcgcgcacgatgtggtccacgctcagcgcgccctgcttggccatcaggtgcacgagctggttgacctgggtgttgacgccggtcagatccagcaggtcggtcgtggccacgtacccgccgtaggacttgaccgtcgcggtcaccttctccatggagagggtctgcccgtccggcacgacgccctcggtcagcggcgtcgtcaccgcgccaaagggctcgtagcgccagaattcgaccacctggccgctgccgcggggcagcgtcttcttctgcccgccctggtagaagaccaggcgcttttccatctccagcaggagtttgccgtcgtagtagttctgcagcgtcgtgtgcaggttctgcgtgctcgtcttgttcacggtggtgctggtgctcatgtcttgcctcctccttgctgcgcgctagtcgagcgcgtatcgtccgtttcggtccaccaggtgggagatccgctcgatctcctcggccgtgagccgctccccgcgcggcatccccaggcccaggttcgcctccgtctgctcggtctcgtccccgccgccgaggaaatagcgccggtagaccttgcccacgctcgcgccgtcctccagcatgcgcagcgcctccgggtgcgcccgcaggctctcgaccgtaaagcgcgggtcgtctatggcgcgtatggccgcaacggtctccagcgcgcgggcgcgcaagtcctcttgcctgcgcagcgcgccctcgagcaggcgcagcgcaccttccgcggagatcccccgctgcgcgagaaattcctccagcgcggccatgtcctgctccctgtcaggaaccgggttccgtctttccatcttctccctccttttgcaggttctccgtctcctccagggccttgaggatcgcctccttgttggacagatccatcagcccaaaggctgtgcgcgccggcagcacgcccatctgcaggagctgcatcagcagctggttctggtacacactctcgtacttgggcagctgctgcaggcggacctgcaggtcgaactcccaggcgccctgggcgtccgcgctgcccagcaccgcgtagccctccgccgtgcggtagctctcgtcccgcgtaccaaaggccgccagcaggctgaccacctggcgcgtcatgcgcaggtaggcctggttgatcgtctcctggtgcaggttcgtgcgcttggagcccgcggcctgcagcatggagatcgccgtgccggacgaggaggacgcgggcagctccccgcggctggccgcgttctgcccgctctcggacttgagcatgtcgcacttgcggcccagcatctccaccgcgtagggcgcgagcggcgcgctctcctgccagcgcagcgcgctctcgtcgatgcggtcggccaggaccacctcctgctcctcgtcctgcagggcggcgatgtccaggcccgcggcgcggttgaccatcagccgcggccgcgccccgcgcgccaggttctgcaggatcagcgtgtccagcttgtcgatgtagcgctgcacgggcgccaggtagtcgaaggccccgaacccccagggcgtgcccggcagccggtcgtagtaccaggcgacaaaggggtattccccgtgcgggtacagcccctgcgggtggtcgcgccgggagtcgtagaggaccgccccgccggcgatcttcatctggtgcacggccacgcgcccgccccggtaggtcttgtagtaggcggtcagcagcgccgtcagcttctcgtttgcgggcggcgcgcccaggacctcctcgtccggccgcatccggcggaaggcccccgggtagtgcgcgcggtagtactcctgcgtgtggtaggagaccttgaacaccgcgcgcccctcctgcagctcctcggccagcgggtccgtcaggatcgcccgcgggtcaaaggccgcgaccttcggctcgccgcgcacgaccatcgtctcgcagaagcccacacccagccgcgcccggtactcgcagatctgcacgtagacgcgcgcaaagtccatccgctccagcaccgcccgatgcagggccgtaaggcgcgcggcccgggcctcgtcctcgcgccgccgggccaggaacacggcctccggcatcatctccaccgcgtcggccagctcctgccggtaggtcgcgtagagcaccggcgtgcccgtgcgcggcccccggcgcgcgtccggccggcccagcgcctgctcgaggaacagctcctggtttcgcgcatacttctcgcgcagcgcgcggctgtcctcccggaactcgcggtacaggccgatgagttcgtcccgcttctcctccgcgttcaaatcgcgcgttcccctcctttctcctcctgagcgcgcatgcgctccggatttcccctccatcctacgccccggcgcgccgtataccgcgcgcgaggttcccgcgcccccgttcgccgccgcgcgccgcgcaggaggcggggccttgcccccctcctgcaacctccccccgcgcacgcccggcgcgcccggggacgcttcccctgccggccgcaccacccgccccgggtccctgccgcaggcaaaaaagaggaaggggcccagccccttccccgagcgccccggcgatgccggctcgcttccaaaaagcgcaaagcgcaagcgcttttcctgacgcgcgcgtccccgaaaagagcggattgcgcccggttccccctcgccgccgccgcggatttccgagggtgggcgctcagcctgcggcgtcctcccggcgcgcgccgcagcgcccctcctgcggcagaacccccgccagcgccgcctccagcgccacgtgccagaggaagtagtcccgccagttgtagagcgtggaccgctcgatgaacaggttcgcctggatgtcgtcgcagctcagcccctcctggaagaactgatcgaagaacgcgcgcatcccctcgtccggcacgtccgccagcacccggtcgatgcactgcagccagcgcgggtctgcgtcgatctccccgctgcgcagcgccttggtcctctccagcgcgtacaggacccgattgtggtatttgcgcggaagctgcatcgtctcctcccctcccccgtctacaggatgccgcgcacgcggatggcgcgcgcgtggttggcgtagcgctcgatgagcttgtcctgctccaggtgcttcaggtgcatgctcaccgtgcccggcgaggacagccccaggccctgcccgatctcccggatcgtcggcgggaatccgtattgctccgtaaaggccacgatgaagtcgtagatcgcaaggcgcgtgtgtcccctgcggcgcggcgccggcatgcaaagttccctgttttcgcgttccatcgaaagatcactctccctctcttgtccgttcgcgggcccttcccccgcccggcaatgacactccttgttgctgagactagtatagaacaccagttcccgcatgtcaacactttgtggaaagtttttgaaaactttgaaaaactcccttgcaaaagcgcacaagcagttgcataatagaggcaaaggagggatgcgcgatgttgaagaacctgcgcgccattcgccaggagcgccacatgacgcaacaacaagtcgccgaccatctcggcatcacccgtcaggcgctctccaactacgaaaacggaacccgcgagccggagtacgacctgctctgccgcctggccgagctgctgcgctgcccggtgggccgcctgctcggcttctccggcgcgtacgagagcgcgggcgcgcgcattccgatcctgggcacggtcaagggaggtttcaaccgcctggcggaccaggaattcgagggctatgaggtcgcagacgtcgcctcgcccgacgaatacttcttcctgcgcgtcaccggcgacagcatggccccgcagatccaggccggggacctcgccctggtccacagccaggaaaccctgcaaagcggggagatcggcgtcgtgctcctggaggacgacgaggcgacgatcaagcgcgtcgtcttctcgggccggagcgtgatcctccagcccttcaacaacgcctatacgcccatcgccctgcgcggggacgagtgccgcatcctcggcaaggtcatccgcaccatccgcgagtggtgacgcgccaaaaccgcaaaagagggagccgactttcgtcgtctccctcttttgcgcagctttagcgcctttcgatccggcagtccgggtaggtctgcgtcgggtgcgagaggtgcaggtggctgaagcgcatcttcccgtcggggcagcgcaccgccatgccgctcatgcgcacgggcaggatgtggcgcgtgccgcggctggactccatcagcatcttggcggagagcgtgttcagctcgtgcagcagcgtggccgcgtcgcccccgcgcagcacaaggtcctttacgtccatcatcgcccggcccaggaacgcgtcctccgcgatctcccagtccacataccccgtgagcacgaagtccgccgccgcgccgtagtcgtggcggatcaggctgtcaaagtcgagcatcagcgtgccccagaccgtccagtcgtagccgatcaggcgcaggatccgccccgcgcccaggcactcctccgcagggctcacgccgaagtagaccggctcctcctccacaaagatctcccggatccactcctccgcccgcgcaagatcccgctccgcataggctccctggaagttttccaacagctccatcaagtcgtccatcgcgtcagccccccgtttttcaacacgtcctgcctgtatctttccatcgccgaggccatgggcagcgcccgcagcgccgccgcatccgcccaggcccagtcctcccgacccgcgatctcctcccgcgcgcccggcaaaaggcgcgcgtagaccccgcgcatctcccagatccggtgcgtgaacacgtgccgcgccggcggcccttcgcgcacgggctgcgcaaggcgcgcgatctcctccccgtgcgggaactcccagaggcccgccagcagcccgcgcgccgggcgccgccgcaccagcgcgcgcccctcctccaggatcagatagacgtcaaaggcctccaccgcccgcgccggcgcgggcgcgcgcacgggcagtacggcttccaacccctcctcgcgcgcgcagcacccggaagcgaccgggcaggaggcgcactttggcccccgcggcgtgcagatgagcgcgcccagctccatcagcgcctggttgtacgcgccggggtccgcgtccggcggcatggccgccagcaccgccgcttcgcacgcgcgccgcgcggaagggctgcgcacgtcctccgccaccgcgtccaggcgcgcccagacgcgcagcacgttcccatccaccgccgccgcgcgctcgccaaaggcgatcgaggccacggccccggccgtgtacggcccaaagcccggcagggtccgcagcgccgcggccgtgcgcggaaagcccccgcgcgcgacgatctcctgcgccgccctgcgcaggttgcgcgcccgcgcatagtagcccagcccctcccagagcttgagcagcgcctcctccggcaccgcggcgagcgcgcgcacgtccggcagcgccgcgaggaacgcctcgtaccgcggccgcaccgcctccacccgcgtctgctgcaacatcgtctccgagatccagatccggtaggggtcccggtcccgccgccagggcaggtcccgcttttcccgcgcataccaggcgagcaagccctccgtcctcatcgagtcaccgcgatgggcacgagcgttgccgacgcctgcgccgcgatcccctcgccccggccggcaaagcccaggcgctcggtcgtggtggccttgacgttgaccgccgcgccgggcagcgcctccgccaggctgcgcaccatctgcgccatgtacccctggagcttcggcgcctgcgccacgatcgtcacgtccgcgtgcgccacgcgcaggcccgcgtcctgcacgcggcgcgccacgtcccgcaataggtccatagagtctgccccgcggtacctttcgtccgtgtccgggtacaggcggccgatgtcccccaggcacgccgcgccgagcatggcgtccatcagcgcgtggaccgcgacgtccgcatcgctgtgcccgtccagcccccgttcataggggatctccacgccgcagagcaccaggcgccgccccggaaccagccggtgcacatcgtatcccagccccacgcgcggcgtgggatctgcgcgctcctgcgcgctgcgcgcgcgcagcactgcctcggccagcaccatgtccgtcgcggtcgtgatcttcaggttcacgtccccgcactccaccaggcgcaccggcagcccgaggcgctccatggcgctcgcctcgtccgtgatccgcgcgttctccgcctgggccgcctccatggcgcggcgcagatcggcggcgcggaatccctgcggcgtctgcacggcgcgcaggccgtcccgcggcacggtgccctgtaccatgccgccctccgcgcgcttgatggtgtccgaaacgcgcgtgcaggccacggccgagccctccgcccgcagcgcggcaaggcagtccgcgacgatccgctccgtcaccagcggccgcgcgccgtcgtgcacgagcacgaactccgcgtccgccggcagcgcgcgcaggcccgcaaggaccgactcctgccgcgtttccccgccggacacgagcgtcacgcggtccgcgtcgccctggagggcctgccgtatccgatcctgctcgctcggcttgcacacgacgcagacccccgcgatctcccggctcgtcaggaacggccgcaccgcgtgccgcagcacggattcgccccgcaggtccagaagcaccttgttgatccccgcgcccatgcgcgtcccgctccccgcggcgacgatcaccgcatagaccgcgcccgcagggccggcgccgcaggcgctcacggcagcgggcggtacagatccgccgctcccgcctttcccacgttgtcctgcacggagaggacctcgtagcggttcagcttttccccgaaccggatctcgatcacgtcccccgccttgacctcgtagctcgcccgggcgatctttccgtttaccacgacgcgcccggcgtccgccgcctcgttggcgacggtgcgccgcttgatgatgcgcgataccttcaagtatttgtccagtctcatcctcttgcatcgcaccccctatgggtgcgtttcctcctcattcttctgtgcgaacggcgcaggcctcagccctccgcgccgcccgcctccgccgccgcgtccggcgcaggctgtgtgtccggcgcgggctgggtgtccggctcggactgggggcccggcgcgggctgtgcgtccggcgcggactgcgcgctttcttctgccgcggcgttttccgcggtttcggccaggatcacgcgctccgccgcgaacccgccgcgccgcagcgcctcggccacgcccgcctgcccgccgcgcgccacgaagaggttcgcgccctcgggcgcctcctccacgtccagcgcagcgtgcacgctcggcccggccatgcgcgcgcagagcgtgcaaagcgcttcctccgccccgccgcgcgccgatgccgtcaccaggatgtgcgcgcccttgagcttgtcgtgcagcaggcgcacgtccgcaaagtcgcgcagcacgcgctccagcgcgtccgcctccggcacctcccccgcgtaggggaaggagagcagccccgtcacctccgggccgaagcgccggtccatctccgcctgcatcgcgccgaggatcgccgcctccgcgcccgcggcctcgtcctgcccggaaaacgcgcccgcgcgcacgaggatgcactccgcgtcgccaagggccgcggcctcgatcgccgcaagcgcctgcgcgccgtccacaaaggcgaccgcgcccttttccgcgagcagctggatgggctcttcctccggctgcaccgccgccgggaaggccagcgcccacgcctcgcagaagtcctggccgttcgccctgccggtcacgcgcgcctcgccctcctcctcgtcaaaggggaaggcgatcgcctcctcgccggaaaggtccccgacctcggcccgcgcgcccgcgagctccacacataccgcctcggcctggcccgcgacctccagcgccgcatagtcctgcccgagcacgcgcacacggcccagcgcccgcaggctgacctttgcgccgctctcctgctgcagcgccgcctgcgcgtccagcaccgcgggcagcaggtacgccaccgccggccgcaggggccggcgcaggatctcctcccgcgcgcgcagcaggcgcgccgcctggcccgcgggcgcaaggcacgccgcgaggacctccttccactccgggtgcgcgccctccgggtccgccttttgcaggcccgcctcgtcaagggaccaggccgcgtagtccgtgcgcgcccgctccccggcaacgagcggctgccaggccgcgcgcagctcctgcgcggtctcgggcacctggccgaaccggcgcagcaactccgcccgcagcgttaccatgcccttgccctcgcagaggatgccgcacagccttcccatcgcgccctcggccgcggcgtaaagccgggtcagcgcgtcgaacatcgcaaccccgccgtacgtcgcctgcgctaggaaggagggcaagtcctcccccgcgtcctcgctcgcaaagcaccgcaggtaggccagcatcgcctcgtcgcgcttctcgcgccgcgcatcgctcagggccgcgcactcgagcagcaggtcctgcgcgctctgcgcgtcgccgtcgcgcgccgcctcctccgcccgcagcagcaggtggccgcgcagcgcgtcctcctcgccgccccaggcgcgcaggtacgccgcgcagtaggcgtccaggggcgcaggcgccttattcgcgggcgcgctgtccgcctcgcccgcagattccgccgccttagaggcctccgcgcccggatcggcttcccccgccggggccgcgtcctccttgggctccgggtccaggccgcccttctgcggccaggagacgcgcccggccgcgagcttgcccgtgggcaggcgcttgatggagaaggtgaccagcgtctcctcgatgtccagggccgagcgcgcgttcaggaagtcgagcaggctcagctgcatgacgtcgctggcgcggaagtagaagcgctcgccgttctccgcgcgcaggcggccaaagaacttgtccggattgtagaacatcagcgcgcccgtgcgcacgctctcctccatggtcgtgccgtcggtaaaggtcacgcgcgcctggggattgttgtcgtccgcgcgggcgggttccccggcgcggggggcatccccggcgcgggatgcttccccggcacggggcgcgccctcagcgcccgcaaagtccggcggcgtgagcgcgccatcctccaccagcgccgcgatctcgcgaacccggccgtagcgcggccccttttcgtccgcggtcacggtgaaggcgaccttgatgccgcaggtgttctccgagcgcagaatctcctgccagagcgcgccgctggcgatgtcctcccggcggaagaggaacttgacgttcccctccttcgccttgccgtatccattgaccttgtcatagtgcacaatctcgccaaagccctcgcgcgggagcgtttcctgcacgtcgcgggggcggaatttctcctccgtctcgcgcagggcgaccttttccgccacgcgatggccgttctgcacgcgcaccgtcgcctgcgccgggagcgcccgtcccgtccagcggccaaggcgctcggcgagcgcttcgtccgcgatctccgttccaacgaacagcgcctggccgccgccgctgagcgccaggctccccacgcccgcggccgcgtcataccggtcgatccatccctccgcgtgcaccggggcctcctgcgccgcgtccgccggctgctccgcctgcggctcgtccatttcctgtgccggcggcgcctcctcccgcatggtttccccctgcggcgcgctcttctcccgccgcacgcagcgcgtcagggcaaacgtcgcaatgcccgcaaacgcgatggggcgctccaaattctcctcgccgagcagcagcccatcctcggcaatgtccagcacgcgcccgcgcatctcgcgcccgccgatgagggtgatatccacctcttcccccacgcgcacctgttttctccaagacgattccacaattcccatacaaaaaatcctccttccaaaagccgcgccacacagcgctccgggattttatttccattataacacagccggacgctttgtaaaagaaaatgttccctctgtgaacgatttcgccggcgagccgccgcgcgtttttgcccgcccttcttgcaggaattttgcgtttgctgggcgaatccctgtaccaaggcttcccatggcgcgaaaacctcaagattttgaaggaggcgtttgcatgtataaatccatcaaccagtggtcctttgccggcggcatggacgccaaggcctgcctgctggcggcaaaggctgcgggctttgccggctttgaaccggcctttgatgcggagggccccctctcccccaaagcgggcgattccggcgcgcgggagctgcgcgccctggccgattccgagggcgtgcgcctgccctcgctggcctccggcctctactggcagcatccgctgaccgcggaaagccccgccgcgcgcaaaatcgccgaggacatcgtccgggcgcagctggactgcgccgcggccctgggcgtgggcgcgatcctggtcgtgccgggcacggtcggccgcggcttctggggcgggagcgagtgcaccgcctatgccgacgcctatgcccgcgcgcaggaggcgttcgtccgcctcgcgcccgaggcccaggcccgcggcgtggtcatcggcgtggagaacgtttggaacaacttcctcctctccccgctggagatggcacgcttcctggacgaaatcggctccccctttgtccgcgcatattttgacatcggcaacgtcgtgcgcacgggcgagcccgcggactggatccgcaccctgggcagccgcatcgcgcgcgtgcacgtcaaggacttcaagcgcagcgtggacaccatcgcgggcttctgcgacctgctggccggcgacgtggacttccccgcggcgctcgccgccctgcgcgcggccggctatgacggcgctctgaccgcggagatgaacccctaccccgggtacccgaccgccatggccgagcagacctcgcgcgcaatggacatcctccttgccgccgctggggagggctgagccatggccagagaggaccgctttgaaaaagtctttgaacagggcatggtcaacgtcaccgagatctgggtcgaccgcgtcacgggcgtgcagtacgtcttccacgcttccggctatgccgggggcctgaccccgctgctcggcccggacggccgtcccctgctctgcgacaaggcgcaggaggacgagtacaaccagcaggattgacgaacaggcccgggaccagccgggcggcgcgttccgcggcagggggttaagagagggctcgccgccccctcttaacaatcttccccggtgccggaacgcaggtcggccttccttgctgcggttcggatttctctgacgcccgcagtgcagagagagccaatgcggattttcacaacaacattttcatttttcaggaggaacgaaaccatgaaggacggaatgcttcgcgtcgggctcgtgggcgtcggcgccatgggcagcggacacctgagcaactacctgcgcctgatgcgcgagggacagaaggtccagctcgtcgccgtgtgcgacgtgcggcccgagcagatggagcgcaaggacaacgcggatctgaacatcgagatccagcacgagacttttgaggcccactacaacaagtacaccaactacctcgagatgctcgacaaggaggacctggactacgtcgacttcgccgtgccgacctacctgcacgcgaaactggccatccaggccctggagaccggccaccacgtcctctccgagaagcccatggccatgaccgtgcaggagtgcgagcagatgatcgaggcctccatgcgcacgggcaagacgctcatggtcgcgcactgcctgcgcttctggcccgcctatgaggagctcaagcgcatcgttgaaactggcgagtggggcgcggtcgtcagcgccatgttcttccgcggcggctccacgcccatgtggtccttcgaggattggctccgcaagaaggagaagagcggcggcgtgctcctggaccagcacgtccacgacgtggacacgatccactggctcttcggcacgcccgagtccgtgcagaccctcgcgcgcaacgtcatccccggcagcggctacgacgccgtctccaccaactacttctacccggacggcaaggtcgtcaacgccatggacgactggaccatcaacggcgacttcgggttcgagatgatcttccgcgtcaactttgaaaagggctgcgccgtgcttacgcgcgacggcctcaccctctacccggtcggcaagcccgcggtcgtccccgacctgcccgcggacgacggctattaccgcgagatgctctacttccagtcctgcctgcgcgccgggaccgcgcccgagcgctgcacgcccctttccacgatggaaaccatccgcatcgcgcaggccgagcagctctctgcggaccgcggcggcgagcgcgtgcgcctctgagcccgtgtatacgctggtgctcaacggctccccgcggcccggcggcgatacggatgccctatgcgaggccttcgcccgctctgtccgcggccgcgcggagaccgtgcgcgcctatggcgcggacgtgagcccctgcctggactgccgcgcctgccgccgaacccccggctgccgcgtccacgacggcatggacgagatctatgcgcgcatcgaccgcgcggacgtgctggtcatcgcctcgcccgtgttcttctcccagctctccgggccgctgctctcgctgctgagccgcctccagtgccgctacctggaccgcaccctccgcagcgcgccgccccggaatgcgctgggggtcgtgctcctggccgccggcggcgcggggagcgtagagcctgccctggccggcgcaaagtccgtctttgccgccttgggcatccgctttctcgggtatgccttggcgggacacacggacctcactcctgccgcccgcgacaacgacgccctcgcccgggcccgcaccctcggcctcctcgcccgcgaggaagctctcgcttcctcttcctaacgcaagaaaagcccccgcttggcgggggtttttcttgcgcattcgtccgcacctgttccgctccccgccatttttcgctggcggcgcgaagcgtcgccgcgtatccagagattcgccgccaggcgaatctccccgcttagccgtacccgttccgcctctcgccatcccttccccctatacccgccattccttccgctccccgcccctttcgttggcggcgcgaagcgtcgccgcgtatccaaaagattcgccgtcaggcgaatctccccgctttggttggggaggattgtcaaggagggggccggccccctccttgataccccggctcccctcccacgccccgcctttcccgcaaccctcattcaccctcgggggagggtgtcgggaggggggctcccctcccgacttcccatcgtgcccggcggctttgccggcgggc

SEQ ID NO: 4082 - DNA, 4769 bp, Unknown
  16S sequences of unknown bacteria
tgcgctacttccagaatgagggcatggtgaagctgtcccggagcatggtgagaatctggccccgaacatcatcggctacggcccagaaaacatcttccaactgggggagggatctttccatggtttccacctcgcattgaaaatagtctatttaatgatctgaccctattgtaccatctcattgaaaaatgtcaatgctttttcatcattttctccatccggcggtgtgagctcggtgagaaactcccagaagcgcttgggcatatgggtcatgcggcagcggggattttcccgggcggggatggccagggtgttgtaaaaggcccgccacatattctggatttcctcctcctcgggggagggggcgggcatttccaggttgtccagaggcaggatgcgggggcgttttttgggctggtggagcagcaccatctggtgggtcaggtcccagatgaggaagggctggaagaaaaagcgggtgcagaaaaaccggctgatcaggggcaggacctggtttttgggccggatgcgggagacatagaccccggtttcgcagcgttcgaagcggacaaagccgcagagcagatgggcttcgtttttggccttctggatggcggagagcagagtgcacaaaggctcccttgtcagctgggccagcagctgcggcccctcccgaaagccctggcgcaggaatttcagcatcagaatctcccgctggggcaggcgggtgaggaatccctcccgcacaatgttcaccccgcggctgcccagggtgcgctggaccccccgtagcacccgccgggccttctggggatctgtttccacgaaatggctgtcaaacagcaaaggctgctcctcttcctcctgggagagaaagagcatgggctcctccttttgggcaaaggcgtcgaaaacgccggagagaaagccataaaagctgccgtcataataatagactacatcggaccgagacataacgattgttcctcctttggcagttgggcgggggtgtcgaacaaagagagctgctgataggggctggggccttcccgcaggcgctggagcagcagggcctgctccagaggctcccgggcatagaccaggctttccagggctttgccccggcaggtgataaaataccgggcccgtttcagcaccacccccagctttttcaggccctcaaaggtgaggggacagtggcggcgggttttgacgatgcgccgggccgagcgcacccccagcccgggcacacgcagcagcagttcatagggggcggtggtcacttctgcggggaactggtccaggtgccgcagggcccaggtgcatttggggtccaggcgggggtctaagttgggggcgtcctcctccagaatttccccggcggtgaaaccatagaagcggagcagccagtcggcctggtagagccggtgctcccggagcaggggcggctgggtgtccagggcgggcagccgttcgtcggccaccatgggcagataggccgaaaagaacacccgtttcagctggtatttctggtacaggctttgggtgagccggaggatctgcaaatccgattccccggtggcccccaccatcatctgggtgctctggcccgccggggcgaaggccggggcgtggcggtagaccgtgagatcccgccggttttcctggatgcgcccggcgatctggcccatggggcccaggatgcccgccttgctcttctggggggccagcagctggagggaggcctgggagggcagctcgatgttgatgctcatccggtcgcacaaaaggcccaggcgggcaatgaggcggctgtcgcagccggggatggctttggcatggatatacccggcgaagcggtattcctggcggagaatgtgaagggtttcgatcatttgttcggcggtttcgtcgggggagccgtggacggccgagctgaggaacaggccttcgatgtaattgcggcggtagaagtccatggtgagctgggccagctcccggggggtgaaggaggcccggggagtgggggccgaccggcggctcgtgcagtagcggcagtcataggcgcagtcgttactgaggagcactttcagcagggagatgcaccggccatcggcggaaaaggaatggcagatgccctgggcggcgcaggagcccactccgccggggatgttccggccctgggtgccgctggaggtgcaggccacatcgtatttggcggcgtcggtgaggatgcggagtttctggagcctgtccacaaaacagacctcctttgtgtgagaaagttcgaacaaatgtttgtgcgttatggtcattatagcatacgaacatctgtttgtccaggagccagagccttcgctgcggcgaaggctgctccaggcttcttcccggcgcaagccgccgggcccctcctgggccgcccgcggcgtgttattttggcacaaggccaaaataaccatcaggacggtaggtgacgccgcccctggctcccggggaaaaactaagtttttccccgacctttttcgcgccccaggcggagtccccgccggtgccaagtggatacaaccatccccttctgtggcattttgccaggactgcaccctggttcctaccggtgttggctcgccagcgccggagcacagaggcatagcaacgcataatgccggagacaggaacgggtccagcggcacgctggctcgccgcagccccctttgtgcaaaggggggacagaccgccgcaggcggtcaggggggattgtgaagccgggtgaatgattcagctggtttccatggccgggtgcggcagcaccgtctggccgtggcggctcgccacccaggattgcacccaggcccctaccgggtgatggtttatcacacccggagcaatcaggcagacaacgcataaagccttcagcgagttttgccagcggcggcgcgccgctgggcaaattacacagttttggcgctggtttttttccttctccccgccttgcaagaaagggaagggagggtttatagtataaagtatcgagtgcaaaaactttgcaggagggaagataccatgagctacacacaagacctgagtcagctgatccagaaccggagtgacgaattcatctccatcagcgacgacatctggggctttgccgagtcccggttccaggagttccgttcctttgagcgccaggccgcttacatggagcaggagggcttccgggtgaagaagggcatcgccggggaggacaccgcctttatcgccgaatacggctccggcaaaccggtcatcgccctgctgggcgagtacgacgccctcagcggcctgagccagaaggccgacgagcccagccactgtcccttgcaggagggcggcgacggccacggctgcggccacaatctcctgggcacggcctccctggcggctgctgtggccctgaaggaatacatggcagaaaagaatctgcccggcaccatccgttattatggctgccccgccgaagaaaatgccggcggcaaggcattcctggtgcgggatggcgcctttgccgactgcgatatcgccatcacatggcatcccggctggatgaaccaggtgaccccttccggctccctggccaacttccgggtcttctacaccttccatggcaaatcggcccacgccgccggtgcgcctcacctgggccgctccgctctggacggggtggagatcatggatgtgggcgtcaactatatgcgggagcacatgatcgacgaggcccgcattcactacgccatcatcaacaccggaggcaccgctcccaatgtggtacagtccgaggcccaggtgctctatgccatccgggcccccaaagtcacccaggtgaaggagctgtttgagcgggtgagcgactgcgcccgcggcgccgccctcatcaccggcaccaccgtggacatccgccaggtggccgcctattccgactaccacgccaacgatgtgatcagcgaaaaactgggcgaacatatgaaggagctgctgcccatcggctacaccgatgaggagctggagtatgccaagaagttccaggaggtcatcaccgatctggaccgcgcaaacctgaaggacaccgccaagaagctatgtggaaaggacagcggcaaggttctggaaaagcccctgttcgatttcctggtggaaaagaacctgggcggcggcaaaggctccaccgatgtgggggatgtgagctgggtggtgcccaccggccagttcagcgccgttacctggtgtgccggtactcccggccatgcctggcaggtggtggcccagggcaagggccccgtggcccacaagggtatgctctttgcggcaaaggtcatggcggccacggcctatgacttcctcacaaacccggatctggtggagcaggccaaaaaagcctggctggaggatctggacggggagacctatcccaacgccctgcccgccgacgccaaaccggaaatatggtgagcagcgtgacgctgcacccgttcctgtctccggtggggatgcgttgtctgccttattgctccgggtgtgataaaccatcacccgggaaaggctgctttgcaatccttgcagcgtgcggttgacaaagaaaaaaagctctcctgctgtgcaggagagcttttttgcgtttggctttgttgtgctatttggtgcgggagcaccgcctggccgtccggccaccggacccagcgtgacgctggacccataactttctttgcctttgccggttgtgtccacctgggcaaaga

SEQ ID NO: 4083 - DNA, 1857 bp, Unknown
  16S sequences of unknown bacteria
ccccggtgacattcgtcgagcgccatgggcacagcaaaaaggacttccccgagccgcccagcgacgcgcccctgggcgtggacgccaccgtcgccgagggctggatggatttcaaagtccgcaacgacacggacacctgcctgcagctgtctgtcaccttctccgaggcggaaatcatcggcgccgtctacgccgcccgggatctcggccccggctgctgtgtcgtcaaccgcagcctagtctaccggcaggtgggagaccagctgctggaggatgtcgatatcgtccgcctgcccaacggtccaggcccggcccagaccgtctatcacaactgctgccagatcaactatcccctcccggccggtacgccggtccgactcgaaacagaaaaggagcctagatcatgaacgagaagaaaacgattgccgtcgtctttggcggctgttccccggaatataacgtctcgctggaatccgccgccggcgtcctgacgcatctggaccgggaccggttcaccccggtgccggtgggcatcacgcagcagggcgattggttcctcttttccggcgatcttgcgcaaatatcacgcaacacttggcggcagggtccctgcaccccagcgtgcatcagcccgaaccgcagcgaccatgcgctgctggtttttgacccggcggggctgcggcgcatccggctggacgccgtcctgcccattttgcacgggcaaaacggtgaggacggcactgtccaggggctgtgcgctctggcgggtatccctgtggcaggctgcggcgtgctggcatcggccctctgtatggacaaagaccgcgcccaccgcctcatcgctgccgcagggattcccgcgccccgggccgtcacgctgacccagagctatgaccgggccaccgtcgccgcacaggccgccgagctggggtatccgctctttgtcaagcccgtccgggccgggtcctccttcggcgtcgcaaaggtgcgccgccccagcgacctgtttgccgcagtcgaccatgcattttattacgacgaccatgtcatgctggaggcgcagatccccggctttgaagtcggctgcgccgtccttggcagcgatgcgccgctcaccggtgtccccgatgagatcgagctgcagggcgacctctttgatttccaggagaaataccacctgacgacctccaagatccatatccccgcccgtatcacgccggaacagaccgccgcggtacaggagaccgcccggcgggtctatcaaattctcggctgcagcggctttgcccgggtcgacctgtttctgacgccggagggccgcatcatcttccacgaggtcaacaccatccccggcttcacgcctcacagccgctttcccagcatgatgcaggcggcggggctctccttccgcgaggtcctctctcgcatcctggatgcggcgctggaggaagcctgatgcgctggcggctcattgcctggtcccggggtaacagtctggccttcttctggcggctctaccgctggcagcgccgggcaaaaaccaggctggggcgggacattctgacctttttcctcagccgcagcgcccaccgccacggcggttatctcggcccgggcgcggagattcagggcatcccctcgctgccccacgggctccatggcgtttttatctcccgctacgccgtcctcgggccggactgctgtatttatcaaaatgtgaccatcggcgaggtcgcaggccgcgccccggtcatcggcccccgctgcctgatcggcgcgggtgccgtgctcataggagggattcaaattggaagcgatgttaagattggcgcaggcgccgtcgtatgccaggatatt

SEQ ID NO: 4084 - DNA, 5308 bp, Unknown
  16S sequences of unknown bacteria
ttttcacttcatcgccggcaggaatattgaccttattcggcgttatttcattgacgatagttattcttgaaatatcagcatcaatcttctcttttgctgctgtattcatctgaaattttgcatatatagcctttttcggaagctgtttgctcatttccgtacttttcggtaaaccaagcattataatcacctcatcttacgactaagaagcaaataagttcaaagtcatctaagcccttaatctcatttgtcaaaaagctgacccgtccaccacccaaaaataagtcaatatcgctttcgtctttaacctcaataatagaagcaattgcttttccaagcaaaccagaaaactttgacatatcttttccgtcaagagtttctttgttaaaccgcctataagcttcagggataggctcttttttccccttgcatagaaaacgcattttatcaagcatttgtttcggcgaaaggtggtcgcagattacttctccctcgtctgatatgtacaccatataaaacggatggagtctattctgattgtcaatattcacgctgtcagagcggtttttcaaaacaaatatcacgccagccggtgcgtcctcatttgccggaacaacagcattaagtccaaaaggtgctttttcaatatcggggtggttctttatgtattcgagtaaatcaagtctgaactcattaagccccaagtccataatagaaatacccgtagtcatatcctcaatatcaacaacctcatcctgcaatcgtctaagctgtgcttttctatattcaaggtcggttttttcctcatcgctcaaaatattgtcgtcgccggttgcggtcatatcgacaattttcattctcatttcaactttagctttcagattgatgtaatcatcaagggttacatcaggccaaaagttcacaagctgaataactttatttttacttccgatacggtcaatacgtccaaaacgctggataatacgaaccggattccaatgtatatcataatttatcagatagtcgcaatcctgcaagttctgaccttcggaaatacagtcggttgcaatcaaaatatcaatatcatctttcggaatgttataaaataaatctctgccctttgaaataggagagaagcaggtaagcactgtgttcaaatcactgcggagcttaggacaggttgttttaccgtcaacagagccggaaatcatagcagagttaagcccgtattttgcttttacatacttgcttacattatcgtacaaatactctgcggtatctgcaaaagcagtaaaaatgataatcttcttattgctatcgttaatcggatttgatattttattgtctataacacgatacaactcttgcaattttgaatcgtgttcaggcgtaatatcgcccaccataagggttaggagttcaagaacttctgcatcttttgcaaggctttctctccaagaaacatagtccatatcggccaggtcgatctttattttcctgccgaaagaaaacaggtcatctgtattttggtcttcatcatcgaactcgttaatatttgaaatatccgttaaatcaagttcttgcgaggattgtttactaaaacggtcgatggtgtcaatggtagtttcaatcaacttttttattctcgtcagtgtaagattgaaagaataaacagaactttccatacgcttcatcaaattgattgccgttaagcgacggatgccctgttcacggtttgcctgcgtaaatccgacattcaccttgttatcgccatataactcggcatacttttccattttactcgaaagtataaagtgcgtcggcgtgtatatggtcaacgacagcaacattagttgctcaaatatttcattgtaatttatcgctgcttttaagtcggttaaatgcggacgcagagaaatgggcttcaatcttgtcggaaaagaacccacatcacttgtatcatagtatttttgaatatgctttcttgaacgagcgatagtaacgctgtccaaaacttcaaagaagtcaaaatcaagcattttaagtaaattttctgttgtgcgttcatacgtctcccatttgctccaagtattaaatgctctttgagcatttttgaaaatatcatcaatggtgcgtgtggtatttaatttttcatctatgtattctgtgtgtccctcataagcaagagccaactgatttttcaaatcaagaaatttattattaaccggcgttgcggaaagcattaaaaccttcgtttttactcctgctcggataacttttttcatcaaagtaacataacggttgtcctttgtttcttcatcagagttttctaccaatttaccgccgtttctgaaattgtgcgattcatcaataaccacaaggtcgtaattgccccaatttaatctatcaaggtcaagtccattggattgtccgtgcgttctgttaaggtctgtgtgatagagaacatcatacctcaaacggtcagaagcgatagggttattaacataattatccttatatgtattccagttgttagctaacttttttggacatagaacaagaacggatttatttctgttttcgtaatatttaatcacggataaagccgtaaatgttttaccaagacctacactgtctgcaagaatacaaccgttatatttttccagtttgtttataattgcaagggcagcatctttttgaaagttatataacatattccaaatcttactgtccttaaatccggttgcctcatttggtagaacatcctcggatatatcttcaagaaattcgttgaaaatgttataaagagttacaaaataaatgaaatcgggagagttttcattataagcgtttgttatattttcaagaacttcattggttacatcttgtaatttacttttgtcattccaaagttgctcaaatagtgatagataatccgaactcatgggtgcttctgttttttgaatgtaattataagcattattacctcgctcacagcccaagccgaccgttgaaaattcagtgatgggcatataattcttgtcatcgacattcataaaacccatcatatcttcattgctcttgttagatttgaatacaactttttctttaatccactctgcacactcttttgcaatcattttttgtgtcatttcgtttcgtaatttaatttcgaactctgttccataaagattgcgttcacggttaagtcgaggaatatagaactctctcttttcctttttcgctttttctgttatgaaagtcggtgctgtaaaaataaagcgcaactcatcaatagaggtaagttgctttttcaattcttggaacgcataaatagagaagcaagctgctgcaatagatagtttgcttcctttatgtatttctacagataaatcatctttaagtgttttagtagtgttattaataagctccatagctaaattctcctacaatccgttcccgattacaagtataaaacttttactgtcctataatccgaactgttatttgttttcaggtaaaatatctataatatcatcaaccgtacaatccaatgctctgcaaatctttgcaagtacatctgttgtaacagcttcgtttttactaagtttgtgcattgcataacccgtaagacccgctttttcttgtaagtccttctttttcatatccctgtctaacaagatatgccacagttttttgtaagtaactgccattggcaatcgtcctttcttcgtcggataaaaataactataaatatacagtataaatataccataaaacttgttaaatcacaataatatctttgataattcaaaaataatttcgtattatcaggagtaacgccaactacaagcgataatagaaaagctcgcctgcgaaggtgagcttttaagcttgcgatattatttgttttgattgttttatcattgtatctattacttcataaatacagtttttatcttcgggagcgagtttttccagtttatcattcagcattgagtttttaactgtgtaaccgttatccaacgcatcactcaaaaccatatctgctgatacgccaagtgtattgagtatctttataaatggtccgagtggcgagattttctcgcctctttcaaccataccgatatagtttgcagttaatccggctttttccgctaaatcctcttgtcgcaattttttttcataagacgatactttctaatattcttgccgattgtagcgagtttcatctcatcacctccttagtttgcctatataacttagagtataggtcataatcgtttaggcatacacaaacttaaagaaagccaaacaaactaatagtaatgattttttgctgtttttgtgttatactgaacttaatatggggtgatgaaaagaaatgtcaaaggaaaacgtagcggttttcatcaggcataacgagtgctacggcgtaactaaatggcaagcagaagaagctatcatatctttgacaaagcaaggtgtaacagactttttaagcgaagaacaaggcggttttggccgccatcgtgaatatcaataatagcgaaagcttattattttcagaaatattgttatgatatatcacatcaagcttatgataataattcccctcatctatgtacggaatatcgcttataagttcaatattttgaggcggattttgctttgcatgtttgcttttatcaccgtcatcacaaaagctacaaaccatttgcatgattttaacaatgggatttttagttagccacctcgccgcttttatccttataatctattgtttttgacttcaccacagaacccacataaataacatttttatcatcgtcatatttcggcaaataacttaaatttataaaatcaacggctacgataactattgccgcaataacaagcaaaacaatttttaattttttctttcttactttcaacctttttctcagttttcataattttactcctacataatcttatatcacagcatacaagtaaaatcgtcaatttattacttctcattgattttcatttataccaatgatgtaattttgacgtttattcagggaacgattgttcagtaaaaagaaaaagccgaacagagtgcagactgagatagcagcagcttgttcggctttttgataatataattgttttttgatgtgatttaagtaaaacttatacagaactgatttaagcaaagttcaggagaatataaaaatgacaaaggacgaatatttaatagcagacccacccttaaaagcgttgactgtttttgcaatgcctatgattttaggcagcttttttcaac

SEQ ID NO: 4085 - DNA, 3246 bp, Unknown
  16S sequences of unknown bacteria
tcaattcgcaatggtcgtcctgctgcgccctacggcttgcagtactcccgcctctcagttcagcatggtcgcctctctgcgttcgcaaagctcacttgagatgcttcctgcttcactgggctcatcgacggctattgcagccactggctgcgccgtctctttcgccctcattgggcttactacggcctgtttcgcgcactgcgcgcggccttcgtgcgcccctacgccgcggcgcgcaccgggagaatgaggtaaaggaacgcgtccccgccgaagggcacgatggtcatgggagaaacgggggaggtcatctgcaaatacacatattcatccttgatcacgcggaatgcgtcggaaagatagcgcacgttaaaggtgatcttcatgggttcgccgtcggtctccacttcaatttcctcataggattcgccgatatccgaattggaagtgaccaccatgcggtcgccatccacatcgatgcgcatgaggttgtttttgctctcgcgcgccaccagcgaggcgcgttccacgcaactggagaactgcgcgcaattcaccttcacgcgggttttccagcccgtgggcaggatgcgctggtaattgatgaattccccgtcgatcagccgcgcgtaaacccgcacgctgcccagctgcgcggagatatagttgcggtcgatttgcaagagcacggtttcttcttcctcggtgagcaggcgggcgatttcgatcagcgattttttgggcaccaccaccgccgtttgcccctcggctacgccagtgtcgcactgccggttgtgcacggccatgcggaagccgtccagcgccaccatggtgaagcggccttcggaaacttccagcagcgcgcctgtgagcaccacgcgaggatcctcgtcggcaatgcaaaaggaggattcgttgatcatatcgcgcagcattttctgctccagggagaacgaatgcggctcgacaatttccggcagatccggatattcttcgccattttggcagccgatggtgatgcgcgcgcccgcgcaagaaagcgtgagcccgccggatttggtttgcgaagcggtcatttcgccatcgggcagcttgcgcagggtttccaaaaagaagcggcccggcgcaagcaggcggcccggttccacctcgttcacttccgtgctggcgtggatggtgaacattccgtcggaagcggtgagcagcaggcaattttcgcgcacctcaatcagcacgccttccagcacgggctgggacgggcgcacggagagcgcccgcgtgacgatggacaataggttccggatggtttccgtattggcaatgaatttcatcgtgcattcctcccgcagtgacgttgtgtacaattatagtatatatattcttttcgtagtagtcgtagcgctgtggaaactggggaaaagcccctgaaatccttgcgccgcaaggtcgcttgcttgtggataacccgggatatcatgcggacagcctggggaaaatttagcggctggaaattttttggcgaatggcgctgatggtgcggcgcgtgtcggtatcgctgtccatcagctcgctcaccttgtcgcaggcgtgcatcacggtggaatggtcgcgtccgccgaattccgcgccaatgcgcgtggtggaaagattcgtcatttcccggcaaatgtaaatggcgtattgccgggcgagcgcgatttcccggttgcgctttttgcccagcagatcttcgcgcgaaacgcccatgtattcgcacaccatgctggcgatgagatccggcgtgatggcgcgcgggtcgcgcgctttgttgatcacttgcagcgcgtcttccgccatggaaagcgtgatgggttcgtggctgagctgcgccatggcgatcaggcggttgagcgtgccttccagctcgcggatattggaatccacgtgcgaggcgatcagatccagcacgtcgtggctgatgtcgatttgctcggtttcggcttttttggtgaggatggccaggcgcgtttcgtaatcgggcttttggatatccgcgatcaggccccactcaaagcgcgagcgcagccgctcttccagcgtggggatgtccttgggcggccggtcgctggagatgatgatctgcttgccgttgtcccgcaggtggttgaacgtgtggaagaattcctcctgcgtggattcttttcctgcgatgaactggatatcgtcgatgagcagcacgtccaccgagcgcagcttgcctcgcagttgctcgttggtgttctgccggatggccgcgatcagctcgttggtgaaggtttcgctggtgatatagagcagcttggcgccggggttgtttttgagaatgaagtggccggtggcgtgcatcaggtgcgttttgcccagccccacgccgccatagatgaacagcggattgtaggcctgcgcgggcaattccgccacggccacgcaggccgcgtgcgcgaaccggttcgactggcccacgataaaggtatcgaacgtgtaccgtgggtccagcgtgagcgacatttcttgcgtgggccggggcgccatgccgcgcgcgtacaccttgatttcgtacttttgctggaaggtgatctgcacaatgccttccagcatgtccagatagcgctggctgatcatgttggcgtgaaaggtatccgccgtttccagatccattgcgccgttttccgcgcgcaccagttgcaaatcgcggaaccacgcgtcgtaagacgggccgggtatatcgcgcttgaggatatctttggttttggcccacagggcgttgacggattcttccatggcgttcccagacccctttatccacagtattgtgttgaaatacacgggttatccacagggtttatgcacaaccctgtggataacctttttttcgtaccttttattctaccaaattttctggggaaaagcaaggggaaattggcgaacctttgcccggaaatagattaagctttggatttggcgatccctccgtcgcggcttacgccgcgccaccgttccacagttcaacatggtcgcctcgcttcgtgcgcaaagcgcacttgcgatgttccctgtttcactgggcttactacggcctgtttccgccactggcggcggccttcgtgcgcccctttttccttcgggaaaaaggaggcttttggcagggcaacttccagcggtagtggcactatccaaaaggctccccttgagcccaagggggcgcacgaagcgcgcgcgctgtgcgcg

SEQ ID NO: 4086 - DNA, 16565 bp, Unknown
  16S sequences of unknown bacteria
cccggaccgatggcgacgatctcgccgctgtcgttgtccaccagcgtcaggccgatgttgaaatattgattcgggaaggaatatacctcgccgttgctgatgttgtatgccagctgctgggcctcgctgtccatgctcgtatagatgtccatcggcacggtgtatggatcttgtccggtcagctcgcggacctcgttcaccacttgctcgacatagctctggtatggatcgccgctgtaggattcaccgcgctccagctgataagcgaggttggtgctcatcgccagatcgcgttcctcttcgctgatgtagccatgctggtacatcatgcgcagcgtctcgttgcggcggttggtggccgcttcatagtgattggtggaatcgccgtccaggttgtatgggttatacgtctgcggcgcgttgatgacgccggccaggaaggcgcattcggacaggttcagctcattgacgtccttaccgaagtaatactgcgcggcattctgcacgccgcgggtgccgccgtcgctgccgaaccagatcagattcagatagttgacgatgatcgccttcttgtcgatgctctgctccgtgagcaggctcaggtagatctcctggatcttatggcggatcgattcgaagcgggagatcgtctctccattgttgatctcctcttcctccatcggccggatccaggtgttgtccaccagctgcatcgtcagcgtgcttccgccctgagacagcgtgccgctggacaggttgttgagcgccgaactgatgaagcgcggcaggtcaaagccgttatgctggaagaagcgggaatcctcgatcgacaggaacgcgtcgatcagatcctgcggaagatcttcatattcgatattgtcgcggtgctcgcttcccagctccgcgatcacattgccatccctgtcatagacgtgggtgctcgtccccgccaccaattgctgcgggttgaagtccggcgcgtcgctgatgacattgaccagcagggagaacacgcagacacagccggtcagcacgaccgtcaggacaaggaccgccgccttgttccatccgtccagatgacgcctggtcttcttttcttttttattgggggaagcttccatttcatttccgttgttcttcttcatgtgattcctccttgaaatacagtgcgtccacattgtcaaggtaatgcagccgcggtgccagtccctccctgatcagggagccgatgcgctttacttcctcataggggatcgatttgcgccggccctcttcatagcgggcgatcagcaggggggcatccacaagataagtctcgccgaacgcacggaaccggatgataaaaaaaccgattccgccgtggaccttcaccagcttcagatgcttgatctgatgcggatggatgttcttgaacggaaaactcgtcttgctggctgtttcctttgcctcaaagtcaatgggacagccccggtagattccattataatcggtcgtgctcgggaccttgtaataggcttctgtgatccgcgctgcgctgcgcgccggataatccaccttgaccacctggatcggcgtcggcttcttatggatcagcgccctgccgctttccagataatacgcgttggaatcattgagatcctgctccaggctcgtgccgcgattggctgccgaagcgccctgtctgatgctcgctgaatgcgtgccgaagggccggttaggatatcctatcacatacatcaccttttcaattatactctaaagcagtggattattcaatcttaatcgccggtgcccaaacaggggagaagaccgcttggaaaagcgctgatcagcgttttttcaggcgggaattcacagaagattcagccgcttttccatattatatgtccgctgaaggggatgctgctgcacagcggatgaaagtaaaggaatttccccttgatttttctcagtgaaaatgcgaaactattagggaagaggtgaaacatatgacagctcagtatcagttgaacgccaaggccatcctcgacaagcagttcaatgtggatctgaaaggctatgcgcccagagaagtcgatgagtttctcgacaaggtgatcgccgattatcagacctatgatgagacgatccgcgaactgggggagagcctgcggaactatgagaaccaggtggagcagctgaaggcgaagatcgccgagctcgaagcgaaggccggggcagaaggggaaacgatgccgccgcagtcgcaggtcgatatcctgaagcgtctttcacgtcttgaatacgaggtattcaaaaagtaacactgtgtgtcagacagtcgctggtgccgataggcattagaggaaagtccatgctcgcacagcctgcgacggctgtagtgtttgtgccggatgaagacataaatccgggcaggttcacgcctgacggctgcgctccttcctaaagctctgccatggaatgagcgctttaaaagtgccacagagacgagcgcgccgggaaaccggtgcgatggaacgggtaaaccccgcaagcgagaaacccaaatttggtaggggagcctgccggagcgaaatgaagcgaaggcgggacacgaaagtgtagataaatgactgtcgcccgcaagggaacagaacatggcttacgatatgcagtgtgtcagaaggggaggcactcctcttctttttctattctggcggattacctgtggaaatgatttcacttttcgcaggtcatctgctataattagattggtttattgtaggttttgacctgtgttgatcggtatggaaaatatgtgaggtagagatgatatggcgaaattcaatgaagctttgaaagcaaagagagaagaactgggactcagcgtcgctgatatcagtgagcgtacccgtctgacggaacgctatatacacgcgctggaggaacgtgacatccaggcttttgccgatgacctttcctacttgcgctattttgtccgttcgtattgcgatgtggtcggccttccctatgatgaggtgaaggaagacgtgcagcaggccgttgcgcagtatatggaggaaaaggatcaggagctcacccagacccatactgacatcgagcgccacatcgtggatgcggagtcgctgtccgaagtggacaagacgaagaagagcaaaaaggcgaagaagacgcgcaagcggcgctataaccgcatggacgcctctttcctttcattcgtggccatcgtgctcgtggtgctgatcgtcgtcgtgtttgcgctggtcgtcttcctgcgcggttcagatgatgcggccgacgaacccagcgtgccggatacgccgccggtgcaggatcagcaggatgtcggcaacagcgatgaagaagatcagagcgcgcagcagccgcaggaagaggaaaaggccgagatggagatcgagaagaccggcgacacttcctatacggtgcgcaatgtctatgcgggcgatacgctgcgcttcacgctgcagccgggcggaagcagcacggtggatctgcgcgtggacggcgccagcgtgaatccggcgcagcaggtatacagcttcaccgatccgttcgaatacgagctcaacgtggagaagagctgcgaggtcagcgtcatctacgggttcatgtacaataacacgatccagatcaacggcaaggcgctggagatcgattccgccctcgccgccagtcagggaccggctaccttcaccattacgattgagatggtggaagaatgaatctgcccaataaattatctgtgatgcggatcctgctggttccgctgatcgtgatcctgtatctgcttccgcagcatacagatatcctgcatgaacagctcgcgcttgcctccttcacctttgatctgcgcgatctgctcgtgctggcgctgttcgccatcgcttcctttacggattttctggatggccacatcgcccgcaagcattcgctgatcacctcgtttggaaagtttgtcgatccgatcgcggacaagctcctcgtcgattcgctgctcatcctgttcgcggcggatcagcggatcagcgtcgccgcggtgatcctgatgatcgcccgcgacatcatcgtggacggactgcgcatgaacgccgcaagcgccggaaaggtcgttgcggccggatatgccggtaaggtgaagaccgtgctgcagatgttcatgatcatcattgagctgctggggatccccggcgcggatatcctgctgtgggctgcggtggcggcatcgctgtattccggcgtgcgctacttcatccagctgaaggatatcgtcatggagacgatgtaatgaaagaacttgttcagatgctgaaggaaaacggcatgacgatcggcagctgtgaaagcctgactgccggtctttttacaagcaggatggcggaagtgccaggggcgagcgccgtgctgaagggcgggatcgtcacttaccatacgcagatcaaggagacggtggctcaggtgagccatgaagtcatccgcgatcacggcgtgatcagcgcggaatgcgccagggaaatggccgagcacgtccggcggcttctcgatgtggatctgtgcgtgtcctttaccggaaatgccgggccggactgcatggaaggaaagccggcaggcaccgtatactgcgcattggccgcagaaggcggatgtgagacgtggcatttccattttgcgcacgcctcgcgcaacgcggtgcgcagccgtgtggtggacgagatggtcctgcggatcaaaagctacctgaatgaagggcaggggaatgagtaatggaagataagacagtcaagaacgacaagaaagacgctctgcttgcggatgcgatcaagcagatcgagaaacaatacggcaagggctccatcatgaagctgggcgaacgcgcggcagtcgatgtggatgccatcagctccggctccatcaagatcgatgaggcgctgggcatcggcggatacccgaaagggcggatcatcgagatctacggaccggagtccagcggtaagacgacgctggcgctgcatgcgatcgccgaagtgcagaaaaaaggcggacgcgcggcctatatcgacgcggaaaacgccatcgatcccaattatgcgaaaaatctgggcgtgaacatcgatgagctgatcctctctcagcccgacagcggcgagcaggggctgcagatcgcggagatgctcatcaagagcggcgccatcgacatcatcgtcgtcgactcggtcgcggcgctggtgccgcaggcggagctggacggcgagatgggagacgcgcaggtcggcctgcaggcccgcatgatgtccaaggcgatgcgaaagctcagcggcgtgatgaaccgcagcgaatgcacggccatcttcatcaaccagctgcgcgagaaggtcgggatcatgttcggcaacccggagacgacgcccggcggaagagcactcaagttctacgccagcgtccgtctggatatccgccgcagcgaggccatcaagaacggcaccgagatcatcggcaacaaggtcaacgtcaaggtcgtgaagaacaaggtggcgccgcccttcaagacggcatcgatcgagatcatgtacggcgagggcatctcctatgtcgcggagctgctcgatctgtgcgtggatcacgagatcatccggaaaagcggcgcgtggttctcttatcagggagagaagatcggccagggaaaagaagcggccaaaaatcacatcaagtctgatccggcgctcatggaggagctggccggactgttgaaggagaagatgaatccggtccatcaggaaacggaaaacaaggcatgaggacagaaaacggcgtgcatgaaatgggcggacagcagaaggctcatcccggcacggccgttttttctttcttgcaaaaccatcaaatccgtatataatgattataaaaaccaaaagaaaagaggggtctttcatggcgagactgaatcaggcagagaatgatatcctgccgctttccgcgctttcacatccgatctgcttcgtcgtcgatatggtcaacggcttcgtcaaggagggggcgctgcacgatgcggcgatattggatctctgcgcgccgatcagcgcgctgatcgagaagctgcagtgccgcacggtgtttgtcgccgactcacacccgccgatgaccagagagttcaccgcctatccgcagcactgcgtcatcggcagcggtgaggatgaagtcattgaagagctgcggccatacatccatcagctgatccgcaagaacagcacgaacacgttctttgcgccggattttcagcgtctgctggaggaggagcttcacggctttcgcgagatcatcatcaccggctgctgcaccgatatctgcatcatgcagtttgcgctgacgctgaacgcctggctcaatgagcacaatcatacagacaagcgggtgatcgtcccgctggactgtgtcgatacttatcacatcgagggcgtgcatgacgcatcggcgtgcaatgcctttgccatagcgaacatgaaaggaaatggaattctcgtgccgtcttccattcaggagtgagaaaatgaaaagttatgattacaaatttgattttcgtgacaagcgcaatctgagcctggtcatggacttctatgaactgacgatgagccagtgctacttcaaccgcgacaaggaggaggaagtcgtcttcgacatgttttaccgccgcaatcccgatggcggaggctacagcatctgcgccggcctggaggaagtgatcggctatatccagaaccttcattttgaagaggaggacatcgattatctgcgctcgctgaacaaattctcggaggaattcctcgattacctgcgtcatttttactttaccggcgatctgtatgcggtccctgaaggcaccccggtgttcccttatgagccgctgatccgggtaaaggcgaagatcatcgacgcgcagctgctggagacggcgatgctgctgtgcatgaaccatcagacgctgatcgcgaccaaggcaaggcgcatcgtgcaggcagctgacggccggacgatcatggaattcggcgcccgccgcgcgcataatttcgatgcggccgacttcggcgcccgtgccgcttacatcggcggagtggctggaacggccacgacctatgccggaaaagaatacggcatcccggcgctgggcacgatggcccattccttcatccagagctttgatacggaatatgaggccttccttcattatgccaagacatatccggacagctgcacggtgctcctggatacctacaacacgctgaagagcgggctgcccaacgccatccgggtcgccaaggaataccttgagccaaacggctaccgcctgcagggcgtgcgcatcgacagcggcgatatcgcctacctgtccaagaagatcagaaagcagctcgatgaggccggcatgcaggactgcagcatcgtcgtctccaattcgctggatgaatacctgatcgaatcgctcttgtctcagggcgcgcagatcgacagcatgggcgtcggggagaacctggtcacgtccaagagctctccggtcttcggcggcgtctataagctgagcgcggtctgccgcggcgaagagatcatcccgaagatcaaggtgagcgagaacatcgaaaaagtgaccaatccgggcatgaagaatctctaccgcatctatgataaggaaagcaagaaggcgctgggcgacatcatgacgctgcatgatgaagtgatcgatccggcagaggatctcaccatctatcatcagatgaactcctggaagaacaagacgatccctgggggaagctatgagctgcgcgatctgctcgtgccgatcttcgtcaacggcagcctggtctatgactgcccgagcctgcagcagatccgcgaatacagcgaagccgagctggatacgctgtgggatgagatcaagcgctttacttacccgcagacctattatgtggacctgagcaagaagctgctggatctcaagctgaagatgctggaagacgtcaaccggcaataaaaagcagggcatatggatacgcgcctctgtctgcttgacaggggaggcatccatatgcccctattttttctctgctgctttttccagctgcttctgcctgcgcatcacatcgaggatgtccggcgccagcgtgaccttgcgggtgacgatatcgccgttgaagaacagcatgagcagctgaaagctctcattggccgtcagcggttcgctgagcaggtgatgatgcccctcatggaggatgaacagccgtttctgcgcgtgcggaagctgtgcatacgcccatgtgctgctcttcagcgggatgacctcgtcctcatcgccatgcaggatgagcaccggacagaagacagaggcgatgctgtcgcggcacgtcttgacgatctcggtgaatgctgggtaaaaggtcggcgggacctggatatcatcattgtccggatcggatgaagcgaagatcatccgggtgcccttcttcaggtagccggcggccttgcccaggtccagataggtgaacgccggagcgatgagcgccagcttttcgatcgggtagcgggacgcgagccaggaggcgatgacgccgcccatcgagaagcccacgagatagaccggcagctttcgggcgcactgcgtgcggaccacagattccgcccgcatcagccattgtttaggatcgcagtcctcctcatcgaagagatcatacaggtcaaactggatcacatcgacacgctcatctttcgcccatgcggccaggttatccatctcatggctgcgccgccgtccgtatccatggatcgtgatgatgaccgcctttggctttggctgcagcaggcgcagcagtccttttttcttcatgtccatccgctcctctctttccccattatagcatgaaagtgcagcagtcttgcctggacagaagaaaaatcggccgattttgcgccggacgagaaaaggaagatgtttttttacctgctttcagctataataaatacggaaaggaacttgatatgaaagcgacactgatcatagcgaatatccacggcctgtatgcggtggatcagaaaacaggaaaaccagtgtgcctgaagcaggccttcgtggccatgcatcatgaccgcatcatcgattatggatgcggggatcaccatcgctggagcgataaagatacccggatcatcgatgcgtccaatgagatcgtggtgccggcgttcatcgatgccaatgtcaggttctgttttcacctgccttatggcgataatgtgcgtatccatctggagacgatggagaccttttaccgcaacggcatcacgacggtaggctgcacgcgcccgccgctcatggcctctacgccgttttatcgtctggtgctgcggcgcgatgaccatttccgtgcggtggactatacctgtctgagccggcagaagctccctgcggatttcatcctgaccacatcgttcgatcatgccctccggcagttttatgatctgatgccgctggcatcgctgctctatctcaatcagagcgcatctgcacaagagctgctggatgcgatgacgctgcgcccggcaaagctgcttgggctggatgcgtgcggaagcatccgcatcggggcaaaaggcgacctgctcgtctttcaggcgcaggatcttcatgagctcttccattccttcgggaagaaacgcctgcaccgcatcatccatgaaggcgtgcatatctggccgcatgtcatcatctgaacgaagcgcgaaatcaggaagctttcctgtttttttctgcaggaaacgacagttttcccagaggcagtcatatagtatgaaagggaggagggagacaatgcagctttatgagacagtcaacggagaggtcaaggtccgtcttctgcgtgatcatcagcccaatcaggccatgctcaatgagtttcagacggcgcagtttgactgtaagatgacaaagatggagctgtgcggcagccgcctgcacggctatgaggtggatgatcccgcctgtttcctgaaggtctttctgtcactgcgcaatgtgacatcagatgagatcttcatctataaagaggatttccagctcagttatgataaaaagaaattttcattcgaggcagaagatgagttcggcgtaacgggacagtttcccaatgtgatcgagctggagggcgatgagacaaaggaaggatgcctggtctttctgatccccaagagcgctgcgcagatcctgttcacttatcatgagtatgccgacgaagaagatccgggaaagacataccgtcttcgctatgtgctgaaatgacatgatgtgacagaaaacgattgacaaaccaagacaggttgtgtatcatgtgttcatacattgacgatgaagagaagagtaagccggaaagtttctcgccagagagtccctgtatggtgaaaggggacaggaacggaacagctgaaaatggtcttggagttgcgcggtcgagagattgctttaggccgcgacgcgttcgcccgttacagcgatagagtataatccgcctggcggacgtacttgatgaggcggcagcagtgatgctgcggcgaagataggtggtcacacgaagcatgtgctttcgtcctatacgggcggaagcttttttgtttaaggaggtagatcgtcaatgatcagactggaacatgtctcaaagacatttgcgacgaagaacggcgatgtccatgcggtccgggatgtcaccctgcagatcgctgagggggagatcttcggcatcatcggattcagcggcgccggaaaatccacgctggtacgctgcatcaatctgctggagcgtccgcagagcggaaaagtgatcgtggacggcaaggatctgcttgcgctggatgcggcacagctgcgcgagacgcgcaagaagatcggcatgatctttcagcatttcaacctgatgcgctcgcgcacggtggcgcagaatgtggcgtttccgcttcataagagcgggctgagcaaggcgcagatcaaagagaaggtcagctcgctgctggcgcttgtcggactgagcgacaaggcggatgtctatccctctcagctctcaggcggacagaagcagcgggtggccattgcccgcgcattggccaacgatcctaaagtgctgctctgcgatgaagcgaccagcgccctggatccgcagacgacccgcagcatcctgcggctgatccgtgacatcaaccgcaagctgaacctgaccgtggtgctcatcacgcatgagatggccgtggtcaaggagatctgcggccgcgctgcggtcatggaagaggggcacatcgtggaggaaggcgacatcgtggagctcttcacccgccctgtggcggaagtcacccgcagcttcatcgccggttcatctgcgagccagcgcatcgatgagctgatcgaggaagggcacgccctgacgaagctgggagaggatgaggtgatgatctcgctgaaatatgacgcagacagcgcatcacagccgctgatctcacagatctcccgtgagttcggcgtcgactgcaacatcatccacggcaatatcgatatcgtcaaggaagcgccgctgggcacgctgatcgtcacgctgaaaggcgatgcggccgcacgtgaggccgcgatggcgaagctgagcagatccggcgtgaacatggaggtgatcagacgatgaacgacatcctgaatcaatacatgcccaatcttatctacatgtttccagagtttctggaatcgatcggacagaccttgctgatggtgctggtctgcggattcatctcgctggtgttcggcatcgtgttcggcctgatcctggtggtgaccagagaaggcgacatcctggaaaacaagatcgtctatacggtgctggggaagatcatcgatctcttccgcgccattcccttcatcatcctcgtcatgatcctgagcgatgtcaccaagttcgtatccgggacctcgatcggcctgcgcggctcgttctttccgctgatcgtcgggacgatccccttcttcgcccggcagatcgaacaggcgatcgccgaagtggaccgcggcctgatcgaggcgagcgaggcgatggggctcaccccgctgcagatcatgttccgtgtctatctgcgtgagagcgtaccgagcatcatccgcgccacgacgatcaccctgatctcattgatcggcctgacggccatcgtcggcgccatcggcgggggaggcgtcggcgcattctgttacaactacggctattccaagatgcagtatgacatcatgtgggcctgcgtgatcgcccttgtgctgatcacggtcatcattcagagcatcggcaatttcctggcccgcaggacgacccactgaggtttcaacatctcatgatgaaacgataaataagaaaagaaagagaggaaaatgacatgaagaaactgttgagcggcgcactggcgctggtcctttgcgcagccttgagcggctgtggatctacttccggtgatgagaagtcactggtgatcggcgcgagcatcacgccgcatgcggagatcatcaagaacatccagccggatcttgaagagatgggctacacggtggagatcgtggagttcagcgattacaacaagcccaatgaagcattgaacgacggacagctggacgccaattacttccagcacaatcagtatctggcagagtggaacgagaagagcggcacggacctggtctctgccggcgacattcactttgagccgatgggcatctattcccagaaccatgattccctcgatgagctggaggagggcgcgaagctgaccatctccatccccaatgacccgaccaacggcggacgtgcattgcagctgcttgcggccaacggactgatcaagctggagggcgacaagggcatcagcgcgacgccgaaagatatcgtcgatggcccttatgaagtggagatcgtcgagatggccgcagagagcattccggtcaatctgggcgatgtggacttcggcgtggccaacggcaacaacgcgctgaatgcccaggtgctggatcggctgatcgtggccgaggatgccggcggcgtggcgcagcagtttgccaactgcatcgcggtgagaaacggcgatcaggacacgcagaagatcaaggatctgatgagcgtcctcagatcgcagaagaccatcgacttcatcaacgaaaactatgacggcatcgtcgtcccgtttttcgaggcagaatgatcccacagggaagaagaccattcaggcaggttttcttcccttttttgcatattcatgtcgagaacaggcaaaaatgattgtcattttcaggaaaatgtgctttgattagagaatagaaaggtgagatgtatggaccgatttttctcgttcctgaaacggaacatcatgtttgtcatcatcctggttctgatcctcttgatcaccgcgggcatgatcgtgtatcaaagcgtcagcgcgcatcccgtgcctgaacgcgtcagcggcgtcgatcagccgggcgatgatgaggatcctcaggatacggcgccttcaggcggaggggatgaagagggggaaccggtgcagatcagcagcttttccggcagcgtggtgaacgatgatacggtcctgctgacatgggaagtggaaaacagcggggaacaggatgtcgtctccagcgccctgtattacatctcgcaggacggcaaggagacctggctggccgatgtgaccaaccacaccagctatcagctgtctcaagacgcgtatcagtttgaaagcggcacgaatcatttccgcgtcgtctgcacgctggaggatggagaaagcgtgcaggctgagacgtccgtgcagatcgccggcgtggacgatgtgcgctttgagatgagcttcgtcggggaggggctgcagctgccccgccggatcggatgaggaggtcccgctggcctcttattatgacgtctccgactccggcttcaccattcattatgtcggaaacgagacgcagagcgaaggggacatgatctatggaacggtcacttatctgatgaacgattccgcggtcgcagccggcgagcattcgttcaccttgtcctttcagttccccaagctgggcaagagctatgagtatgatgtgcgttatgtgaagcgtgcggacggtacccgtcaggaggtgagcgcagatgaatgagcagctcaagacgatgatcgaggagagcagccggatcgtattcttcggcggtgcgggcgtctccactgaaagcaacatcccggatttccgcagcagcggcgggatctatcagcagaagaagtatccttaccctgcagaagtaatgctttcttcggatttcttttatgaccatacccgtgcgttctatgatttttattttcatgagatgatctatccggacgcacggccgaaccctgcgcatctggcgctggctgcgctggagcgtgccggaaagctgaaggcggtcatcacgcagaacatcgacggcttgcatcagcaggcaggaagcaaggaagtgctggagctgcatggcagcgtgaaccgcaaccgctgcctgaactgccatgcgttcatggacctggacacgctgatggcgcatcgggacgaacaagggatcccgcgctgcgcggaatgcggcggcctgatgaagccggaggtggtcctgtatggcgaagggctggatatggaagtcatgcagcgttccgtggatcatatcgcaaacgcggacctgctcatcgtcggcgggacctcgctggtcgtctacccggctgctggtctgctgcgctatttccgcggttcccatctggtgctgatcaaccgtgaccgcaccgagatggatcaccttgccgaactggtcattcatgagccgatcggtcaggtgctgaaagaatgggatgaataagaggaggatcgtatcgatggatgaaatgctgaaacagcagttgaaagaagaggtcgcgcagtttcgccagaaagcggagcaattcatgcgcggcgagatcaacatcaaggagttcaagggcttttccggcggattcggttcgtatgcacagcgcggcaagacgcatctcatgctgaggctgcgcatggatcaaggcgtgatgagcaaggagaagctggcctttgtctgcgacagctgccgcaggcatgatgtggatctggcgcatatcacgacatgtcagaccatccagctgcatcatctcagcgtggaggcggtctgcgacatcatggaaaaggcgctggatgtcggcatcgtgaccagaggcggaggcggagactatccacgcaatgtcatgtgctctccgctcagcggcgtagaacaaggagaatatttcgatgtccgcccttatgcggaagcggcaggggcgtatctgatctctgtcatgaacaagcgcaggatgccccgtaagctgaaggtggccttttccagctcgcctgccaatgcgacgcatgctacgttccgcgaccttggattcgtggcgcgcgcagacggcgcatttgatgtgtattgctgcggaggactgggcaataacccgaagatgggcgtgcgcgtggcgtcagcgatcgcaccttcccgtgtcttgtattacgtggaagcgatgatccgcctgttcatcgcctatggcgattatacgaaccgttcccgcgcccggacgcgctatctgcaggataccctcggcgagaacctgaagagcgagttcgacctgaagctggtggaggcgatggcgctggatctggacatcgacgtcagcccgcagacggtgaacaagcagggaaaggcgggcagctttgatgatccgcgggtcatcccccagaagcaggatggcctgtatgcggtcagctatcatccgatcgggggagagctttccccggcttctctttaccgcatcgaggagctgatccgcgatatcgatgcgtgcgaggtgcggatcgggccggatgagaccatgtacatcatcaacctgaccgccgatgaggttcccgctgtcctgaaggggacggatgacggggcccgcacggcgtttgaacacagcgtatcgtgtgtgggcgcaagcatatgccaggtgggcctgcgggattccaacggcgctcttcagcagctggttcgcgcgcttcggccgtatgagtttgcggacggcgtgctgccgcgcatccacatcagcggatgcacgagcagctgcgggacccatcagagcgcgcagatcggccttcagggcaccgtgaagctggtcgatcaaaagccgcagccggcctatgtgctgagcgcaggcggctgtgatcaacagggcaaagagacattcggcaaggtgatcggcacgatcctggagtccgatctcatcgccttctttaccaagctgggcaccacgatcagcgccgcgcaggaaacctatgagacatggatcagggaccacggcgaagaatttgccgcattggcagctgaatataccagatagcagataggctctcattgaccggatggtcaggagagccttttttcgctaaaaaaagaaaaaaactatttacaaacaggggg

SEQ ID NO: 4087 - DNA, 5893 bp, Unknown
  16S sequences of unknown bacteria
gacgacggggaaacctatgagctgaatttaatcgacacccccggccacgtcgactttaactatgaggtgtcccgttcccttgccgcctgcgaaggggcggtgcttgtggtcgacgcatcgcagggaatagaggcacagacgctggcaaacacctatcttgcagccgaccacgaccttgaaatcctcccggtcataaacaaaatcgaccttcccgccgccgaccccgacagggtggcgcacgaaatcgaggacataatcggaatagagggaatgtcggccccccgcatttcggccaaggccggaattaacataaaagaggtgcttgagcgcatcgtcaccgattttcccgccccgagcggcgactcctccgcccccttaaaggcgctgattttcgattcctactacgacccctataagggcgttataacctatttccgcgtggtcagcggcaccataaaatgcggaatgacggtaaaaatgatggcgaccgacgccgaatttcaggtggtcgagcttggaagaaagggtgcccgcagctttatgccctgcgacgagctgacggcgggcgaggtcggctatttcaccgcctcaataaaaaccgtcagcgaggcgagggtgggcgacaccataaccggtgccgagcacccggcaagcgagcctctcgagggctaccgagccgtcaatccggtggttttctgcggcgtttatcccgccgacggagcacagtataccgaccttcgcgaggctctcgaaaagcttcagctcaacgacgcgtctcttcatttcgagccggaaacctcggcggctttgggattcggtttccgctgcggatttctcggtctgctgcacatggaaatcatccaggaacgccttgaaagagaatataatctcgacctcataaccaccgcccccagcgtcgtttacaaaatcaatctcaccgatggaacaaccctttccatcgacaaccccacaaactaccccgaccccgcaaccatagagtcggccgaggagccggtttgcgacgtgcatattttcagtcccaccgactatgtgggcgccattatggacctttgtcaggagcggcgggggattttcggcgatatgcaatatccctcctcaaaccgcgtggacattcactacgaaatgcccttaaacgaaattgtatacgactttttcgacgcgcttaagtcccgcacaaagggctatgcctcctatgactatgagccaaagtgctataagccctccaagcttgtcaagctcgacgtgctgttaaacggcgaaatagttgacgccctttcctttatcgttcacgccgacagcgcctataaacgggcgcggcgaattgccgaaaagcttaaggacaacattccccgtcagcttttcgaggtgcccgttcaggtggcggtgggcggcaaggtcattgcgagagagaccatccgcgccatgcgaaaggacgtgcttgccaagtgctacggcggcgacatcacccgaaagaaaaagctgcttgaaaagcagaaggaaggcaaaaagcgtatgcgcagtctcggctcggtcgaggttccgcaggaagcctttatggccgtgctcaagcttgacgaataatttttcgtatcaaaaaaccgacttttccaaaggaagagtcggtttacttttttgtattgaatttaaaggggagacttctttatttttcccgattgacggggatatttttgcgaaatgggagaaattttatctataattatgacccgacggtcattttcccccaaagagaattccttgaccgccgaaagccttcccccaagcagttttacggcgttttcggcctgcgccgcctcctcctgccccgacggacccttcatggccaaaaatgagccgccctttttgacaaaaggcaggcaatattcgcaaagcacgttaagtcccgcgaccgcccttgccgtcgcaaagtcgaatttttcacggtattttgcgtctctgccaagctcctcggcacggccgtgaaccgtcttaaaatcaaggccgagctcggatttgaccgcctcgagaaatgtaatgcgtttattcaggctgtcgacaagggtaaactgcatatccggccgcattatggcaaggggaaccgacggaaatcccgcccccgtgcccacgtccgcaagggaagcgccctctttgaaatccgccgccgaaagcagcgtcagactgtcggcaaaatggagcagagccaccccctcgggagaggtgatagccgttaaattcattttttggttccattcaaaaagcagtcttgcatagccttcgaatttttcggcctgctcggcatttatttcgacgccgaaattttcggccgccgacatcaaaagctttttatcaacataatccatattatcttctcggcttttttctcatattttttttaaggttttcttccctctttgccgcctcaaaatcccttttcatggagcgcacgataaagaaaccgcccaccgccgcaaggggaatacacaccacaatggcccaggtggcaaagctgcgctttttttcggccacccgctgcctttcggtttcgacggtgtattcgagatttgaaaaaatatagtcggccgtgtcggcggcgttggtcgaaagggaggaggcgtcttcaataagggtgagggtataaattcgtccgtttatgaccgaaatatacatcactcggctgtcggcattgcccttttgctcgtccttttcaaaggtcagacggtaaaaaagcgccgcgtcctttcttatttcctttatgtcggccgccctgtccttaacgccgcctataagggcgctttcggcaagggcaccgtcggaaaactcggcaagattgactatttcggaggaaacgtcggtgaccgaggaggtcatgaaaaccgtccatccgagattttcggccacggcataaaaaagatagtccgactcaagcttttttctcagcgtctcggtgtcctccgaaagctcggcggcgcggacggactttgactcgagattttcggccgtgaaaaccgtgaaaatgtcggcaagatgaaccgtcattccgtcctttgtaacctccgtgtcggcaagggccgaaaggcaaaagctcaaaatgcaaagcaccgcaaggcaaaagctcaaaatttttttcatacaaatcccccgctcattttccagccctgtgtcggtcggaaatcagccagaaccataaaaagaccaaaatctgaagcacggcggcaactgcgtatataaggaacatattgggtattttcagggtgatgtcgacgctcgccgcaagggtccagatcattcccgtgatggaaattatgcggctggccgtccgccaccaaaggcagctgaaaaccgtggtgacggtaaagctgacgggacatccgtagataaaaacaagccattttctcggaagatccggaaaggccacggcaagcacaaaaaacacaaatgtggccacaagccacacaagccccaccgaaagggcgggaatgagggtgtgtttctttgtcagctttatgggctttttgggcggcgcggacgacacaaaatcatccaccgaaactccgaaaagctcggccatatttgtaagaaccgttatgtcgggcagcccgtcgccccgctcccattttgaaaccgatttgtccgaataattgagtttttcggcaagttccaactgggtcaggccggccgcctttctgtaaaatgtgattttttccgaaacatttttcttaagtacatcttcattcatgtgtttattataaactattgccgctcaaaaatcaacccccctaaaaaccacggtttcatgcagttttctactgtgggtagagccgatttttttcgactctaccaaacaaaaatctttcataggagaaatttaccctcggatagggtgacaaatcgagcccccggcgataaaataattacagcaaaggaaaaacgaaaaattctttcctctgccgaaaaacaaaatcttataaagattttaattttgaaagtacatcctttttgggaggttttaatatgagcgaaaaaaacaaaactttaaccgcaaataattcggcaaacaaaaccgagcgcaaaataaccaaggaggccgtcgccgcaaagatagtgagagtcatcaccgtggcgccctttatggccgccctcatgctgaccgtcatttggtttgcccgtcccgagtcatatctcaatttcggacactatttatatgctctcggcgcgctgaccattttcccccttctttcatatcccgtgtcggtaataatcccgcccattcgcaaaaaggggagagacggacagcgaaatctcgccattgtcttttcggtcatcggttacatcgcgggaattctcggctcggtatttttcggcgcagggagaattgagcttctcattttcctgacatatcttctgtccggcgtttccattgccctttcctcctttgtgttcggcgtcaaggccagcggccacacctgcggagtttcgggtccaattgccatgatgatctacgttttgggacttccatatgtcgccatgtacgctctgctcggagcggtggtttgggcgtccctcaaaatcaagcgtcacacccccgttcagcttgtcctcggcagcattattcccgttgccgccatgctcgtttccatccgccttgtgggagtttggcccttttgataacatcgtctgatttaaaagtccgatataattaaaaccgaaagcacctcaaaggccgcgttgaggtgctttttttcgccgtcattaaccgcagcgtcatgtgatggcggctttttttatatgaaaatcggctgtatctgccgcccttgacaggccgcctcgatggtatctcccagtctttcgaaatccgccaccaccgaccgcggctttttctcgggatcgtcctgcttcatggggacaaaaaagatgttctttcggttgagcagccgcccgatattctgtgccgaacccgacagagcgtcgttggtggaaacggctatgaccgtcggccgcagatttctcaggtgtgccttgaccgcaagggtaaccggcgtgtcggtaattcccgccgcaagctttgccagcgtgttgcccgtgcagggcgccaccgccataacgtcaaaaagctttttgggacctatgggctcggcggttttaagctcgtgaataatttccttgccgcatatttcggttatttttcggtttatttcctcgcatttgtcgaaccgcgtgtcggtaaaataggctgcggccgacatgatcggcgttatctcgtgccccgccgccgcaagccgttccatgacgggtattattcggtgaaaggtgcaaaaggaaccgcaaatcccgaatccgattttaagagactgcattgacgctcacctccgaaagccttgaaagacaggtgttcacaaaaagctcggccgccgccgcaggagaggtctttgagggaagggaaagagctgaaacggcaccgaccccaagcctctttgccgcctcgaaatccaccccgccgggggaggaggcaaggtcgattataaagcaatttttattcgcttttttgagtaaattttcatcgcatatcattgacggtatcgtgttgaaaactatgttgaaattgtcgaaatcccctttaaaatcggcggtttcggacaggccgtcccgcattatttcggctcgctgttcgcttctccgtgcataaacttttaccctttccctacataaagcgccgagccttttgcaaagaggttttgccactctgccatatcccagcacaaggattttactgttccaaaggctctcttttgtgtgggaaatcgcaagctgaatcgctccctcggcggtcaaaattccgttttcgattaaaaaggtatatttgcttctccccttgaaa

SEQ ID NO: 4088 - DNA, 32759 bp, Unknown
  16S sequences of unknown bacteria
gaaagatgctttcagagatggcaatctatgatgccgctgcattcactgctttatgcgacacagcaaaaaaagctttaaactaaatataaactaaaattaaattttaaaaatttaacctctattcgtttgaccggatagaggtttttgtttataatataatgtagaacaaaaacagacgacgtgctgtagataataaggaggcagtcaatgaagaagaaaatattatctgtatttctgattgcggttatgcttgtgactctgatgccgtgcagcgcattcggagcaatcaagagcgcaggaacagcaacaaatacaagcagtcttgtatcatctgaaaacctggaacataattctgtaaaggtaactgcaaacggcagctctctttatgttgaagtcgaaacaccgattaaggcatcggaattcaatgtgagtgttgtcaaggcgggacagaaaaaaagcagctgggtttgtcgcgtttatcctgaaaatatgggtggctattacagctttgatttcactgtaccgctttatgtggcaaaagcaggcggcaatctgagcggcgactatatactcatgattacaatgaagaaacccggcagcagcaagtcaattgtatgttacaagaactgcgctttcaatgtcaggagcggcaagttctcaattctcaaatacagcaaggttataaatgagaacaatcgtatagagaagctgggagcaaagaaaagcgcttcaaacttcaaaaagacaaatatgagtgatttaaagactctcctgttcagagatcctgtaaccaagaaggttgcatcagttacaaaatcaaaggttaaatacttcaaaaaaacagctgacagtgtaaccaaaggggctaagacagattacgaaaaggtgctcaaaatctatgaatacataggcactaacttctactatgatactgttgcattctcgacaggaaccaagcagtatatagatccgtaccgtaacctttataatatgagaaacaagaaaaaatcagcaaacagccagagcggcaaggttgcaaccacctgtgtaggatattctgctgcagttgttgcgctttgcagagcagaaggcatccctgcacgtattgtaaacggtcatcatataagtcttggtgacggagggtttaacaactggtcaacagaatcgggaattacaaagcttgatcactggtgggctgaagtttatgttgacggcagatggataatcgtcgatgcaacacctgctaacagtaacaaatggaacagaaacacaaaaaaatgggattatacaggtcttacaaattacatttattttgatcctacacctgagcagtttgcaacctcacatctcatgtttcagatcagaggagtaaattagttcaaaatcgacaactgattgtgacaaattacaaccttcattaaggctataatcaagatagctttaatggaggttttttagtggctgtttacggagaatatctttttgctgaaaacttcatagcgggaatggtaattttatctgttaccgggatatgggcagggaggcgcgcgcatacaggctggcttattacaggggcgctgctttgcgctgcgtattcatttacgatttttgtaccttttggcatatttgcagagcttgcaatgaaaatactgttttcatttctgattacaggcattgtattctttggaaatgagaagattaaggaatggaagcggctcaaggctgtatatatcaggacagttataatcttttatactgtcagctttatggcaggagggcttgcctttgcggtactgcttcttacagacaggcagggcgcttacggcagcggcggcttttatatagcggatgcctcgtatcttaaaattatgattgcgctggcattatcatattttatcggcagaggcatatacggatatatttcaaggcgtattgccatagataaagctgctgtagacgtgcagataaaaaacggagaaaaaatgtggcagggcagaggccttatagacacgggaaacagtctgaaagagcccattagcggaaagcccgttcacatagtatcttcggaggtggcagaggctgtgacggcaggaagtgtgagctatgtggcgataccatacaaaagcttaggcaacccctgcggaatactgaacggatacagggtagatgagattacggcgggaacagttaaaagaaaaggggctgtaattgcagtcagcgacagaagatttgagggaacatacgatgttctgcttaattatgaaatgatggaggggtagcaaaatgataagaaaactcatacttaaaattctggaggcaatcgggggcaatgtcttttatatcgggggaaacgatgtgctgccgcctccgctttcgccggaggaggaaaaaaagataatagagaaatttacggcgggcagtcttgatgcaaggaacatacttatcgagcacaatctgaggctggttgtctacatagcgagaaagtttgaaaatgcaggggtaaatgtcgaggatctgatatcaataggcaccataggactcataaaggctgttaatacatttaaaagcgataagaatataaagctggcgacatatgcttcaagatgtatagaaaacgagatacttatgtatcttcgcagaaacaacaggattaaaaacgaggtttcctttgacgagcctcttaatatagactgggacggaaacgagctgctgctttcggatatactgggcaccgaaaacgatgaggtctatcatcacatagaggaagaggtcaattacaacctgctgagttatgttatgaaaaagctgtccccgagagaaaaggttatcatggagatgcgcttcgggcttgtaaacggggaggagatgacgcaaaaggaggttgccgatgagataggaatatcccagtcgtacatatcaaggcttgaaaaaaagataataagcaggatgcagaaagaaataaagaagctgggctgacaaggcttttaagcagagcaggcagagatgtctgttctttttttgcatttaattatatttaaataaaattgagtattgactttaattatattaaagtgtatatttaatataattaaagaatggattaggaatgaaggaggttgaatatggttgtaacttttcagtcaataataatgctgctgctttgcgcggcggtaatagggacagtctggtaccttgtcataaaggcaatcagaaaaagataatgatttgatttgaaaggagaaatcaggagaaatgactgcatattattacataatttatataataccggtttcagcaatagtgtttatactgcttcttgaatttaacaaacgtaaggctgcaattgcaacactgacagtgttcgcggtcatatttatggtgctggccgtaaatgcctctatgttaacacatggtgagagcgggaggctgatgccaagcccgatgcacctgcagtccgaggatttcaaaactgagggaaccatacccgttgccgaaaaagacagcaggttctatttcgggcagctcaaggtatatgaaaacggcagtatgaaatactgcaatatgcactttgataatcagggcaggcttacaggcgatgaaaacgctctcagatacaaagaggatatatatcggacactcaaaacctttaaactctacggtgaattcacaggaagcagcctgagctatgagcgtattgaaaaactgcaggcagacgaggcaaggcagaaagagagaatagaaagctttttcagtgtgaagatgtttgtcttattgattattatgcttgcagcagcggtgcttgctcaccttgccatatactattatatggttgtggttaaaaggaaaaagagcataagcagtatgcgcgctatggatttgtaggaggtaggattaatgactatagaagtagttcctgaatggatggtaaatttagaagatgaagatgtgaaattcataaaaaatttcattctgtcatcaggctcgctaaaggagatagccaaggaatacggggttacatacccaactgtaagacttcgccttgacaggcttatacagagcatagaaatgagtgagagcagggagcaggaccattacgtatctcttgtgaagcggcttgccataaatgacaagatagactttgaaacagccaagatacttatttcggaatacagaaaagaggtggaaggcaaatgacagagagctttgcagaaactttaataatgattattgcagttcttataattattgcgatagtgtttgtgataatactggcagagaaaaagctggcgctcaaaaaaagcaggatacccggacttgtgataccggttggagtccttgttatagcgattgtactgggaatttgtctgaactggcagtatgcaggctgcaaaattaaaaccattacacagacgacatctgacggatatgaaatgagcctgaagctccgccttgacagacagggagaagttgttgattacaacggaatagaggtcagaaatgctgacggcgtgctgattgacagagtggattttgatcctgatcccagtatggaagatgatgatgactgtccggtcagcggtatacccgacagatattattacaataaatatgcagagaaaatgatagacggaattgatttcggcatttcaacgggcaggctgtcactggacgacagcataaacaggatatattatacaaagcatatgtttacggaaaaaaatcccattctgtcgcttgcacagatggcactgatacttgtgagtataccgacaggaattatatatgcggcggcaaggctggcaggctcgggcaaaagacgcaaagacaatatgaataatatgaagcttatggatctttaatttaacagtagtgataaaagagggggttaagacaaatgacacagacggtaatgtcgataatacagctttcatcatctgcggcagtgattgcagcagcagttatagcggtgagaataataattaaaaggaaatcataggttttgaatttaaaccctcttgcggctcaaaagggggaatggtattataatataaaaaagaattacaggctctacagggtatattaatgtgataaaggagggcgctatgaaaaaattattatacggtattggatttgttgtattgtcgctgattgtttcatgtcttgcaggacagatattctgtatactgtttggctcaacggatattattatggcaacaggtaatataatagggtttatgatgccggcggcatttgtggtacctgccatatatcttaatgtcgcagagcggaaataattaaaaaatccttgaatattgatgcagtttctactgctttattgcataattagagtatattatacaggtaaaacatatattgtgatgtctgtataatatttttttgcatatattttgtggttatacacgaaatactattgcataatctgaataattggtgtataataatttgcgtatttgaataaatatgcagataactgtataaaaagaaaggggccagaaatgtacaacgtatttattgatggagcagaaggcactacaggacttaaaatccacgaatactttaaaaagagagatgatataaacatcattagaatagatgaagcaaagcgaaaagatttagatgaaagacttgcaatgataaaaaaagcggacatatcgtttttatgcctgcccgatgcggcatcatcggaaatcgctgcggcagcgcctgcggaatgcaggatactggacacctcaacagcccacagaacaaacgacgactgggtatacggcatgccggagctttcaaagggacaaagacagaagataaaagaaagcaacagagttgcagttcccggctgtcacgccacaggagcaatactgataataagaccgctgcttgaggcgggatatataaatgcggattatccgttttctgtattctcacttacaggctacagcggcggcggcaaaaaaatgatagcagactacgaaagctgcaggcaggtcagaagcccgggacagtatgcaataacccagaagcacaagcacctgccggaaattatgaaagctacaggacttgaaaccagaccgtcgtttatgccggttgtgggacacttcttcagcggcatggaggttacggtgccgctttcgggaggatttctcaaaagggaaatatcctcggttaaggagcttactgatatgtatagagaatactatgagggaaaccctatggtaagcgttaaagatacaacaggtgataacggctttatatattcagaccgccttgcaggcagcaaccgccttgaaatatcggttgagggaagcgaggaaaacccgcttatagttgcaacctatgacaacttaggcaagggtgccagcggagccgctgtgcagaatatgaacataatgcttggaatagatgaaacgaaaggacttatataaatgagtgatattaaatatatagacggcggagtatgcagtgccaagggatttaaggcagcgggcacagttgcaggctttcgcaaaaacaaaacaaaaaaagacctctgcctcatagtcagcgactgtatgtgcagcgctgcggcagtatatacgacaaataaggtaaagggcgctcctatagctgttaccaaagctcacatagcagacggcaaagctcaggcagttatatgcaacagcggcaatgccaacacctgtgcgccgggaggagtcgaggttgcagaggaaacatgcagacttgcggcaaaggcgcttgacctgaagccggaggacatagctgtatgttcaacgggagtaatcggcgagaagctgaagctggagccttttgaaaacggaatacctgtacttgcgcaggctctttcctatgacggctctgatgatgcggctgccgctataatgactacggacacaataccgaaatcagtggcggtggaatttacaattgacggcaaaaaatgcacaataggcggaattgccaagggcagcggtatgattaatcccaatatggcaacaatgctttcatttataacctctgatgtaaatatatcacctgccatgcttcagaaagcattaagcagtgatatcaaaacaagctttaatcagatatgcgttgacggagatacttccaccaacgatacagtaataattatggcaaatgcaatggctaaaaacagccctatagaaagcgagggcgaagcctttgatatattctgcgaagcgctttcaaaggttactgtgtacctttcaaagaaaatggcaagagacggagagggagcaacaaagcttatagaatgtaacgttacaggcgcatctgatgaatatacagcgcagaagataagcaaatccgttatatcatcagaccttttcaaggctgcaatgtttggcgcggatgcaaactggggcagggtgctgtgcgcaataggatataccgagggcgattttgcggttgacaacatagatgtgacaatgagctcggcaaagggctccgtaaccgtatgcaaagcatcagaggctgcggaatacagcgaggataaggctacagagattttatccgaggaggagcttgtaatagatataaatatgaatcagggagaggctgccgcttctgcgtggggctgcgacctgacctatgattatgttaaaataaacggctcatacagaagctaagggggaattaagattatggtaaaacagaaatatctggataaagcggagatactgatagaggcgctaccgtatatacagcgtttcagcggcaaaataatcgttatcaagtacggcggaagcgcaatgcttgatgatgagcttaaaatgaaagttattaaagacgccgtacttctgaagctggtaggcttcaagcctgtcatagttcacggcggcggcaaggaaataaacagatgggttgacaaggtaggcatggagcatgaattcatagacggtttcagagtgactgacggtgacactatggagctggttgaaatggtgctttcaaaggtgaacaaggaccttgtggcaaaggtgcagtctctgggcgttaatgcggcaggtataagcggcaaggacggcggactcatcaaggtaaaaaagaaaatgcccgaaggcaaggatataggctttgtaggcgatatagtaagcgttgacacaaagctggtggaggatcttatcgaaaaggactttctcccggttatattcccgctgggaatggacgatgaatttaatacctacaatgtaaacgcagatgaagcggcggcggcgatagctacgggacttcatgccgaaaagcttgtttatctttcggatgttgagggtgtcagagaagaccctgatgatcctgaatccgtactttcggagctgtttgttcacgaagcggaggagctgatagaaaaaggcgttatatccggcggtatgcttcctaagatacaaaactgcattgatgcgctcaagggcggcattacaagaatacatataatggacggaagaattccgcacagtctgcttctggagatattcacaaacaagggtataggtacagcgatattaagtgatgaagaggagaaatactgggatggaaagcattgatatcaaaaaaaccgacaaagaaaaaatagtaaacacatatgccagatatgaccttgcggtaaagcagggaaagggcgcggtgtgcacatcatatgacggcaaagaatatatagatttcacatcgggaataggagtaaactctctgggcttttgcgatgacggctgggtaaaggcggtaacagagcagcttaataagctgcagcacatttcaaacctattttatacagagccgcaggttaaggcggcagagcttctgacagcaaagacgggaatgtctaaggtgttcttcggaaactccggcgcggaggcaaacgaggcggcaatcaaaactgccagaaaatacggaagcaaagtcaagggcaacagccttaataaaatagtaactcttgtcaattcatttcacggcaggacaatggcaactataacggctacggggcaggatcattatcatcagtatttcacgccgtttgtagagggctttgcttactgcgaacctgataatatacagcagcttgaggaactggttgacgataatacctgcgctgttatgcttgagatgatacagggagagggcggagttattgctctttcggaggagtttgtaaaggctgcggagaagctgtgcagacaaaaggacatcctccttataatcgacgaggtgcagacaggagtcggaagaaccggcaggatgttctgctatgagcattatggaattaaaccagatatggttacctttgcaaagggtataggcggaggacttcctgtaggcggagtcatattcggcgagaagtgctgcgatgtgctggagccgggagatcacggaaccacctacggcggaaaccctgtcgtatgcgcaggcgttgttgaggtgctttcaagggttgacagcgaatttcttgaggctgtgacagccaagggagaatatatcagagcggcgcttgcagatattccgcagattgaggaaattacaggcaagggtcttatgatgggacttaaactcaaagacaaaaaagcctctgatgcagtatcgcaggctatgagtgagggactgctgctgcttacggcaaaggacagagtaagactgctgccgccgcttacaatcacctatgaggaaatagacagaggacttgaaattttaaagaaaatattatagtttttttgtggagatggtgtaacatctccgctttttttgccgtaactattgacatttgcggtggaaaatgatagcatacgataatagttagaataactaactattgttatagctaaagattagtaaatctaatcaataattaaaaaggaaggtacaaaaacaatgttatatgatcagattgcagaaatcgtagcagaacacttagattgcgaagtttcaactatcaaaaaggattcaaaatttgaagatctgggaatcgattcactcgatgcagttgaattagttatgaaattagaagaaggtcttggaattcagcttgacctggacagaaacctcaacacaatcgaagaccttgtaaactttgttgaagaaaaggcagcaaaataatgaaaaaaggaacacttgaaaatcttgtcggaatagaatatccgatttttcagggcggtatggcgtggattgcagatgcaaagcttgcagctgcagtctccaacgccggaggtcttggaatcatcgcagcaggaaatgctgacggtgactatgtaagaacacagataaaagaagcaaagaagcttacagataaaccattcggacttaacattatgcttttaagcccgtttgcagacgacattgccgatatagcagtggaagagggcgtggctgtaattacaacaggcgcgggaaaccctacaaaatacatgaagaagtggaacgaagcaggaattaaagttatccctgtggttccgtctgtcacttttgccaagcttgccgaaagaagcggcgctgcggcagtaatcgcagaaggcggagaaagcggcggacacataggagagcttgcaacaatgacactggtgccgcaggtatgcgatgcagtatcaatccctgtaatcgcggcaggcggtatagcagacggcagaggagttgcagcggcacttgcactcggtgcttgcggagtacagataggaacaagatttcttactgcatacgaatgctgcgtgcatgagaactacaaaaacaaagttctcaaggcaaacgacacagctacagtagttacaggcagaagactgggtcaccctgtaagaagcatcaagaacccgttctcaagagattatcagaaagttgaatatactgatatatccgatgaggaactcgaaaacaaagcagcaggcgcactcagaaaggctgtagttgacggagatgagaaaaacggctgcttcctttcgggacagattgcaggtcttgttactaaagaagaatcatgtgaagatatcatcaaagatcttatgagtgacacagaaagaattctggaggatttaactaaatgggtaaaataggatttgtttttgcaggtcagggggcacagtacaccggaatgggtgaaagcctttcaaaatgcagcagcgctgcggcggagcttttcaaaaaaatcgacagtgttagacctgaaacctcaaaacagtgctttgaggcagatgcagagcagcttatgaaaaccgatgttacgcagccttgtgtatatgcggttgatttagcgtgcgcatatgctctcaaagaaagaggcattatggcagatgcagttgcaggctattcactgggagagcttgccgcacttacatttgcaggctcacttacacctgaagagggcgtcagacttgtagctgcaagaggagctgcaatgcagagagcctcagagcttcaggaaacaggcatgatggctgttttaaagcttgatgacgacagaataaatcagcttgcatcaaaatatgataacgtgtatcctgtaaacttcaactgcaagggacaggtatcggttgcaggattaaaagatcagcttgcacagttcggacaggacgtaaaagaaaacggaggacttgtccgcattcttgaagttgcgggaggatttcattcaccgtttatgcagagcgcggccacagagctaaaggacatattcgaacaggcttccgtggcagaagcgcagatacctgtatatgcaaactgcacaggcgagaaatatcagggcagctacactgatacaatgctcagacagatagtaagccctatactgtggcagaaatcaatagaaaatatgatagcagacggcgtagatacattcatagaggttggtccgggaagcagactgaccaaaatgataacaagaatatcaaaggatataactatgcttaatgttgaaaacgaggaaactcttgagcttgcagtaaaaacagcaggaggacagaaatgattttaaaagataagaaagccttaatcacaggaggcagtcagggaataggcaaggcagctgcacttaaactggcatcagagggtgccgacatcgcaatcatacatatgggaagcgaagaagatgcaaaggctgtatgtgaagaaataaaagcaatgggcagacaggcgattgcctacagagcggacgttgctgattttgcgggaagcaaggaaattgtttctgaaatagcaaaggaattcggcagagtggatattcttgtcaactgcgcaggcattacaagagacggccttattgctatgatgaaagaagaaaattttgatgccgtaataggtgtaaacctcaagggcacattcaatatgataaagcactgtatgccttatttcatcaaacagagaagcggcaagatagtaaacgtatcttcagtttcaggaattatgggaaatgccggacaggcaaactacagtgcatcaaaggcaggagttataggtcttaccaagtcaacagccaaggagcttgcatcaagaggtgtatgctgcaacgctattgcaccgggatttattgcgacagatatgactgcaaatcttgcagacaatccgctaatcgcacagatacctatgaagagaatgggaacagcagaggaagctgcaaaccttatattcttcctgtcatcaccgctttcagattacatcacaggcgaagtaatcaaaatcgacggcggaatagccatgtaggagtagagcaatgaatagaagagtagtagttacaggacttggaatagtaagccctctgggaagtgacgttgatactttctggagcaacctcaaggcaggtaagaacggcataggacagattaccaagttcgatacatcagaatatgcagtgcatataggtgcagaggtcaagggcttcgatgtgcttgactatatgtcaaagccggaatcaagaagaagtgaccttaacgtgcagtatgctgtaggcgcagcagttcaggctgttacagattcaggtattgagggcagctttgatcccgaaagagccggagtgtatttcggatcgggtataggtggcataggtacatttgaagatgtttttgaaaagctgcttaccaaaggtccgagatatgtatcaccgtatttcatacctatgatgatacctaatatggccgcaggaaccatagcaatcaggtacggctgcagaggacctgcgcttccgtctgtaagcgcgtgcgcatcgggcactaatgccataggagaagcattgagagcaatccgtcacggatacacagatgttatgattacaggcggtactgaggctacaatcacaagatccagccttgcaggctttatcaatatgcaggctctgaatgtgactgatgatataaatcacgcatcgctgccgtttgatgcgagaagagcaggttttgtaatgggagagggcgcaggcgcgcttgtactagaaagctatgagcacgccaaggcaagaggcgccagaatatatgcagagctttgcggatacggctcaacctgtgacgcatatcatatgacggctccggatccggaagctgtaggcggtactgcggcaatcagagacgcatatgccgaaagcggcgagtgcgctcccgaaaaaatatacatcaatgcgcacggcacaggaactcctctgaatgacaaagcagagactaaagccatcaaaaaagtattcggtgatgatgccgcaaagataaagataagctcaaccaagtcaatgacaggccatatgcttggcgcggcaggcgcggcagaggctgtagtctgcgtaaaagcgcttcaggagggaataatcccgccgactatcggacttgaagaaccggatcctgaatgtgatcttaactatacaccattaaaggcgcaggaggcagacattgagcttgctctgtcaacctcactgggatttggcggacataacgcatgcatagcctttaagaagggagaataatcgatgaacaaagaagaattaatgcagatacttcctcacagagataatatgcttcttgtagaagagggatatgttgaagacgagaaatcacacggtaaatatcacgtaagaggcgatgaatggtttcttcagggacatttcccgggaaaacctgtagttcccggcgttatactctgtgaaatgctggcgcagtcatgctgcgtgctgctttcagatgcaatggaagagggaatgactccgttcttcacaggacttaaagaagtaagatttaagacacctgtacttccgggagatacatttgaatcagaatgtgaaatcacaaataaaaaacctcctttctatttcgcaaagggcaagggctttgtaaacggcaagcttgcagttaaggcagagttctcatttgcacttatcaaagaggaaaaatagcgatgaaagacagacttgtaataacaggtatgggagcggtaacgcctatagggattggcgtatcggaatactggaacaacctgatagacggtaaaagcggtataggtgaaatcgagggaataaacacagagcatatggcagtaaaaattgcggctcaggcaagagagtttaatccgtcggattttatgccgcgcaaaaaagcaggagagatggaccgatttatgcagatggcatttgctgcagcagatgaagccattaaatccagcggaatcgaaatcgacccgttcagaacaggcataaccgtaggaactgctcttgatggcttctgcaccataacatcaacgcagaagaaatatgaaacctcatcaatcaaaaaggtgacgccgagatttcttgcaaaggctcttggtaacatatgcggctgtcatatagctatggccaatgatatcaagggaccgtcaatgactgtcaatactgcctgcgcgtcaggcggagatgctatagcccttgcggcaatgatgcttataacggggcaggccgatgcaataatagctgtaggcggtgaatgcgcggtagacgaggtgctggcacagagtcttatctcggcgcaggcgctttcgacaacaggcagcagaccctttgacaaatccagagacggctttgtaataggcgagggcggcggagctgttgtaatagaaacagaagctcacgcgcttgcaagaggcgctgatatacttgcagttcttgcaggctggggcaacaacaatgacgcataccatgaggtatcgccaagacctgacggcgagggcgagatgagatgtatgaggcaggctatcgaaacagcaggcattacagcttccgatatcggatatatcaacgcccacggcacggcaacaatcaaaggcgatgaagcagaggtgctgtcggtaaaagaaatgttcggcagggatgtaatcgtaggctcaaccaagggcgctacaggacatatgatgggagcaggcggcattacagaggttataacctgtgttaaagccattgaaacaggaattatacctccgactcttaacctcaaagaccctatgtcagaggacatatgctttgcatgtgaaactccggttaaagcggatatcgaatatgcaatgtcaaacgctttcggctttggcggacagaattccagcataatagtcggaaaatacaaatagaatatatgacgaatactgaccttcgaaagataatatatttaaatatattattttcggaggttttttatatggcaggaagaggaacttttgtagcgcagatttctgctgcaaatatgactataccaatagaaggcgcctctgtaaccattacagaggcaaacatgcaggttccgcagctcatatcctttcaggaaaccgatatgaacggaagaaccgctcccataggctttgacacgcccgatatatcattatccgaaacaccgggaaacccaaagccctttgcagttataaacgtacaggtggatatgcccctttaccataccgtacttattaaaaatgttcaggtgtttcctgacagagaaagtctgcagcaggttgagatgatacctgtggcagagcacgcaggatttgaagaacagtaccgcgtcataacctatgatgtgacgccgcaggatttataggggaggtgagattttggcagtaagaacaccctacatacccgaaaaaataactgtgcatctcggagctcccgcgtcaaatgcggagaatgtgacagtgccttttgcagactacatcaaaaacgttgcatcatctgaaatatatccctcgtggaacgaatcggccgtcagagccaatatatatgcgcagatttcatatgcgttaaaccgcgtgtatcttgaatattacaggagcagaggctataactttgatataaccaattcgacggcaatagaccagagctttgtaaacggcagaaacatatttgataatatagacaggatagtgagtgagattttcaatatatatatcagacgggaggaaaaccttgagcctctggctgcaaaatactgcaacggcaccaccacaacctgcgagggtctttcccagtggggaagtcaggggctggcagagcagggctacggtccttttgatatcctgcagtactattacggcagtgatattgtacttgatgacagcgcgcccatacagaatgcaaacgagtcatatccgggaagcccgctgaggcttggcggtgcaggcggcagcgtcaaaaccatacagacagagcttaacagaatatctcagaactatcctctcataggcaaaataaatccggtaaacggtgtgtttgatgaaaccaccgaatcggcggtaaagacgttccaggggattttcaatttacaggtagacggaattgtaggcaaggcgacatggtataagctggttaatatatatgtgggagtagcgaggctctcagagcttaatgcagagggaatacgatttttcctctattctctggagtatccggagcagacgggagtaagcgctttcgcagaagacggcgcgctgcctgaaacaggaaacatagacgaaggcagcaaagggcaggacgtggaaattgtgcagtatttcctgtctgtgataggcactttctatgacaccgtacccgtaatagctgtaacaggacattacggtagtgaaaccgtaaatgctgtaaaggaatttcagaaaacattcaggctgcccgaaacgggagaggtggacgcagaaacctggaatatgatgtataacgcattcagaggcatagcagatgccgtatttataaagaacgagatatttgcaatagatgtaatgccttttggaggcacagtgcttgagctgggttctgcgggcgatgaggttacggagcttcaggaatacctgactgcaatatcaatgcagtatctgcaaattacacctcttaatatcacaggatatttcggaggtcagacagagaatgcagttaaggaataccagcggctgtttgagctggaggtgacgggtaaggtggcgcaggcggactggaactcaataataaatacatacaaaaatgttgtatctgcgggaacctcaagaccggtccagttcccgggcaaaacacttagctttggagatacagatgcggaggtgagaagctgatgatgcctgacagcttatttgtggggcagcctataaggaatgcccagtgctatctcagaagaatagcctatgaatacaaggaaataccgctggtggtgcctgacggcatattcggtcagcagaccagaagaagcgttgcggcgtttcagaagaaatattcaatgccacagacaggaacgatagatagtgatacgtgggataaaatacttgcagtatataccgagattgttgagcgtaatatgctgcccaatcaggtaagagtgttttttcacccgcatatgaaaatactgcccggtgaaagcaatgattacctttatccgatgcagtctgtgatgctgcttctgtcaaagtggtttggcaatctgggaacacttgagattacaggtgagaatgacagtcagacaaccgcaatggttaaaaaactgcagcagattttcagaatggaagaggacggaataatcgacaagaggttctggaataagcttgcggggctgtatgaaatacatataggaataagcaggtaaatacagaaaagaggtgctgtctaagtatctcttttttggtgcgagtgatatatataatgtatcgaaagacagagaaaaacttttgccggtttaaaatcttgttttttgtcaagaggggcgctgttatatattaaagcaactgaataaaggtattattaaaacaatctgccggacaaggtggattgtcttttttatgcagtgacattattgttttttggataataaattgataaaataacaatgtatgtttaaacccgttatttaaaaattttaattttaaaatgtgtaaaaaaaaatccggcagaattatagccatattaaacagatgtatatatgtaatatttgtaattgcagagattattgcagtgctttgcgctgctttgggaataatatcactggcatataaattgattatgtcccggagtctgctttttttgtatggattaaagggcgatatatttgtgatagctgttatagttatgattgtatcggcggccttgtcaaatctaattgataagaaatatgacatatgaaataaattattgatgaaatttatgggagcagcgaaaggagattagtttgaaaaggggattatcactgtttatatcagttattatggttttgactttagtaccctcatatgtttttgcggaaggagactatggggattttgaccagagagaagaattcatttcaccgggagagagtacagagggaccgccgagggagccggaggagaagctgtgcagagtaacactttcaggaagtgaaagcatatcagtaacactgaatactgaatatgacggttctggcaaggagcttatacctgatgaaacaggagaatatgcactcgcaaagggaatttacagctactgtatcgaaagtgagggatattacaagctgagaaaaatattcatcataaccgatgaggatatagctgcaggcagcaaggtgattgcgattaagcccaagagaattacaggtcagggttatgagccttatctgagcatatattcgtggaatgatgaaatcgaaaacagtctgttttccttatccggactgaaaggctattcacaggtttatacacctgccttttattcgggaaagagaggccagcaggttacaacagcctctgagagaaattcctatgtaagcaggatggctgcatcatcttcatatatgtatgtatattatcttgatgaaacacacaaaattcccgtagtattttttacgacttcaaatctctcgggaatttcagatatacgggaagctgcaaggaaaatggctttaaacggtaagacgacggttttttatcaggcacagatgcatggcaacgaacctgcagcgggagagggcgctctggctgtcatatcctctcttacgggaagctacggacataaactggcatcagagcttaacatgtatataattccatgtatgaacccggatgcgtcagaacagttcagaagaagcgcagcaggcggcagaaatttaaacagagacagtctgtatctggaaagcagcgagattatagatgtgcataacctgtataatattattatgcctgaggtcgtaatagacggacatgagtgttccagaggaatgaacatttccaatgagggtgtcatagaatttcttgacgacataaaaatatccgcagcctgcaatcttaatacagacagccgtataaacagcgaggcgcaggacatgactgattatgccattgagcagtgtagcagagcggggcttagggcatacgactacggcgcaagcgtcaacaatactatttccagagtctattacgggctgtacggaagctgttctgtgcttgtggagagtacaggaatagccataggcaaagaccactttgagcgcagagttttttcgcagcatacggcggtgaaagctctgcttgacagagtatatgaaaatgcagacagtataaaggatatggtttcctctgcaagaagcagcatcatagccaaaggagcgaagtttgacagcagcaacagatttgtcttaaagcacggtatgtcatacaaaaacggatacaccctgccaagaccgagttttaatatagacggaactatagcggacgctgcaaaaaccgatacctattataaatatgatactgcgcttaaaagccgcgcgcttccgacggcatatataattccaaagacagcctcgaaagcagcaggcgctgtcagaaagcttgagcaaaacggcatttcatattttgagatagcacccggttcaaggcttaccgcaaggcagttttccggtactgcctccaaaacagtgctcaaagatgccgctgccgtaacattctcgaagggagcctatgtaatacctatgaatcaggcgggagccaaggtgatagccgcctgtcttgagcctgatgtcaaagatacagcgggatacaaaggctcatttgtacagtcgggacttattaaaatcagcaatatatacaggtttaccgggagcaatccatctgtaaatatggacaggtatataacaaaaggcaaacaggtaataactgccgaaatcgaaaacagcagcagctttaagctaagcgataaggaatttgatatcaatgcttcctgtcggtacggagaattatcctatgagtcggacaatgagagtgttgtttccatagactgcaatggacatgcagtgattaacggagctggcagggcaaagataaaggttactgcgcctgcgatatataactatgcaaagacagtaaaaacctttaacattaccgtcagacctgatactgttaagatttcatctattacagacacagcaaagactgctgccgtttcatggaaacgggatgcagaagctgcgggatatcagataagatattccataaaatcaaatatgaaaaacagcggggtttgcagtgttagaaagagtcttacaaagaaaaagctgagaggattaaaatccaatacgaaatactatgttcagatgaggtcctatgtgaaaacagatgacggcagtaaaatctacagctcgtggtcagacaaaaagaatattaaaaccaaaaaagtcaaaacagcaaagaaaaaatcataataatcaggcttcccaaaatgtaaatccgggaagcctttaaaatgctattttttgagagtaagcttcataagctcaggtctgaaaagtctttcgtccatagttttaagttcgggcgatattacaggtctgaactccattttcgcaaaaatatccttttcgatatctatgccgggagctgtttcaatcagcgtcagcccctgctctgtgagggtaaacactgcgcgctctgtaatatagaagactttctgtgtgcctttttcaagagaatatctgcccgaaaaggtgatatggtcaacatcttttttgaacttgatatgaggtccgtcctgaactatattgagcctgccgttttcaacccgtatatcttttttgccagcagtaaatgtgcctaggaagcatacggtttttgcgccctgggtgatatttataaagccgccggggcctgtaaccttgccggcaaatcttgaaacattgacattaccgtgcatatctatttcggctgcaccaacgcaggcaaaatctataccgccgccgtcatacaaatcaaaaatatcaggctgctttagtattgcagtcgggttatatgcggcccctgttgcaattccgggagcgggaacacctccgatgactccggactcgatgcttgaggaaacctgctgtatcagaccctcttcattgagcacgcctgatacgtccattgaaatacctatgcctaaattgataaagtcattttcgtgaagctcaaatatgcttctcctgcatatgatcttgtcagcgcaaaggggcattgccttgatgctttcaaaaggaattctctcgtggccgctccatgacggaaccggtttgcagtcgcctatgaaatgctgacctgtattttcgggtctgcccacgattacataatccacaagcgaagcgggaagctttatcttctgtgggtgcagagagccagcctccaccatttcatcaacctgtaccataactgtgccgcccgagtttttggccgccgcggccatttcgtattgctctatatgaagcgcctcgttttccagtgatatgtttccgtcagcatcggcaatgctgcccttgacaatagccacatcaagaggaaaagcagggtagaacagataatcctctcccgcaagtttgacaaggcttacaacctcatctccgctgtcatatgcagccttgtttattctgcctccgtctactctggggtctacaaatgtatgcattcccaccttggttattacacccggcttgccggaggtaatggctctcatcatatttgccagaactccctgcggtatcataaaggtgggaaaggcattattcattatcagaggatataccttgttggcaaggctcagattgctgcatagaagccttttcatcaggccctcgtgtgcaagatggttcatacctctgtctttgccgtcaccgcctacacctgcaacatttacgactgaaatattgcgggggtgtttttcgctgatatatctgttttcgatttcagtaagtatatcatctgcaaggcaaaagcttataaatccgtttatgcctactgttgaattgtcctttatcatcgccgccgcctcagcggcagtaataaattttgctgtcatttttttatccttatctgttgctgaatttaatatttttttctttgtttataaaggcgagcataccggttttgcggtcctctgtttcaaatgtctttgcgaacagtctgcgctctgcaaggcagccctccgcagttatggtgttttctgaataagcgattgcctctttggcaagacgtaccgcaggctgcgcatttttacagattgcctcggaaagcgagagggcagaggctttcagctcaccgcagggaaccactctgtttacaagccccatatcaaaagcctcgtcagatctgatatgtctgcctgtgaatatgagttcctttgctctgctgcttcctatgattttcggaagcctctgggttccgcctgcgccgcatatagtgccaagacctgtttcggtaaggcccattactgctgtatctgccgcaatgcgtatatcgcaggcaagagcaagctcaagtccgcctccaaaggcgtatccgtttattgcggctattgtcggtataggcagattttcgattttgagattgagatagctgccaagagcagaccattcataaatctctttactgtctttatcaatcatttccctgacatcggctcctgccgaaaaggccttgcctgttccggtaaaaataagaacatatatatcagggtcagataaagtatcatcaattatctgagtaatgtcccctataaatccggcattgagacagttcatatcatgctctttgttaaaggtgataatacctgtattattattcttttcaaaaattatatccttcatagttttaaatccttatcctaacagtatacaaagcggcagcgcaatcagcattgtgcaggacagcggtatcacaaggcaggaaacaaaattatatttgtatgactgcttgtgtgttgcgtgacatacagcaaacactgaaactattgagccgttccaaggcaccgaatcgagtcctccgcagccgtctgcgcacagtctgtgtataaagcccagattgtatccctgcgccgcgtactgattaaatgtgtctccgagggtttcatatacaagagatatgccgcccgaagcggagcctaatatacccgagaatatatttgctcctaatgccgccacaacatacggattagcgtccgagctcataagcatatccgttgcaaagctgtagaatgaggcgcccttgattacagaacctacgcctacgatggcagccgtattcattattattgttattgatgaaaccgccgcatcgttaaacatcctgagcatttcttccttaggcaggtatttccagaaaagcgccagcgccagcagtatgccaagcagcagacatatgattatatcaagctttgtgaggttgaatatgagaagcacaaatgcaatgggtatcagagatataataccgcttggggtatcgtccttttcatctacgcgtttgacgccctcaggccactggaaatgttcgccgcggagttttgcttttttgccctgtctgttcatatatactataattccgataaacattgcggcagctcccgcaagaccggggacaagtcccgcataggcaggtgtgcccagatactccatggaaacgacattcggtatctgaggtgtgaatggacctgtcattgcaaaggtccacatacctgcgcagactattgcaggcagcagataggtaggcaggtcagcctcctcaaacagcttcagtgcaatagggtataccgcaaatatgattacaaagctgttgataccgccatagcttaatattgctgcggaaagcatacatgccagcatacagtacttcggtcccagtttctttgatattatcattcctattttggcagcggcgccggaattctgatagatatttccaaagatattgccgagaagaaatataaaaacatatgatgtgaaaaatcctgcaactcctgaaagataggtttctgtaagtccgctgaatacagggattttacttgtaagacagactaaaaccgctgcaagcggtccgattataacgggtgttactcttttgaatatcagtactgccattccggcaagcgcacagcatatgccgatggctgatacaagggttgatgaatccatattgtcctccttaaattggatacttttatgataccacaaaatatgtaaaacagtatataacagtagcgtattcagcaaaattgttaacagaatacggcagtttaggtcaaataaatcagttgttattgttgactgtacggttacagtatactttaaaatatagataaggatattgatacatttaccttaatgatcgtacagtttgcggcgggacatatgctctgccgcagtatgttttatattctataatctgttttattcttaatttcattacagaatgtgattcgtatatcttttgaaaatccgaatttctaaagagaaactggaaatctgtttttgtgtaaattctgcacagttttttgtcgtgcagcaaaatacgggaagccttaacggaggtgtttatgaggcttaaattaaaaacaaaaatattttacggtatagggggactcggtgactcttctctgtacaatctgtttacaaatttcatgctgttttatctgactacaatagtgggaataaagcctgttgcaggcggcttcattgtggcgttcggaaccatatgggaagctctgtgcggaccgtttatagggcatttttcggataattatgattcaaaatacggtaaccgcaagccgtttatgctggctgcggcaatacctatcggcatatgcacatcactgctgtttacaaacataaatgcggcatacagtgtcaagctggtatattatacgataatggtaatggtgttctggacactgttcagcacgttcttcataccttatctttcatggggagcggagcttaccagggattatgacgagagaactgcgctgagatcctattcctatgtgtttgatactgtcggaatggtggtttcaatggtagtgccgacactgtgcgtggactattttatgaatatgggcaaaagcgcctcaacgtcatggcagtatatgggcatactcgtaagcattatagggtcgctgggtattctgctgagcgcatacaacataaaggaaacggacaatcccgactatacgaagcctgtcaaaagaaaaagtatgtcacttgactttgcaagagaaatcttcattgaatacaaagaccttataaatcttaaatctctgcagtatattattgcggcaagtatgatttatctgattgcaaacgccattgctgcgggggacagaatgtattactttacatataatatgggctacagcggctggaaaatcacattcctgctactgctgttcacctgtacgggatttgtattcacccctataatcaacaagctttctgcccactgggacaaaagaatagtatacataggctgcatgctgctttcggcggtgctgactatagcgtttaaatttatcggcataaacggaatgagttcaatgtgcatattcctggtgcagttttcaataggaacgacagtgtactggcagcttatacccgcaatgctctatgatgtgtgcgaggttgatatgctttcctgcggcagggacagaacaggaagcgttgtatcgcttcaggccatatcggaagctgtggcggaggctgtgggagcgcagagccttggcataattcttcagattgcaggctttaacggagaagctgcaatgcagagcgcaacggcgcttgcatgggttgagaattcctttgccgtaatacctgcgctgcttatgacaggctctgcatatatgatatacaaataccctgtttcaaagagagtatacaatgatgtggtaaaagccattgaaagcagggaagcgggaataatgcccgatatgaagcagttcgaaaatcttatgtaaatttacggccggagactgtaggaatacggtttccggcgtgaagttttttgacttaattgtataaggctgttgaaaaggcagtaagcaatagtatataatattttaagttacagattaattaaaacgagggagaaatcatatgaaatatattgaagcaaagatattcacaaacagcagaggcgtcgaggaggttacagcggagcttctcaagatgggaattgagggagccacagtagaagaccccgatgaaatcaaaaacattatggacaaaaaagaaggctatgaatgggactatgttgacgagaaagcttttcctgtaaacacagaacacaaagttatagtttactttgacgataatgaggagggcagagcggcgcttcagcagctcaaactcaagatgatgatgctcaagagcaaggaaatggaaggtcttttcggctgggatgtcaagcttggcagactgtatgttgaggacaatatcgttgacgatgaggactgggtagataaatgaaaggaatacttcaagcctgctaaaatcacagacagaatagtgattaagcctacgtgggaggactacgaggcaggtgagaaggagcttgtaatagagatagatcccggcatggcgttcggcacaggtacccacgaaacgacctcgggctgcatacagcttatggaaaaatatatgaagccgggagacaaggttcttgatgttggctgcggctccggaatactttcaatagcggcagcgcttcttggaagcagggacatacttgcaatagatatagaccctgttgcagtcgaggtaaccagagaaaacgtagagcttaataacgtatcggagtatgtggatacaagatacggcgatctcaccaaaggcgtatcctacagagccgatattgttgtcgcaaatcttatggcggaccttgtaatgatgctaacagaggatgtggcaaagcatcttgaggacggaggaatatatatatcctcagggataatagatttcaaggaagaggaagtctgtgaaaccctgaaacgctgcggatttgagattatagaaattctgaaaaaaggagaatggtgcactgttgcagccagacttaagcagtaatgagcagattttttacagagcccgaaaacatttcggataaatatatatatattactgatgccgatgatattcaccatatcaaaaaggtgctgagattaaagccgggagataccgttgagatttcagacgggcagaaatgggaatatgagggcgatatagaggaaataacggctacagaggtaacccttagaattactgacaagcagagctttgcaagagagccagagacaagggttactctgtttcagggcatacctaaggcgggcaaaatggacctgattgttcagaaatgcgtagagcttgggatagacagcatcgtgcctgtatttatggaaagaaccgtcgttaatgacaacggcaagatcggcaaaaaaacagagagatggcaaaagatatccgatgaggcatgcaagcagtgcaggagaggaattgttcccgctattgcagacgccgttaatcacagcgaaatgatggatatgcttgaggcttttgatttggtgctgtttccatacgaaaacgaaacaggaaggactatcaaggacgcccttagaaatctcaaagataagcctgaaactgttgccatagtaatagggcctgagggcggattttcagacagcgaggcagaggacctcaggaaatatgaatgtgtcagtcttggcaaaaccatactcagaacagaaactgcgggaattgcagcgctggcaatgacaatgtatgagcttgagctttagatatgcgaggataaccggatatgaacgtcagattaaaaagagtaattgcggcagtaattataatagcgataggggtagtttcggcgacagtgcttgcggagcatttttcatctccgcagacatatgccaagactatagaaacccttgatgaaaaaagaaacagtgttctggcaatgacggcatctgccgctgcaatatccacaggacttacgataataccgggagatgttgcaactccgctggccgacaaactggcggatttgagttcaacctttatgattgtactgtgcgcaatatttctggaaaaatatatgcttgcctttgcaggtattgcagctttcagagtgctgattccgctggcgtgtctgctgattgccgtatttttgtatacgcgaagcgagcggtgtcttaggattgccagaaaatcagtcgttttagggctgtgcatagtaattctggttcctgcaagcacatgggtaacaggatttatcgaggaaacatattcggtatcaatagaggagaatatacaggaaacagacaaaacggcagagattttaaacagcaatgcgggcaaggatgaaagcgctgtttcaaaatggctgagcagcctcaagggaggcgtttcggagatagtcagaaaagccgaaaatgctctcggaaatttcattgaggcggcggcgcttctgcttataacatcgtgtgtaattccggtgcttacgctggtgctgtttatatggataataaatgctgtacttggacttgatttgaagctgccgggaaagaagcttggagcaatttcgactgccggttcaaaattaagaggcagagcgaataaatctgataaacaagaaagtaaatatctggaggattaatagtatgagcaatgcggtatataaattaaaaggtaattttacaaagaagatagatgaggcgtctgagcttctgaaaaacagcgttaatgcggagcttatttcagaggtggtcagaaccgcgggaagtgcagaaattatactccttaatttcgagagattctatttcagaaacggaagctatgcgggacttacggttatgctgaccgaatcagaggagtcgcagactgccgatattgcaggctttggaggcggcgagggacttcttaacataagctggggagcaaattttgaatttgccgaaaaagccgctgaaattcttgaacgctgcgggtttgacagagaataaagccgttaaatgtacagcgaagaaaccttagcatttaatgttaaggcggttttaacaccataattattaaggaagaatttctatcagcagataaatataaatgaaatattaatccctgaaaaccaaggtttaaccggagctttcagggattgtttttattcatatctgtttccgtcactgtcatagtagcagacattcatagaatatgcgtctgacggataatgataacagataatatccatattcttcgtattaaatttcagcttcacgggctttttaccgtcttccgtataggtgacctgtgcatattctgtaggtgtgccgttaaaccaaatcagattatattgctttcctttgattacggtatttgagataataatttcactggcggagccggcggttgggtttacaaagctgtatcccttgtctgattcaggctcaaaaacagcaagcagggccatattatcgctgttgcatgccgcacttataatatagttgtcgatttcggtttcctttactatggaccagtcgctgcctttttgaacagaggaatttagtatttcctctctgcttgcggcagtatctccggcaggggattggcatatatgatatatgtaaatacctgcgatacacagaattgctgttgctaatattattatcagtttctttttcatttgcgggacacttaagctgattattattaatcctatcatttcacaggtgcagtatttttactatatgtagtttgtgctgaagacggctgttttcgataaaccgcctgatttataggtttgtaattatttgaaaacacaagatatggtatgagcaaattctgtataaaaataagcatacttgtactttgcaattaatgtaaaaagtgcatagaataattatgacttttgcatatttcccaaaagttgtccacagatgataaagccattgttttcaacactgccacacttttcccacagaatttcaaaaattgtatacgattttatccaagtctgcctgtggatagtgagaatgtgcataaatgttgaaattcaaacattatgccgtcataaaatttttgtcaatataaagttatccacagattttcagagttgttttattcattgcatatgatatccactattctctgtataattttattccacagaatacaagtacgcctcccagaagcagtatccagaatttcataggcaggaaaaaagcacagattgttactgtaccgaggataaccataactataccaagctgataataattattgcagcagcatttattcatttttttcgtttttcttttttgcttacccataaatatacctctgtggtataatatgaacaataacactgatttgtgaaaggatagatatgttcaggaatatagatacagaatacggcagtataggaataaacaaaagcatcataacccagatggttacggacgctgttgacgcttattccggcaaggtgcggctgggcaatgccaaagctgtatttaacattttttcaaatgatgaaagcagcaatatagatatagtctgggacgatgagggaatttacataaacatttttctcataatcaaattcggtacaagcataagcagagtcaccaacggcataatagactatatagagaaaaacattaaagtcacttttggcgacatacctcacaaaatcagaattcttgttacgggtatagagtcaaagcaacaggtaatcaaaagagatatagaggttgttagataatgacaggaaacgacagtattactgtaatcaaaggcataggtcccaaaaaagaagaagccttaagccgtatgggaataaatacggtagaggatatgtatatgctttttccaagagattatcaggacagaagaaatgttatcagaatttctgatgctgataatgaacaggttgttcttgttaaagcaactgtaacaagggtgtttaacaacagatacggacgaaagcatatgcttcgcattacggcagatgacggaagcgctgtaatggaggtgcttttttttaatgccgcatttcttgcaaaatccataaaaccgggaacggaatatgaattttacggcaggatatatgctgataagggcaagtttaagatgctccacccggagatgacaaagacaggggataatatactgcgcggaattataccagtatatccgcttaccaaaggcatatcacagaatgaaatgcgcaaatggcagcagtatatagatggtgagacagagagtgtagctgattatctgccggaagccgtaaaatcacagaacaatttatgcagtcttgaatatgcgatacataatatacattttcccgaaagcaggcagaagcttcttgaagcgaagtaccgtcttgtgtttgatgagttctttgtaatgcagacggcgcttatggctctgcggggcagaggcattacagctgcgggaggtattgcgttttcaaaggctgccgatatagatgaatatataggcaaaatgccgtataagcttacatctgcgcagcagagagttatatcagaaattatctcggatatggaatcggacagagttatgaacaggctcctgcagggagatgtaggctcaggcaagacagcggttgcggaggcggcgctgtttaaggcggtaaaatcaggctatcagggcgttttaatggctccgacggagatacttgcccggcagcactataccgggcttcaaaagagctttgagccttttggaattaccgttgactttcttggcggcaggcttaaggcttcagagagaaaaaaggttttaagcagacttgaagaaggcaagacggatatacttatagggactcatgcggtgatacagcccgatgttctgtttaataatctgggccttgttataactgatgagcagcacaggttcggtgtgaaccagagaagtctgctgacccgcaagggcgagaagccggacagactggtaatgaccgcaactcccataccgagaacgctggctgcggttatctacggcgat

SEQ ID NO: 4089 - DNA, 32759 bp, Unknown
  16S sequences of unknown bacteria
acaaaggcaccatggtcgtcggcatcaccgactttgccccgatggactaccgggatgacaacggcgagtggaccggcttcgacgcggagcttgcccgcctggtcgcctcccagctgggtctggaatgcgaattcatcgagatcgactgggacaacaagatcctcgagctggagtccaagtccatcgactgcgtttggaatggcatgacgctgacggacgaggtcctgaacgcgatggagtgcaccgccccctatctggtcaatgcgcaggtcgtcgtcatgaagtcggataaggtcgcggattacgccgacgtggacgccatgaaggatctggctgtcgctgtcgagtccggctccgccggtgatgagaccgcgacgaacaacggctttaccaatgtcacgaaggtcactgcccaggctgacgcgctgatggaggttgcctccggcacggcagacgcttgcatcatcgacctgaccatggctaaggccatgaccggtgatggcaccagctacgctgacctttccatcgcggcagagatggaccgcgaggagtacggcatcggcttccgcaagggctccgatatggcccagaaggtcaatgacatcattgcttccctgaaggatgatggcaccctgcaggcgctggcggacaaatacggtctgtccctgatcgactgagtctggaaagcacggcatccatcaaaagaataacccggtccggcgctgccgggccgggaaaagcgccgggacagcccggcagcaggcagcgtgccggggtttctgcggcacgctgtgcgtgtgttttatgccgccgcgcaggcggggagagaaatagagaggtatgaagctatggtttggtctgtaactgcgtcgctgctggaaggcttcggtatgacgttgaaaattttcggcttgacgctggcgtttgccatccccctggggctgctgatcgccttcggctcgatgagccgctttaagccgctgaaatggctggtcgatggcatcgtctggatcatccgcgggacaccgctgatgctgcagctgatcgccatttattacgggcccggcctggtactgggcagccagtggtggggcaccggcaaccagggccgctttgtcgcggtgttggtggcatttgtgctgaattacgcctgctatttctccgtcatctatcggggcggcatcgaggcgatccccaaggggcagtacgaagcggcccaggtccttggcatgacaaaatcccagaccttcttccgcgtgatcctgctgcaggttgtcaagcgtatcgtcccgccgatgtccaacgagatcatcaccctggtgaaggatacgtccctctcccgggtcatcgcgtgctatgagatcatctggaatgcccaggtctatatcaagtccaacggtctgatctggccgctgttctacaccggcgtgttctatctgctgttcaacggcattctgacggtcttcttcggctggctggaacgcaagatgtcgtatttccgtgtctgaggagggacgttatggcggtattggaagtaaaaaatatccacaagagctttgacggggcgactgaggtcctgcagggcatcgacttctccctggagcagggcgaggccattgccatcatcggctcctccggcagcggcaagacgacgctgctgcgctgcatcaattttttggagacgcctgatcagggccaggtgatcgtcaacggcaaggtcatttttgacgcggcggacccgtccacgcaaaaagagagcgagatccggaaaaagcgtctctccttcgggctggtgttccagaattttaatctcttcccccagtatacggcaatccagaacgtcatgctggccagccagctgctggcaaaggagcgggaggattataagcagaataagaaggcgatcttagacgagatccggcgcgatgcggtgcagcttctcgaaaaagtcggcctggcggagaagcgggacctctatcctcatcagctctccggcgggcagcagcagcgggtggccatcgcccgagcgctggcgatgcatccggatattctctgctttgatgagccgacctcggcgctggacccggagctgactggggaggtcctgcgggtcatccgcggcctggcagagcagaagacgacgatgctgattgttacccatgagatggcctttgcccgggatgtggcggaccgggtcatctttatggacggcggcgttgtcgtagagcagggcccgtcccgggatgtgatcgagcacccccagcaggaacgtacccgccaattcctggcccgctacgcagaaaatgagcattgaaaaaatcaaatggaaaatatacaaaagcggcgcgctgcagaaatgcaacgcgccgcttttgcggtcatacgggctgctggcccgtcataatacttagaatggtttggtcggtttgcagcatgccttctttggccagggtgccgatgttggcaatggtgctgtcgaccccggcggcgacgatgccttcgccctgctggaattcccggtgatgcagatacatccggtagcccataatcccggcgtccaccgcagcggcaatcttggctgcgcacgagggctttgcgccgtcgcagatcgtaccggagaggatcgccacggcgttgacgacggtatgcgccacagcagtgaagccgccgcccagcaggtagcagatgcctgcgcccgcgccgacgcctgcggaaatggcgccgcagtacgcagagaggcggccgatgcctgtcttttgatggatggtgataaggtcggagactgccagggcccggtagagctgctccttcgtcgcgccgatgcgctcggcgtagcggtagaccggcatggaggcggtgatgccctggttgccggagccggagaggatgacaacgggcatttcgcagccgctcatgcgggcatcggacccggcggcggcccaggctttggcttcctgcttgatatcgtcgccgtagtcctcccgtagaattttgccgatctgagcgccccagttgccccgcaggccctcttccgcgatggcggcattatactgcacctgccgctccaggaccggcgtaatgcgctcaatggggacagtatcggcaaagcggataatgtcctcgacatttaggcagcgcttgtccgtcaggtgctcgtcggcggcgtcgaccaccggctgctccagcaggacctcaccgtccttggccaggtaaacgatattcgtgtgattgtttgtgatgcggacgcaggcgctatggccgtcgtttgtcgtgccggtgatttggatatccagcaggcagggcgactggccgcaggcgacgtggatgggcacggactgcaaaaatgccgtgatggcgggctgctgcgcttctgtcacatcggcgatgacctgcagctccttctcggcgtccccggcgacgatgccgacggcgatggcgggctgaatccccttctggccgccggtattggggacgacgacacttttgacattcttcagaatattcccgctgaccgtggccgagacttcgtccggcagacggcccagcagggcgcgcatttttgcggcgcagtaggcaatggcgatgggctcggtgcagccggtggccagcacgagctcctcctgcaaaatggagatatagttttcgtaaattcgatcgtcgagcatagtgttcacctcataaggcagatgccaacgccggttgttcgtaaaagcgccggacggtagcatgaaattctcttattgtttattataagtgtttttttgcagcgctgcaagcgggtagtacaatcctgcatctccctgcgagatgctatgatatgcccggcgggcgggaaaggaagaggcggatgcggggaagcatatattattctgccaggccgcggcggggcttggcactgcttctggcgtgcgcgctgctgggcagcgtgggcggtattgccgggcaggcggtccgggacagtgcaggggcggcactgacgccggcccaggtctatgcccagcaggcgggggccgtggtcgggatcgtcaatgccccggcggggcagacgcatgggcgtgccagtgtgggcagtgggtttgtcgtctccggtgacgggtatatcatcacaaattatcatgttgttgccggggcgcaggcactacaggtctccctgcaggatgcggcctatccggcggcgctagtcgcctacgccgccgacagcgatgtcgctgtgctcaagatccgggcgacaggactgcagcgggtccgcttgggtgattcggacgcgctggctgtcggcgaccaggtcgcggccatcggcaatccgctgggggagctgacgtataccatgacggttggatatatctccgcccggaaccgggcggtgacgacagaaggtgcgcagattgcgatgctccagacggacgcggccatcaatgccggttcctccggtgggccgctgtttgatatgcaggggcgtgtcgttgggatcacgacggccaagtattccggccagaccagcagcggcgcggccattgaagggatcggctttgcagtgcccatcaatacggccaaggccctgctgcgccagctgcccgggtatatggcacaggtgtccggcctctaggtgggaaaacagggaagataaaaaagtgcccatgtccggggcgcggacatgggccagaggagaaagaggaggtatgtaattttgcttagtctccttcgatcatccggtagccgacgccgacctcggtgaagatataggcggggctggccggattttcttcaattttacggcggatgttggccatattgactcgtaggatctggttatccgcctttgcgccggggccccagagctcccggatgaggaaatcatacgtcaggaccttcccggcgtacatgccgaggagggagacgagcttgtattcattctgggtcaggtggacgtccttgccatccaggaagacccggtgtttatcgtaatcaatggccagcttcccggccttgaagacgccggtctgggccagacggtcgttttccagccgggtacgggtgtgacggatggcggtccggatgcgggccagcagctccgcagagccgaagggcttcgtgatatagtcatccgcgccggcgtccagggcctcgaccttgtcgcgctcgtgggtgcgggcggagacgaccatcaccggcagccgggaccagctgcggatcgtccgcaggatctccatgccgtccatatccggcaggccgagatccaggatgaccaggtccggacagtgggaggcgatcatggtcctggcctgctgaccagtacgggcgaccaggacgtcgtaatgattagccgtcagcatcgcggccataaaattgctgataccctgctcgtcctcgacgatgagaattttttccttgattgtcatatgcgcttacacctccaaaggcaaggcaaattggaatcgtgcaccgccctccgggcggttttccgccgtcaggcagccgccgtgggcgcggacgatggcaaggcaaacggagagcccgatgcccatattgcgccgcccgccctcctggccgcggtcgtcatgggtgaagtagccatcaaacagcttgggcattgcctcccgggagatcccggcgccgttgtcggtcacctggaacagggcggcgtcgccggagttggtgacgtcgatttgaatttccgtggtatgcttcccgtgcagggcggcgttttccagcagattcaaaagcacctgctgaatcaggatcgcgtccatcgggaccatcagcagggcctgcgggacatggactgtcgtctcaatgccgggaaagcgttttttgaatttctgcacggcggcgctgacgatctcctccgctgcttccatatccttatgcaagctggtgggttcgtcgccaatgcgggtgacgagcagcagattttccacaacgcccagaagccactgcgcttcgtcgcggacgtcctgcatgagctcatttttcgtctccggtggcagggcttggtcgttatccagtacagcgttcgttgcgccaatgatcgaggtcagcggggtgcgcagatcgtgggagacggcccgcagcagattgccgcgcattttctccttctccgcctcggcccggaccttttcctgctgcttgagctgcgtcgtcatcgcgccgacgatgatggcgacggtgatcatgacgaggaaggtcaggggatagccggagatcgtgaaattcagggagaaataggggtaggtgaacatgtaattgacgccgatgacgccgatcacagaggagaccaaaccgtagagatacccgttggtgtaccgggagacgaaaatgacggcggtctcgaaaatcagagcggcataaacgtcgccttcgctgaggaaccgcagcatgctgcagagcagcatggccaaggagagaatcccgatgcagatgagcgtatcccgccgggaggtaggaaagagcttgcgtgccgttttccaacgcatggaaaacaacccccttgcagttttgttattccggcgcagggccgcgcatcgcaccatattgcaatgctataactatcataccacagtcaagcgtaaaaatgttgttaagaaaagttattccggctgaaaaccggaccaaatcgacacagcgcccatggcaacagtgatgacgcagcaaagcacggtcaggatcgtcattccattttcctccttcacgccgggcagtccggctttttcgcaagtatagcaaaaaaaacggcgggaaggcaagggagcgcggggaaccttggcggcgtgttgacaggcagcctgacgttcttagcgcggtcttaacagaacgcagcccgcaaaaaaccggcagagccttcacaccagggcaaggtgcggcggctctgccggtttcatttaggatagggcctgcttcatagcgggcttgttgagattgatccgctcctggaacagaacttggccgtctgcagtgacggtcaggtgggcgacgcacaggtcgccggtcttggcgccgtccagcgacgtccattccgccgtgacatcctgtgccgtcagcgcggcgggagactggaatgtgaaggtctgcgctgcggcgatcttattgggggaggacgtcgtgaccgtgacggtctcgcctgcttgggtgagggtgatggtataatccccgttttgcagggtgcagatcgtcgtctccccgccttctgcgctgccgcaggcggcaaggccgcagcagagcgctgccagcaggagggaaaaaaccaggtgggtcaatcgtttatgcatcgtcgtcacgctcctttggaaaatgcacgtttctgcctccagtatagcagagcggacgcgagttgtcacgtgtaacggccgacgataatgctggaattttgcccgccaaagcccagggcgttggacatggcagcgttgatctcccgctgcagcggcgtggggccgacgatagacagcggctggctcgcctcgtcctgggcggtgaagtgcagcgtcggcggtaggacgcccgtccggatggcctggatacaggcgatgcactcggtgataccgcccgcgcccatcatatgccctgtggcgccctttgtggagctgacagggacggtgtagctgccgaagacctgggcgatggccttcgtctcggccaggtcgcccttgatggtcgcggtgccgtgggcattgacatagccgatgtccgtcggggcaagcccggcctgctgcagcgccaggcgcatacaggctgccgcacctgccccctccggatggggggagacgacgtggaatgcgtcggtattattgccccagcccagtaggcgggcgagaatctcagcgccacgggcttcggcgcgggccctggtctcaaggatcagcgcgccgccgccctccccggtgacaaagccgtcgcggcttgcgtcaaagggggcgctgcggccggaacgggagagggcgccagcccggcccaagctctggaaaaacagcgggttgacggtcgattcgccgcccatgcagacgatagcgtccgccgcgccggattgcagcagcagcgccgccgtcgtgatggcgtcgcccccggaggagcaggcagtgctgacggtcaggctcgggccggtgatcttgtggtcaatggcaaattgtgccgcggcgatattgcccatgattttcgtcatgaagcgtgggccgacgggcttatgcgccaggctggccgcctcctgggtctggccgatgcaggtcaggcccgccagagcagtgcccatgacgatgccacagcggtcatccgggaccagaccgctcatcgccagcgcttcgttggcggcgacgtaggcgaactgcataaagcggtccaggtccgtcgccaggcggcccggcagcagggcggcggcgtcaaaatccgcgacctgcgccgctgcgtggacctgcagggccgaggtatcaaacgaggtgaccggcccgatcccacagcggcctgccagcaggccattccaaaattctgccacaccgatgccgacaggcgtcacagcgcccatcccggtgatcacgatctctcgttccatttgcactgcgcccccttagacctgctggaaggccaggcaggcattgtgaccgccgaagcccagggaggaggagaggaccaggtccacctccgtccggcgggcggtcagcgggatatagtctaggtcacaggccgggtccggctgctccaggccgatggtcggcggcagcatcccggtctgcagggccaggacagaggcgacggcctctgccgcaccggccgcacccagcatatggccggtcatggacttggtcgagctgatgagcgccttgcgggcaagctcttcgcctagggcctttttgatggccagggtctcggccttgtcgttcaggggggtgccggtgccgtgggcgttgatgtagatgcggggggagtcattgtgagcctcggaccaggcgtcgtaaatagagcgggcgccgccctcggcctccggatccggggccgtcatatgataggcgtcgcaggtcatgccatacccggccagctccgccaggatgtttgccccccgggccttggcatggtcgtaggattccaggaccagcgccccggcaccctcgcccatgacaaagccgctgcggcggctgtcaaagggcaggctggcgagcttggggtcgtccttcgtcgagatggcctgcatattggtaaagcctgccaaggcgatctcgttgatggcggcttccgcgccgccggccagcatgacgtcggcatagccgtggcggatggcgcgcatggcctcaccgatggcgttattgcctgaggcgcaagcggtcaccagcggcatagccgggcccttgcagccaaagcggatggcgatcaggccggaagccatgttggcgatcatcattgggataaaatacggcgagacccgccgggggcccttgtcccgtagcttgttgtgctctgtcaagaaggtgccgatgccgccgatgccggtgcccatgtacacgcctatgcgctccggggcgaccgtgccctgcacgccgctctgagccatggcctggcaggccgccgccatggcgtattggctgtaaagatcggcatgggcggcctccattttgtccatatactgcagagggtcaaagtcccgcacctgggcggcgagcttgaccttgaaggctgcgggatcaaagcggtcgatgggaccgatgccgcatttgccctgcagcaggttgttccagaaggtatcgacatcgttgcccagcgggctgatgatgcccatgccggtgatgacaacgcgttgggtcataattttgtctccttttcctgttctgcgcggaaaaattgcgcccaggtgtcaaaaaagtcaggcgcagccttttttaggctgaccgggcggcgggtcgcgaggtccagaaagcagtgctcactggtgccggtcgcggcacagacgccgtcggatgcccggtaaatttcatagcggtatgcggcgcggacaccgttgaactgggtcagcgtcgtgacgatggacatccaatcgtcaaagaccagcgactgccggtagcggcagctcacgccggtgacgggcatcagaatgccccggctctccaggtccttatagaccagcccggcctggcgcatgtactccagccgcccctcttccatgtagcggatatagttggagtggtggacgatgcccattttgtccgtctcgtagtaaaggacgcggcggcgatgcggcaggatctcgttcatagcggttcctccagctctgtggtgccgaggcggcggaagcgcgcatagcgctgcgccagcagcacctgcgggtccaatgcctgcagcgtctgtagcttctggtgcaggccggtgcgcagcaggcggtaaaaggcttccttgcccagcgcggcctcggggatgatctgctcgatcacaccgaagtgcagggcgtcggccgccgtcagcttcaggcacgcggcggcgtcggcggagcgggcggcgtccttccagagaatgctggcacagccctccggcgagatgaccgagtagatggcgttttccagcatccagacctcatcggccaccgccagcgccaatgcgccgccggagccgccctcgccgatgagaacggagaggaccggcacctgcaggccaatcatcgccgtcagattctcggcgatggcctggccttggccttgggtttccgcttcgatatcgcagcgggcgccggaggtatcgacaaagcagaggaccggacggtggaatttctccgcctgctgcatcagccgcagggccttgcgatagcccgcggggctgggcgcgccgaaattgcgctctaggcgggatttggcgttgtgccccttttcgatggcgagaaccgtcaccggcatctcatccagataggccacgccgccgacgatggcggcgtcatcgccgctgcggcggtcgccgtgcagctcaaaaaagtcggtaaaaatgccgccaatataatccagccccgtggggcgttgattggcgcgggccgccttgacccgctcgtatgcaggatttgtcgccacggtcaaccctccctttcatgcagccgcagcagctgcgccagcgcctttctctggccggaccgggggacgatggcgtccacaaagccgtggtccagcagaaattccgcggtctggaagccaggcggcagttttttccgtgtcgtctgttcgatgaccctgggcccggcaaagccgatggtcgcgccgggctcggccaggtggatatcgccctccatggcgaagctggcagtcacgccacctgttgtcggatttgtcaggacgacgaggtaaaaaagccccgcgtcgctgtgccgccgaacagcggcgctggtcttggccatctgcatcagggacaagatgccctcctgcatccgcgccccgccggagacggtatagccgacgaccggcaggcggtgcgccatggcatattcaaagagccgggtgatcttctcgccgacgacggtccccatggagcccatcataaaataggggtccatcacaaacaggcagcagcgctgcgcgccgatcattgcctcgccgcagatgacggcttccagctcgccggatgccgtgcgggcggtttccagcttcttggggtagccgggaaactgcagcaggtccccggcgcaaagcccggcgtcgtgctcctggaagctgtcggggtcggccagcatgctgatgcgctggcgggcgttgagccggaagtgatggccgcagtgaatgcagcagttgaagttatcccacaaaaggctcaggggaatggcccggtggcaattggggcaggtctgagacggctcgttctcgtcctggttcaccggcgcgggacggccgcctttttccagttcattggcgggcttttgaaagaaattcaaaaatggaacggccacacaatgcacctcactttgcgataaaatccaggtcgtaatcacctgtcataaaggcactgctgctgagcagcgcgatctgttcttcaatattattgggcacgccctcgatcaccagctcgcacagggcggctttcatcttgcgcagcgcctcctcccgggtggcggcaaagacgatcagcttgccaagcagggggtcataatacggcgtgacggtgttgccggtgacaagatacgtgtcaaaccggacaaaggggccgccagagacatgcagaaactccaccgtacccggcgcccgggcgttgatacggcattcgatggcgcagccgcccaggtcgatgcgctcctgggggaagctcaagcgcacgccgttggagacgcggatctgccacttgaccaggtcgatgcccgtcagggcttccgtgacggtatgctccacctgcaggcggatgttcatctccataaaatagaaatgtccggcgccgtccagcaaaaattccagcgtcccgacaccgacatagcccaactgccgcacggcctcgcgcgcctggcgcagtaaggtctcccgctgggccggggtgatgcccggcgagggggattcctcaatgagcttctgatggttgcgctgcacggagcagtcgcgctcgccgaggcagacgacattgccgtattcatcggccaggacctgcacctcgatatgccgggcggggtgaatgtacttctccagatacaccgcgccgtcgccgaaggcactcaggctctctttttgcgcggataaaaacgccgcttccatctgggccgggctctcgacgagccggatgccccggccgccgccgcccatgcaggccttgagcatgacgggatacccgatcttctccgctgcagtccggacggaggcggcgtcgtgcagcgtcagtgcgccggggatgaccggcagaccggcctgctgcatcagcgccttgacggcggctttatcgctgagcatctgcatattttgggccgacggcccgataaacgcgatctgatatttctggcacagggccgaaaatgccgcgttttccgacaaaaacccgtagcccgggtggattgcttgggtgccggaggccagggcggcgctgagaatgcgcacctggtccagatagctttcgccgggctctgccgggccgatgcaatagctctcatctgccagggcgacatgtagcgcctcggcgtcggcctcggaataaacggccacggtggagatacccatctccttgcaggctcggatgatccgcacggcgatctcgccgcggtttgcaatcagaattttggaatacacggtctactcccctatcacagcgaaggaaaaatcggcctccacgcagcgcttgccgcccactgttcccacgcccttggcaaaatagaacggtggctttgcgcgggtgatccggcactcggtctcaaacgtatcgccggggcggaccggggcgcggaagcgcacgtggtcaagcccggtgtacatgggcgttacatcgcctgccatctgctctgccagcagcacgcagcaggactgggccaggatctcacagagcatcacgcccgggacgaccgggttgccggggaaatgcccctgcaggaaccactcgtcgccccgtaccgtatagcggccgcgggcgcagtcgtcctgccgctcggcgctgtccagcagcagcatcccgtcccggtggggcaggatctgcatcaattgctcccgatccatgcgtcaagccctcttgatccggaacagcacgtggccgtaatcgacgacctggccgttctcggtgcagacctctgtgatgacgccgtcgtactctgcgacgatctcgttcatcagcttcatggcctcaatcaggcagagcacatcgcccttgtggatgcagtcgcccacctggacgaagggcgcggcgttttccgccggagcccggtaaaagacgccgaccatcgggctgcagatatcctgagtggccgctgcgaccggggcggcgtcagacgacactgcggcggcagcagacggggcagcggcctggctggcccccgcgcctcgctccaggcgcaggcggcagccctgttcttcgatttccagcgcgctcaggcccaattcctgcatcacgtttgcatattttttgatctgtttttcttccattgcggtctcctcacgaaattctaaggggcgaacctcatacagaatttgataaaatcttcttttcgggaatttgactcacattgccatgccgccgtccacgcagaagacctgcccggtgatataggcggcgccgggcccggccaggaaggccgccaggctggcgatatccgcgggcgtgcccatgcgcttgagggggatgctggcaaccagtgggtttgtctcgtcaaagtcctttgtcatgtccgtctgaataaaaccgggggcgatggcgttgcaggtgatgcccttggcggccagttcccgggcaacggatttggtcaggccgatgacgcccgcctttgaggcggcatagttggcctgaccggcattgcccatcacaccggcgacagagctgatgttgatgatgctgccgccccggctgcgcagcagcagcgggcagcagtggcggatcatattgaaggtgcccttcagatttgtcgcgatgacgtcgtcaaaatcggcttccttcatcatggcaatcagaccgtcgcggttgatgcccgcattgttgaccaggatgctggcgccgccgaagtcctttttgattgccgcgatggtctgcttgacctgggcaaaatccgaaacgtcgcactggtagctccgggcgctgacgccatagcctgcgcaccgggcgcagacctcctcggcccgggttgtattgcccgcatacagcagagcaacggatgcgccctgggcagccagcgctgcggcaatggccgcgccgatgccccgggaggccccagtgacgatggcagtttttccactcagcattgcagttcctccaaagttttagccaagctctccgcgtcctcgacgtgcagcgttttggccgtgctgtcggtcttctgaatcaggccgcacagcgttttgccggggccgagctcaataaatgtgtcgatcccctgctcccgcatatggacgatgatctgcttccagcggaccggactgcagatctgccgggtcagaaggtcccggtagtccccggcatagggccgggcggtgtaatcagaatagagctgcacccgcggctcccgcagcgccgcgtcctgcagcacttgggagaagccgacggcagcggcggtcatatacggcgagtggaagccgccgctgaccttcagggggatcaggcggccgccggcctgcttgacatcatcggccagaagcttgagctcctcccgggtgcccgccacggcgacctggccggggcagttgtagttgacagggtaaatatgctcgtacccggcgcagagatattccaccgtggcgtcctccagcttgacgacggcgcccatgccgcagtcagactggctggccgcctggtgcatcagttcaccgcggcggcagacaaggtggaagccgtcctccagcgtgacggcgccggtataggtcagtgcggcgatctcgcccagggagaacccggcggcgcactggcaggggatggcctgcagcgcggcggccgcggccagctcgacggcgaacatgcacggctgggtgatgtccgtccgggccaggtcctcgggcttggcagaaaagcactggtccagcgtgccggggcgcagctgctccagccggtctaagacggtggcgctggcggcattgcgctcatagagggagcggcccatgccggggtactgtgcgccttgcccggcaaagacaaaggctatttgatccattgcgctgccccctttaaaatcggctccgcgccctgcatgacctcgcgaatgatctccgcggcgggctgctcttttttgaccatggcagcgatctgccctgccaggaagcagccgttttgcacgtcgccctcctggacggccttgcgcagcgcgccggtcgtcatggcctccagctcctcgtcagatgtctgggcgtactccgcttctgtataacggcgcatcagcggcgtccgcaggctgcggacaggatggcccaggcgcttgccggtgacggtcgtggccaggtcgcctgccttgaagagcttttctttataagtcggatggatgctgcactccgtggcagacaaaaagcgggtgcccagctgcacaccgcaggcgcccagcataaaggcggccgccacgccgcggccgtcggcgatgccaccggcggcgatgactggcagatccgtcgcgtcgcagacctgcggcacgaggaccatcgtcgtcaattcgcccacatggccgccgctctcgccgccctcagcgatcagggcggtggccccgacccgggtcatcagcttcgccatggcgacggacgccacgacggggatgacctggatcccagcgtccttccataggggcatatacttggccggattacctgcgccggtcgtgacgacggcgactttttcctccgccacgacttgggcgaccgcatcggcaaaggggctcatgagcataatatttacgccgaagggcttgcccgtctcagccgccgcgatgcggatctgctggcggacatagtccgccggggcgttgcccgccgcgacgatgccgagcccgccgccgttggagaccgctgcggccagcttgccgtcggcaatccaggccatgccgccttggaagatgggatattcgatccccagaaggctacaaagctttgatctcagcatcacatttttgcctcaatgtaccggaccaggtctccgactgtttcgactcgctggtccagctcaatctccttgcccagcttgtcctccaggttcatcagcatttcgacggtatcgagagagtcgatgcccaggtcctggaaggacgtctccatggtgacctcggaagggtcacagtcgttccgctctgcgatgagctctgcaattgcttcgaataccataatcaatacctccaaatttttgattgtaatgcccataccgggatgcccggcaggcaataagttatcaccgataaccaaaaaaccagaaaaaaggaatgccgcctggatgcggcagcggcagcaggtgagctgcggcaaagtacagatgggttatcattgataactttttccctactatactgcctttttacgggcgtgtcaataggcaattctcgcttttcggtcatttcgtggaatgcggcaaaacggtttgactttctgcagaaaaaccggtaaaataacactattatcattaggtggagaagaacgatggaacacaggatgcggcaaaaaaagcagcagcggcccctgcgggagcggctgctggaggccggtgtggaggagctgcagcgatacgggtttgagaatttctcagtgcgccggatcgcgtcccaatgcggtgtctcctgcgcggcaccctacaagcactttgcggataagcagacatttatttcagcgatttttgaatacatcaacaagcagtggctcctccggcagaatgtggtcctgcaaaactgccaggggccgacgcgaaagaagatcctggagctcagcatggaatacgtgcgctttttggtggagcacgcccagttccgctccattattatgatgaagtatgacgatacggacgagaaattctccaccctgcgccacaagctgacccggcagacctatatcctggtgcaccgctactgcaaggaggtcgatatgccgccggaggtgcggcacagaaagctctttgtcgtgcgctcgctgatctacggcgcggcgctgatgtttgacaacggcgaattggagtatacagaggagaacgtccagatggtcgcccggtgcattgaccgggagtttgatttgccataacgcgacgggtaaaatcgcggccggcgggcaagctagcgttggacggagaaggaggagactgggatgcagcagaagcatttgaatttttttgcggactttttactggacctgggcggcgcggtgctctattccatcggcatcggactgtttgcgcagaacgcgggctttgcgcccggcggcatttccggtctggcgctgctgttctatcacctctggaagctgccggtgggtttggccacatttttgatgaatatccccttggtaatcctgagctatcgctatgtggggcggcgttttttgctgcggtcgctgcgcagcgtaattttgtgtacgatcctgctggacgtggtctttgtgcatatcccggtttattcgggcaaccagctgctggcggcgctgttttccggcgtcttcgtcggcgcggggatggcaatcttctatatgcgcggctcgtcctccggcggggcggacctgctgaccatgacgatcaaggtgacaaagccgtatctttccattggatttgtcacgatggcgatcgacttcgtcatcatctgcctgggctggccggtctttggcagtattgacgcggtgctctacggcgtcgcttcgacggcggcgacttctattgtgctggaccgcatcctgaacggtgccagcatgggcaagctgatttttatcattacagaaaagggcgacgagattgccaaggagatcgacgcccagtcccaacgaggggcgacgcggctccaggcccggggttgctacaccgggacggagaaggaggtcatcctctgcgcctgcgccaatgcggaggcccataagatccgaacggcatccttccggctggacccgaacgcatttattatcgtctcccagaccaatgagatcttcggcgcgggttttatctctccggaccagacgacagcgtttttataggaaaaagcgcattgcaaaagcaaaaaaatcgcttgccgcaaaaagcggcaagcgttcggcgcgcccgcgcgggcgcatgggatcgctgctcggtattggataagctgtaatgccagtatagcagccccatggcacaattgctgtcggatcccggcggcgagaaaaaattttttatatgcaaaggaacaagcggtgatggattggataacgacatgggattttgccattctggactggattcaggcccacctgcgctgcggtgcggcggatcagtttttttcgacgataacgcacctggcggacggcggcgtattctggatcctgctggcagtagtcctgctggcgattccgaagacccggcggtttggcttagccctggccctggccctagtgctggatggcattttctgcaacggcctgctcaagccgctcatcgcccgggcgcggccctatcagctgcacccaggggtgcagctgctgatcgcgccgccgtcggattactccttcccctcgggccatgcggcggtctcctttgccgcggcggcggcgctgggagccagtcatgccaaggcgtggggctggagtctggcgctggcgattctgctggccctttcgcggctctatctatatgtacattacccgacggatatcctggccggtgcgctggtcggtaccctggccgggctggccggtgcggcgctggcaaagcgtctgcccccgcgccgggcgaaaaaagagcagcttgacgtggccgactgacccggccaggcagacgagcaatcagaacaatcaaagaaaacgccgcctccgcactgtcccaacggtgcagaggcggcgtttttattctgctttgggggcctgggcagatgttttccgggcggtggcgcgttttgcggcagcgctttttttctttaaggccagagcggcctgctttgctgcggcacgccgtgcttcctcggcttgggcctgcgccaggcgagcggcttgccgggctgcgtcccgctcctgcagcagttgctgcatcttacgctgctgtactgggtcacagagggtgaggaaggcggcgaaggcatcggggtagagaaagtgcttctcctcgaagggggccgtgaacgcgacggtaacgcaggtctctgcctgctggacgatctcgccgtcgccaaacttggcgtggtgtacttgctgatgtaaaagttccatggggtgctcctttctgaaaacggggataatgagcaccggcaacgggggcccgttgccggttttcgcacgttgggcaagcgcattggcttcaatggcggtgccaagcaccgcacgcgcgagaacgcgcaaaaaccggcaaggccgatttttattgttgctgcaagcgcagcactgtaccacacgtggcggcgtgccaacgcaggaaatggcgttggcggtaggcacagggaaatgtctgacaagatcattatagcggagaaaaattaaaaatgtaaggaaaatttcccgtagaacctggaaaaaataagctagcctggcatctgccgccgggcatgttaacgaaaatgattgaaaattataatttttgactgaatttgaacgaaacgacttgacaacagaaaaacaatgtggtaatttagtgacaacagaaagaaacggtcataaaacgtcaaattaaagcaaaggaaacacgccaaagctgccggatggcggcggcgcggagaggagtgaagcagccatgatctataccgtgacgctgaacccggcggtggactatgttgtgcatgtcccggcgctgacccaggggcagattctgcgcagcacccgggagcaggtctttttcggcggcaagggcgtcaatgtttccagcgttttgcacacgttgggcgttgcatccgtcgccacgggctttttggccgggtttactgggcaggctatcgagacggagctggcgcggcagggcattgggacggattttgtcttcctgccggacggctttacccgcatcaatctgaagcttcgtaccggcgtggagacggatatcaacggcggcggcccggtgatcggcccggcagacctggcggcactggaggaaaagctgacgcgcctgcgggccggggacattgcggtcctggctgggagtgtaccgttgtcgctggcgggcaatccgtatgcggacctgatggcgcatcttgccggtcgggggctgcgctttgtggtcgatgccacaggcgcgcagctgcgcagtgtcctgccgcttcagccgtttttggtcaagccaaacgggcaggagctgggcgagctctttggtgtgcgcatcgcgtcggcggcggaggcggctaagtatgctacccggctgcaggagctgggggcccggaatgttttggtctccctgggcgcgcagggggcggtattggcggacgagaccgggtgcatctggcagcagcccgcctgccggggcgagacggtgaacaccgttggcgcgggggactccatggtggcgggcttcctggcaggctttgcgcaggctggcagctaccaagaagcgctccgcttgggcacagcctgcggcagtgcgacggccttttgtgagggcctggccgcggtggcgcagatccacgcgctgcaaaaggccctggccccgacgcagaaattggaaaaaccggaaggatccgctgtgaagtaggaggttgcaagatgaaaatttccgatctgttctatcccggcagcattgcattaaacagcgcgccgcaggacaaggcggctgccctggaggccctggtgcagcagcaccaggcggcagggaatctggaggatatcgaccgctaccgccaggatatcctggcccgggaggcccagggcacgacggcggtcggcaatggcgtggcgatcccccatgccaagtccggcgcggtgcggcggcccgggctggcggcgatgaccgtcccctgcggcgtagactgcgacgcgatggatggcgcgccggtgcggctgctctttatgatcgccgcgccggatgagagcgacttccacctggaggtgctggcgaagctgatgggccttttgatggacgcgcccttccgcgaccgcctgtgcagcgctgcgactgaggcggcatttttgcagtgcatcgacgaagcggaggcggcaaaggacggctctgctgtgccggaagtaccgcccgcggcggacgataccgcctatgacgtgctggcggtgacagcctgccctacgggcattgcccatacgtatatggcggcggaagcgctggaaaaggcggcccaggctatgggcatccgcctgaaggtcgagaccaatggctccggcggcgtacagaacgcgctgacggccgaagagatcgcgcaggcgacgggtattctcatcgcggcggacaagagcgtggccatggcccggtttcggggcaagcggcttatcagtgtcccagtggccgatggcatcaagcggcccgaggcgctgctgcgccaggccatggccccggatgcgccggtctaccaggcggcggaagaggcaccgtccagcccggtggaccagcctgccaaggcaggcaagccggggctggggcacgcgctgtaccagcatttgatgaacggcgtttcgcatatgctgccctttgtggtggcgggcggtatttttatcgccctggcgtttttgattgacaccgtggccggtgcgccgcaggatggtaactttggagtgcatacgccggtggcggcgttttttaagacgatcggcaatgtggcattcaactttatgatccccattctgggcgggtatatcggcatgtctatcgccgaccggccggggctgctggtgggctttgtcggcggctatctggcgacgaccggcgcgacgtttgcaagcgtcgccggggatgttccctcgggctttttgggcgcgctgtttgccgggtttgccggcggctacctgatgctgggctttgaaaagctttgccagaagctgcccaagtccctcgacggcatcaagccggtgctgctcttcccgctggtggggttggggctgatcgcggtgctgatgtgcgcggtgaacccggtcatgggctttttgaacacggggctgagcaagctgctggccgctatgggcggcacgagccgcgtcgcgctgggtgtgatcttaggcgcaatgatggccattgatatgggcggcccctgcaacaaggcggcatatgtcttcggcacggcggccattacgaacggcaactatgatattatggcggcggtcatgatcggcgggatggtgccgcccctggccatcgccctggcgacgacgttcttcccggcaaaattcacgccggaggagcggaaaaacggcccggtgaattatatcatgggcctgagctttatcaccgagggcgcgattccttacgcggccagcgacccggctcgggtcatcccggcctgtgcccttggcgcggggctggccggagggctttcaatgctcttccggtgcacgctcatggcgccccacggcgggatcttcgtctttgccgtcgtcggccattggccgctgtatctgctctcccttgcggcgggcgccttgttcgggatgctgctgctggcggccttcaaacggaaggcccccccggcggtgaaagaataataggactggatatagggaaaggagtgtgacaacatggtatcgcagaatgtgacagtcgtaaatgcccaggggtttcatatgcgcccggcgatgaaattcgccaatgagatgacgaaatacccctgccaggtggagatcctgttcaacggcagtgtgacaaacggtaagagcctgatggacatcatcgccgcctgcatgaagtgcggcgcgcagatcgagctccgctgcgacgggccccaagagacggaggccctggccgcggcggtcgagatgatctcccacggcttcgacgagtaaaaaaccaggaaggaggcggagacgatgctgcagggcattggcgtatcccgcggctgcgggatcggccgcgcactggtcgcggcggcgcgggcggtggaatttaccccgcgggacggctgcgacccggcccttgagcgggcgcggctggcgcaggcggaggcggccttcacggcgcataataaacgcctggccgcgcaggtccgccaggaattgggccagcaggagagcgagatcctcttgggccatgtgatgatgctccaggacccgtccctgcaggggcagatcgaccaggagctggaggccgggcactgcgccgagcaggcgctggcaacggtctgcgatcggtatatcgcgctgttttccagcgtggacgatgcgatgacgcagcagcgggcggcggatatccgggatatcaaagaggagctcctgtcccgcctgactgggacggcacggctggacctgcgccatctgccgccggagacggtcctggtgacccgggagctgacgccaagtctggcggcgcagctggatcggcggcatgtgactgggattatcacggagttgggcggtgagacctctcacggcgcgatcctggcccgggcgatggacctgccggcggtactgggcgtgccggatgcgatgcagcagctggcaaatgcgccctgggtgatcgtcgacggcgatctggggcatgtcctgcccgatccgccggaggcgaccctagcgcagtaccgggcagcgcaggcgcgggatgcggcggcgcgggcggcccgggaggcattccggggccgggctacaacgctggcagacggcggcacagtgcgcttgttcggcaatatcacgtcgccggaccaggcaaagctcgtctgcgacaacgacggtgagggcgtcggtttgttccggacggaatttctcttcctggaccggcagacgccgccggatgagcagatgcagctggcggcctatcgccaggtgctgcagcagatggcaggaaagccggtcatcatccggacgctggacattggcggcgacaaggaagcgccctgccttgcccgggagaaggaagaaaacccgtttttgggcttccggggcatccggtattgcctgcggcggcaggacttgttcaaaacgcagctgcgggcgctggcccgggccagtgccgacggtccgctctccatcctgctgcccatggtgacgggtgttgaagaagtccgggcggccagggcgctgctgcgtggggtcctggaggagctggaggcagatgggattgcctgtgatcaatcactgcgcctaggcgtcatgatcgagacgcctgcggcggcgctgacggcggacctgctggcgcaagaggcggattttttcagcatcggcaccaacgatctgaccggctacaccatggcggcggaccggggcaatgcaaacgtggcctatttatacacgcccctctccccggcggtgctgcgggcgattcgcggcagcatcgcggcagccaaggcggccgggattccggtggggatgtgcggcgaagcggcggcagacccgcggctcatcccgctgctgctgagctttgggctggaggaattcagcgtctcgcccaatgcggtcttagagacccggcggcagatcgcccgctggagcaaggcggacgccgacgccattgcagccgaagttatggcgcaggaaacgacgcaggatgttcaggcggcgctggcacgtttgatggaagtgtaacgcagtttatcttatatattgcgatacagcctggtttctcctcctggaaaccgggctgtgataaaaagcggccctgcgattcacgcagggccgcataatttttcactttttatgatttactgctgcgcgccgcagttggggcagcagtctgcaccgtcgagaggcgtgccgcaggcggggcaaaattttttctcaggcgcggcgaccggttcggtcggagcagccggggtagcggggtcaaccggggcggcgggcgcagcctgggcgcgcttggcggccttctgctgcagcgtggccttcattgcggacatgtctggcgtggaaaaggggtctgcctgggcgccgtcgttctggttgcgcagcttgcagttgatggagatgacgtgcttgaccagcaggatgcccatcatcagcaactcatagaccagccgcacggcaatggggccgacgatcatggtcagcaggccatagccgccgagccaatggcgggtgccggtgaaaaaatcctgcggggccatgaagagcatgaagaagcctgccagaatgacatacgccgtggcgaagatgtacagggcctgcaggatcttctcaacgatcagatacttaaagttgcaggtgtcgtgcaggaatttgccgaaggcacccatctgcgcccggcgcttttccgggacgataaagataaaggccagcactgtggccacaatggcgataatgatggcaacgatgcccatagcgcccagatttgcgattgtactcataaaataatcctcgctttctctctatgtccgggcggcatgccgtccggtctctttttatagtttatagtgtagcagatattacgggaatgtcaacgaaaaattacgaccgctaactgttgcgggcggcgcgtatatttgccgggctggtgccatatatatgaaccacgcgaatatggagagtggtatctatgaagcatgacatcgagcagcgagcctgcgatctggctgtgtacatcatcgaaaaccgcaccacggttcgcgctgcggcaaaacagtttgggatcagcaaatctaccgtacataaggacctgaccgagcggctgccccagtataaccggccgctctctctgcaggtgcaggccattttgcagcaaaacaaggccgaacgccatatccgcggcgggcaggccacccggcgaaaatacatggccgtgcagcacagcgcggcggcgtcacagcctactggccatccagggcggtaaggcggcgcgcaaacagcgataccaggcacggcagcggtgtgtttcccgctgccgtgccgcgcgttttgcccgaggaaccggcactttgctgcacttgaccaaattacgaacaaaaatcttttagaccttcaaaaaatttttgtgaaaagaggttgattattgggtgaaactgcggtatactcgaggtagtgacagggtttgccctgaagatttcattatgaacgacgtttcaggaggtacgataaaatgaaatacggccgcacttataacttctccgccggtccggctaccatgcccgaggcagtactggaagaagtccgtgacgagatgatgaactacagaggttccggcatgtgcgtcatggaaatgtcccaccgctccaaggtctttcagcagatcatcgacgaggcggagcaggacctgcgcgatctgatgaacattccggacaactacaaggtcctcttcatccagggcggcgctaccctgcagttctccatgattcccatgaacctgatgaagaacggcgttgcttgctacgtcgagaccggtgcttggtctaagaaggccattgccgaagccaagaaggtcggcgaagtcaaggtcgttgcctcctctgccgataagaactacacctacgttcccgattgctccgatctggacatccccgacaatgcggactatgtctacatctgcgagaacgagaccatccacggcgttacctggaacaagctgcccaacaccaagggccatgtcctggtttccgaccagtcctccatgttcctgtcccgcccctgcaacgtctctgactacggcatgatctacgccggtgttcagaagaacgtcggccctgccggtatggtcgttgttatcatccgcgaagacctcatccgggacgatctgaaggatctgcccgtttacctgcagtacaagacccatgcggacgctggctccatgtacaacacccccaactgctgggcaatctacgtctgcggcaaggtcttcaagtacctcaagaacctgggcggcctgaagaagatggaagagattaacatcgacaaggcaaaggttttctacgacttcctggatcagtccaagctgttcaagggcaccgtcgttcccgaagaccgcagcctgatgaacatccccttcgtcactggcgacaaggatctggacgcggaagtcattgcctacaccaaggctgctggctttgaaaacctgaagggccacaagtccgtcggcggcctgcgtgcttctatctacaatgcaatgcccaaggacggcgtcatcgcgctggtcgattgcctgaagaagttcgaagcggaacacaaataatttaacgatactgattaaaggagattactgaaatgcgtattcttgttactgacggtatggacaagtccgcaatggcgcagctgcgtgagcagggccatgaggttgttgagcaattctatgagcccgatcagctgggcaaggcgctgcgggacttcgacgcagtcgtcgtccgctctaagacgaaggtccgcgcaaaccacattgacgaggcgaagggctccaagctgaagctcatcatccgcggcggtgtcggcgtggacaacatcgacgtcaagtatgccgaagagaacggcatcaaggtcatgaacaccccgcgtgcttcctcccagtctgttgcggagctggcactgggccatatgttctcctgcgcacgctatctctccatcgctggccacaccatgcgtgaggacaagtgggagaagaaggcttatggcaagggcatcgagctgcagggcaagaccctcggcatcgttggcttcggccgcatcggtcagcatctgggcgccatggcgaaggccatcggtatggacgttatcgcattcgatatcttccacatccccggcatcgaagagcagatggggatcccctacgttgagatggacgagctgctggcgaagtccgacttcatcagcgtgcatgctcccgctgttgacggcggcgctctgatctccgcagccaacatcgaaaagatgaaggacggcgtctgcatcatcaacacctcccgcggcaccaacgtcgacgaggacgcgctgctggccgctctggaatccggcaaggtccgcgctgctggcctggacgtctactccgaagagcccgcgaagaaccatgcgctctacagccatcccatggtctcctgcacgccgcacatcggcgctgccaccgtggaagcccagaagcggatcggtacggagattgtctccatcatcgaaaacttcggcaaataatttttggcaaaataagaaaatgggccgcagagatgtggcccttttttcccccggccttcacgctgggacactgtgtattttacccgcgggcattcgcgggtgataaataaaaaggagtactgattatcatgaatgcttatgttacgagcgtaattgaaaacgtcaagaaaaagtatgcgcatgagcccgaattttgccagaccgtagaagaggttctctcttccattgctcccatggttgacaagcatccggaatatgaaaaggctgacctgctgaaccgcatcgttgagcccgaaagaatgttcaccttccgtgttgtttggatggacgacaacggcaattatcataccaacaccggctatcgctgccagttcaacggcgccatcggcccctacaagggcggcctgcgcttccagcccaatgtttaccccggcgtcatcaagttcctgggcttcgagcagattttcaaaaacagcctgactggcctgcccatcggcggcggcaagggcggctccgactttgacccctctggcaagtctgatgctgagattatgcgcttctgccagagcttcatgacggctctgtaccgctatattgggccggacgttgacgttcctgctggtgacatgggtgttggcggccgtgagatcggctatctgttcggccagtatcgccgcctgaagggtgtctgggaaaatggcgtcctgaccggcaagggctttagctttggcggctctttgattcgtccggaagcaacgggctttggcgcgatgtactacctgaacgaagtcctcaagcatgagggagaggacatcaagggtaagaccattgccatctccggcttcggcaatgtcgcttggggcatctgcaagaaggcccgtcatctgggcgcaaaggtcgttaccctgtccggtcctgacggctacatctacgatccggaaggcgtctcttccagcgatgagaaggttgcttatctgctgaccatgcggaactctggccgcaacaaggtcaaggattatgcagacaagttcggcgttgaattcttcgcaggcgaaaagccctggggccgcaaggtcgacgttatcatgccctctgcgatgcagaacgacgtcaacatggactccgcgaagaagattgttgccaatggcatcaagtactacatcgaagttgccaacatgcccaccaccaacgatgcgctgtactacatgatggagcagaagaacatgatcgttgcgccgtctaaggctgtcaatgcaggcggtgtcggcgtttccgctctggaaatggcccagaactccgagcgtctggtctggacggaagaagaggtcgatgcacagctgcagaagatgatgcagaacatccacaaggtttccgtggaagctgccgaagagtacggcctgggctacaatctggtcgctggcgcgaacttggccggcttcaagaaggtcgccgacgccatgatggcgcagggcgcattctaaggagcacttacatcatacctttgcatgtttcacttgtacaacgataagacagcgggctgcttcggcagtccgctgtttttctgccgctaggtgtttttgagatagcaggcaaggcgaaaaacaagcgccgcacgcgaaatgcgtgcggcgcttgcggcattcgtagaaagactaccacccgctatgcgggtgagccggaaaaagttctacttatgggtagaaaataaaaacctccagtgatagagtagtagcaggttcgccaaccgctacaaacaagatcaatggaggttatccaaatggacaacaatagtctagcacataccaagtggaattgcaaataccacatcgtctttacccccaaataccgcagacagattatctatcggcagatttcatcggatatcggacagattatcagaacattatgtgcccgaaaaggagttgaaataatcgaggcggcagcgctttccgatcatatccatctctacgtggcaattcctccgaaatacagtgtatccgaaattgtaggatatctaaaggggaagagtagtctgatgatattcgaccgtcacgcaaatctaaagtacaagtatggaaaccggcacttttggtgccgggggtactatgtagatacagtggggcgtaacgaaaagacgataaaagaatatgtacgcaaccagctccaggaggacatcgcaagcgaccaaatgtgtatcaaggaattcaaagacccgtttacgggcgagccggtagtcaaaggcaaataataagccgcccccggaagggggcagccagtaaaaattttgcggttggcgaaccgttcgtgcgtcttaagacgcggctgtatcaggcccttatagggctagtgcaagccaccggctaagccggtggtcttgactcccaagtgttgcacctggtgtgcttggcgcaggggggatcaaaggcgcattgtctgctgaaatttgctcagcggctcttcgacaaggccgtatttttggctcagccgccgggccagcgcttccacatgggagaagctgccctgcttgagctccagctcgacctcacagaagggggcgctgcggcggccccggtaaagtgtccccttatccagggccagctcgacctgcgtgccctctggcaggcagagcaggcagcggcggcgcaggaaatctacgcggcagagcgtctcaagggggcagcggtgcaggtccaggatctgccgcggcgcgccctgggcgaagagtgcgttgaaggcaccgggcaggatctcgtcctgttcgaccaggccggggccccgcagctcccactcgccccgcttatggttggcgtccggcggcgtcttcagggtgatgacgggctcgccgttttccgtccggcagcgcagcgcccatttggctcgggcgaggatatgctcctccgtgtcatagtaggtcgtgcgcatctcaatggattccattgggctgcagcgcagcggcagcagcgccgggtcctccggcaacagcgacggatccgcgccgtcccgggctcggagcttgatctcctgttccatccccatggtggttacctcctgcgttgttttttcttttagtatatgggaaaaatgacgatcttgcaagttcattttttgcgcccggttccgacataatccgcatccgacctatgctaagatacgagtaacgatatggggagggatggcgttttgaacgagcgggaaaagaaacagggcggcctgggtctgcagctgccgcggccgaagcaccgtaagctggcactgcaggtaccttggcgggaggttttgcggtatgggctctattttttgggcacggggctgctctgcgcgctgccgacgggagacgcgccgtcacccctggcggcctgtgtggcggcggcctgcagcggaggagcactggcggcgtcgtttttgggctgctgcgccgggtactgcctgctgtggccggtggcagacggggtttggccgctgattttggcggctgtcctgccagcggcggcgtggctgctgcggaagagccgctatcaggctgtcgcctggtatctgcctgcggtccacacagtggccgcggcggcggtcgggtttgggatgctgtggcagatgcaattcccaccggcggcgctggggcggtattttgccagcctggtgagcgtatttgctggctcgtgggtcagccgtctggcactgctggagcagcggcgttgggcgcggcttctgctgggggcgacgctgctggcggcgctgagcgggttttccctggcaggctggttccatccggggctggctgtcggcctgtttttgacggcagtgaccgcaaccgcaccggaggggctggcggtggcggcagctgcggggatc

SEQ ID NO: 4090 - DNA, 22337 bp, Unknown
  16S sequences of unknown bacteria
agatatacggagtcgaggatcttaaagctttcggcatcgcaggcgcgcactccgaagatcacgaaatcctcggagggggagcgggtgtcgataacctcgaccttcttgccctcgaggcggaaatccgcgaggttttccgtctgcgggaagaagaaatcctttgcgctgcgttcggtatttacggcgtcgctgtactcggtcgccccgtgatcttcggtcgcgggggagtatttcgtgtattttgttctgccgttcttgtcctttgacgggatgtacagcgcggcgttttcggacagccgggtgaaaaacgcatccagcttatccttcggaagaaaatgcattctttgttgccctgcctttcttttattttatgggcatattctcagatccgctcggcggatcgcaatcatttgccgtatacggcggacggctccgcgtcgtccgtgctgtagtttgtgagcggcgcgcgggagaaggcttccttccccgcctgatattcgccgtagtatccgtttatgtcggagatgaactttctgttcaggaggtggagcgggatgtgctcggggcatacgcgcgagcattctccgcagtccgtgcagcgtccggcaacgtggaacgcgcggattatgtggaacatattctcctcgaacgaatcggctgccgccttctgcgatatcccggatgcgggattgtcgaatacgcagttttcgcaggagcaggcgggacatacgttgcggcatgcgttgcagcggatgcagcgagaaagctcgccgcgccagaattcgtatctctcctcgggggtcatttcctcgaggcggtgaactccgtcgaatctgtcgagaggctcgggaggagtgatctcttcgccgatgagctcgtcgaatatgacgtgctctccgcccttgcatgagagacattttacgcagagcgcgtccttcttcggcacggtgcggtctccgtagacggtggagatctcaaagctgtcgccggttcctttaataccggtgattccggtgatgcccgcttcgcggagctttaccggatcagccataccggagcagccgatgccgatcacatacaccttatcgcggtcaacgcgatgctcggtgatgagctgattcaggctgtatgtgtcgcatatcttgagaaatacaaggatctttccgtcgcgctttgtctgacggatgaggtatttcgagaggttcgctccgcagaaatcgctgaatacgaattcctcttcaagctcctttgcgctttcgaagatcgcgggggtcacgtcgtagcccatttcgcctgccttccagcctgcgacacggtcgacggttccgtcggagagcagctccgatgcgcgttttatgagtctttcctgcatctcagatcctccaatcttctgtttcttccgagtgccgtgacatcacggacgaattcgttcatcgtcgctgcgaacttagcgccctcggcggcgctgacccactcgactctcgtgcgctccttctcgattccgaggtagtcgagcatcgagaagagcatcgtcatacggcggcgggcgtagtagtttccggaggtgtagtggcagtcgcccggatgacagccgcacatgataactccgtccgcaccgcgctggaacgcgcggaggatgaatatcggattcacgcggcaggagcagggaactctgattatcttgacatccgccggataggatgcgcggttcgttccggcaaggtcggctccggcgtaggagcaccagttgcagcagaacgccacgatcttcgggcgaaattccgtgttagcttcattcatcggcatattgcatcgacctccgccattatctgtctgtttgagaagcccttcagatccattgcgccggacgggcaggcgacggtgcatgcgccgcatccctggcaaaccgcttcgttgacgaacgcaacgcggcggacctgagtcgttctgtcgggcatacggaattccttatcgaggtacgagatcgctccgtagggacataccttttcgcaggaggagcagccgttgcacatcatctcgtcggagtgagccacgcagggattgcccttgagcttatcctttgagagaagtccgatcaccttcgcggcggcggcactcgcctgagcgacggtctcggggatatccttcggaccctggcaggcgccggagaggaagattcccgcggtcggactctcgacggggcggagcttcgggtgagcctcggtaaagaagtcgttcgtatccatgcttgcggtgagcatcgtggcgagcggacgagcgctcttgtcgggctcgatcgccgcggcaagcacgaccatgtcggcggagatcttgatctgcttgttctcgatcagatcggacgcttgaacggtgagcgttccgtcggcctcgggatagaccttgccaaccatgccctttatgtagttgacgccgtattcctcgaccgcgcggcggtagaactcgtcgaagttctttccgggggtacgcacgtcgatgtagaatacatagacttcggtgtcggggtacttttcacgcacgagcattgcgtgctttgcggtgtacatgcagcagatcttcgagcagtacggctttccgcagccggaggtatcgcggctgccgacgcactgaacgaaaacgatcgtgtgcggatgagttccgtcggagggacggagcagcgtgcccgacgtaggacctgcggcgttcgtgagacgctcgaattcgagcgaggtcacaacatctttggactgagcgtatccgaactcgccgaatttgtcaagctcgatcggattgtatccggtcgccgcgacgatcgcgccgtacttttcctcgatcacggtgtccttctgcgtgtagtcgatcgctcccgcggagcataccttcgagcatacgccgcatttgccgttcttcagcatattgcagtgatccgcgtcgatcgttgcgaccttcggaaccgcctgtgcaaacggaatgtagatcgcgcggcggttgtccattccgaggttgaactcgttggggatcttcttctggggacatttttcggtgcagagaccgcagcccgtgcacttcgtctcgtcgacgaatctcgccttgcggcgtatctttacggtgaagtttccgacgaatccggagaccgcctcgacttcgctgtatgagtagatcttgatcttttcgttctgcgcgcagtcgaccatcttcggagtgagaatgcacgccgcgcagtcgagcgtcgggaaggtcttgtcgatctgcgtcatctttccgccgatcgtcggcttcttctcgacgatatcgacctcgtagcccgcctcggcgatgtcgagcgcggtctggattccggcgataccgccgccgatcacaagcgcgcgcttggttacggggctttcgcccgcggtgagaggcgcattgaggtgaacctttgctattgcggcacggccgaggatgatcgccttttcggtcgcactctgcttatccttgtgtatccatgagcactgctcgcggatgtttgcgatttctaccatgtacgggttgatgcccgcggtcgccgccgtctttctgaaggtctgttcgtgcatacggggcgagcaggagcagactacgatgccgtcgagagagtactcgtgtaccgcgtcgattatctttttctgaccggcttcggagcacatgtattggtattcggtggcgaatacgacgcccggctcatgtccgagcgcttccgcaacggcgcgtacatcgaccgttccggcaatgttcgtaccgcagtggcatacaaaaacgccgattttctgcatttttataaccgcgctttgccgtgcaaagctttcctttcatatggggattatcgtgactgccgtccgagcggacggaggctttacttcgcgtatttgcggaatgcgctgactatcgcctgctgaggaagctcgggatcgagcttcgcggggacatcctccggcttcatgtggtttgaatcctgacggcggatgaccgcgatcctgacggcttcgacaagctttgccggctcgacgcctctcggacatctctccgagcaggtgaagcacgacatgcacttgtagattccgcggctgttcatgagctcgtcaagctcgccgcgcagtatcatctgcgcgaactgatggggatgaacgtccatctcgtcaaaggcggggcagcttccggagcactttccgcataccatgcagagctcgggcttcgcaccgctttcgcggcgtatctgttcgatttccttcgcgtatttcttctttttgttttccatctcactcctccgttccgagagccttgcagagaaggtccgtgaaatagtataccgggatcgatcccgaggctttcttcagattgtagaggcagagcggacatgccgtgacgatcgcctccgctccggcttcctccgcgtttttgagaaccgcgagactgcggcggttcgcggcggacggatcctccattgcgagatatcctccgcagcattcgtttctcatcggatatacgacggcatctgcgccgagcgacgatatgaagtcctccattatgcgaggattctcgggatcgtccatctgcatgaccttgcccgggcggagaagcaggcagccgtagtacgcggcgatcttctttccggtgagaggcgcggtgacgcgctcggcgacggcgtcgaaggtgatctcgtcacgcaggacctcgagatagtgcatgaccttcgttcctccgccgtatgcgtcgtcgggaccgagatagttgtttaccctctgtgctttttcgggatcgtttatcatcagatcgtttgtctgcttgatcacgttgtgacaggcggagcagagggtgacgaggattccgccgttcttttccgccgcggcgagtgctctgaccgaggaaagcttggtggcaagctcgtcgcgcgacgtgggatatacgccgccgcagcactgccaattctcaagctcgtcgagcgtgaagccgagcgcctcggctgcgcgccgggcggatgcgtcaagctcttttgcctgcgttttcagagtacagccgggatagtaactgtatttcttcatatataaatccccctgttcggtattttgctgcgggaatgtcccgcgatagtgttgcgctttatcgggcagcttttcgattcgtgaccttgcgcgatatcctgccggatttcattccgcggcagagcgatcgcgctttttcgaaagccgaagctcaaagcccgtttgccgccgaaacggcatcgcccggatcagaccatctcttcggggtggaatacctcgtcgaatctctctgcggtgaggaagccgagctcgacgcacgcctccttcagggagatgttgtccttgtacgccttctttgctgtcttggcggcgttctcgtagccgatgtacggattgagcgccgttacgagcatgagcgaatcgtgaagattgcggtgcatcttttcgcgctttgccttgattccgactgcgcagttcgcgttgaacgaaaggaccgcttcggcgagcagacgcgcggactgaaggaagttgtatgcgcataccggcatgaatacgttgagctcgaaattgccctgcgaagccgccatgcctaccgcgacgtcgttgcccatgacctgaaccgcgaccatcgttactgcttcgcactgtgtcggattgaccttgccgggcatgatcgacgagccgggctcgttctcggggatcgtgatctcgccgagaccgcagcggggaccgcttgcgagccagcgcacgtcgtttgcgatcttcatcatgtcggcggcgagcgccttgagcgcgccgtgcgcgaacacgatctcgtccttgctcgtcagcgcgtggaacttattctccgcggtgacgaattccttgccggtaagctcggatatctccttcgcaacgagggtgtcaaatcccttcggagcgttgagccccgtgccgaccgccgtaccgccgagagcgagggaacgaagtccctttgcggcgagggtgataagctcgacatccttttcgagggacgatctccagccgcttatctcctgagaaaatttgatcggcgtcgcatcctgaaggtgggtgcgtccgctcttgacgatgccctcgttctccgcctcgaggcggacgaaggtttcgatgagggtctttactgcggggatcacgcgatcctcgagcgcgcagagcgcggagatgtgcatcgcggtcgggaaggtgtcgtttgacgactgactcatgttgatgtcgtcattcgggtggagcagcttcttcccggcgatctcgtttgcgcggtttgcgatgacctcgtttgcgttcatgttggactgagtgccgcttcccgtctgccatacgacgagcgggaagtgctcgttcaggcctccggagatgacctcgtcgcatgcggcgctgatcgcgctgagcttttcatcggtcattctttcggggacgagcttgttatttgcaagagcggcagcctttttcaggattccgaaagcggcggtgatctcgcgcggcatcgtctcgatgcctacgccgatcgggaaattctcgtggcttctttcggtctgagcgccccaatatttatctgcggggacttttacctctcccattgaatcgtgttcgatacggtattccataggtgtaaacctttctttgagtgtactcggtgatgccgcgtttgcgcggcgattcggtaaaatacgatgaaacaccgacgaaagcgcgctgcgctttcgcggcggaaatcgtgaaaatttgcgctttttcggacggcgtgcgtcgtcgttattctcgagaacgccgacgggatttgcgcaccgcgtcgaaacgtacagcccggcagagccgagaactccggcgcatgccgaagcaaaatccgacggacggcgcttgcttccgtatacggcaaagccgcgcttaccgctttcgcggacgcgcggcgccgtacctccgcggagcggaggactatcggcgcggaacgtatccgcgccgggtcagaaggtcacgctgtcgataacgcttctgagataatctgcgctgcggcggaaggatgcttcctcatctgcggtaagcggagcgacgatctttccgttgaggccgtccttgccgactatgcagagagagctgaggcatacatcgtccacaccgtattctccgtgcatcatggtggatacggtcatcgtcgtgtccgctccgctgaatatgcagcggcagatgtgacatacggaaatcgcgaccgcatagaacgtcgcacccttgcgtgcgatgatctttgcgccggatttctttatgtaggtttcgatctcatcgtgatcgagaaccggacggagcgtgtcgtctccgtctctgagacactgcatgtacttgtcgatcgcaatgttggagatcgttgcgcacgaccacggaacgaacgaggtgtcgccgtgctcaccgaaaacataagcatgtacgttctgctggcttatgttgaagtactcggaaagtcttgtgcggagtcttgcggtgtcgaggatcgtaccggaaccgattatctgattctcgggcagtccggagtacttgcagaactgataggtgagaatgtcaacgggattgcttacaattatatagatggagtccggagcatactgtacgatcttcgggatgatcgacttggttatgtcaatgttcttctgtgcaaggtcgattcgtgtctgaccgggctttctcgcgcttcccgaggtgaggatcacgatgtccgatccggcggcgtcgctgtagcttcccgcatagatctgcgcgggagcgcagaacggaatgccctgctttatgtccatggcttctccgagggactttgcctcgttgatgtcgatcattacgatctcggaagcgatacccgctaccgcgagggtgtaggcgatcgtcgaaccgacgctgcctgctccgataatgctgactttgttgctcatctcttgtgaccgttcctttcttttgcggaaagtgcgcgtcattgcgcaagtcccggttttgcggcggcgaaatatcgcgctgcgccgatcttgttttccctctttattgaagccgcactgcagcgcacctctcggcgcaaagctgcgctccggctttcggatacgccggggagagcgtaccgcttcagccgtccggcgacggcatgactgactttacggacagaaaaaggattttttcggatacggcggaattaccttgcgcaaattcgaagtttttcggtttttgcaagtttacggcaaaaatccttcagtttctgcggggaaacgccccggattgctgtttgaagtgcaagtattgccttgcttcgattcagccgaacccctctttttccgtatacattatatcacaaggcatgaatttttgctatgtgaagattgcacataaaaacatattgattcgcacagcgataaatgcaaaatgtcgaaagcgggtgaaagcgcattttccgcgcgccgggagagggcgcgccttttgccgtttcggcgcggattaccgcactccgccgggctttatcctcagcgtgcgcagatacgctttgtcctcgggcgtgatgcggtagctttcgatcgctttttgaatcgatttattgtgtacccacggggagaggcggcattcttcgatgaatgggatcgcgctttcgcgctgctttgcgatcgccgtggcgaaaagccaagcgatcgccgtgtttatgtaatattcgtccgacttcaccgatgcggcgagagaaagatactcggggcggaaagcgccgtcgaggaagtaggtcatcagcaagacaagagcgaagcggacggtgtagacatgatcggatgcgatccattcgcatattttcgcgtaaagctcaccgtcgtctccggggaaagccttcggcctcatgagatcgcaggtcgcccaattatctacgtggggaagaaaagcgtcgagcagccggacggtctcggcaaaatcctttttttcgcagaggagcatcgcgtggagattgttttcctcatagaagaagtggggaagggatgcgagaaactcatccgcttcgtttgtctttgaaaattcctttgcaaaagcgcggagcgcgggcgtgcggatgccgattaccctttcgggatcgatattcggaatcagacggctgtgaaaatcgcggtaggcggtgtcctgcagggaaaacagcctgtcgcggagagattcgtgcatttttcctccgatcgtaaagcgcggcgaaacggcgttttttgtgaattgcctctgtctgatattataagaaaaaaatgatttaatgtcaatatcgcgccgcgcaaaacgggaatgttcataattattttaacgaaaataataaaaaagtccaccgccgacctggcgtctccgcgcgaggggcgctcactctccgaagaaacggtggtgcttttcgtgcggcgcgcagatacgcgcacttgacacatgcgggagcgcgggatataataaacgtacattttgcccgcactgccgcacgatgagacaatgtttgcgcagcttccgcgcggaaaggcgcacgacgggaaaagcacattccgaatgcgatcaccgctttccgtatcgtcctcgcgcctgcactccttattcaaaatcttgcggaggcggcgtatcttgacgcacgggcgttttagtggtagaatataggcacgttattgccgccgggcggattccggcgcggaaccgatgaaaatcgggcagcctcggtcgaggctgccgaagtttcgttttattcgcgcgaaagagcggcggcgcgcttcggcgtgcgatgaggcgcgaagaggtatacgacgggcttttcgcctgagaaaatgcagtcgccgatcttcgatcgtttatctccgatcttcgatcgccgacagtcgatcgttgattgtttatcgccgattgccgccgaccgatcggcagtcccggctttcgccgattcacggaaaggaaaatgaatggaaagttatttcagagtatcggcagacgccgcggataccgacaagcgcgttcgccgtgagtatatgcggtttgtgtggcgaaagcggcgcgcgtatctgcccggatttgttttttcgcttgtgattctcttcgtcatagctccggtgtccgcattccttgccgcggggcgcggcgggtatgagcttctgttcgtcgggatcgcctgccttttgtatatgctgcttctcccgaatatcgcctcctcgatgctcggtcgcggcaggagagcggccggcgcggtctacgatttcacgtcggattccgtcgtcctgcacggcggcggaggcgaagaagaagcgacgtcgtattccgatatcacggagatcgtcgagcttccccgcatgtttgttctttttgcgggcggaaaaagggcggcgaccgtttcaaaggaagcttttatttcgggcgaagccgaagccttcgccgcgttcatctcggtgcgctgcggcagagagatcaccgcgttttccgacagacgcgggcggcgcgccgttctcgcagtcggcgcgatccttcttgccgcggtgatcacggtatgcgcgggcgtgctcggcatcaaatacgcggggcgcggctacgcaaattccgaagggagcgttcaggtgcgcgcatcggcggaagaaaggaatctcatctgatgaatatacttatggtaacaatgtcgctcggtatcggcggggtcgagacacacataaccgagcttaccaaggagcttatccgacgcgggcaccgcgtcacggtcgcgtcggcgggcggtgtctatgttccggagatcaccgcctcgggcgcatcgcacgtcacccttccgcttgccggtcgatcgccgatcggacttgcgcaggcgtacttcgggcttcgccgcctcataaaaagcggcggatttgacgtcgtacacgctcacgcgcgcatcccgtgcttcatatgcggtcttgtgcgccgcacctcccgtcggaagtttgcatatgtcactaccgtgcacggggtctataagaagatccccgtcgccgagcgccttacagattggggggatcgctcgcttgttgtcagcgacgacgtgagaaagtacctcacggaggaatacgggataaagcccgaaaacatatcggtgacggtgaacgggatcgacgtggattcgtttgactcgttctccgatgaagaagagaagcgcgccggatgcatttcggcggggcttaccgaggagagtgcgcatcggataatgcacgtcagccgccttgattcggcatcgtcggacgcggcatatcagcttatcgaagcgatggcgcgccttaacgaaatgtatcccgacgtgcagacggtcataatcggcgacggaagcgaatttgaatctgtcaaagcccgcgcggatgaggtgaaccgatccctcggacggcgcgcagtcgttatgacgggggcgcgcagcgacgttgcgaagctgctcccgtgcgcggattcgtttgtcggcgtttcgagagcggcgcttgaggcgatgtcgtgccgtattccgacggtgcttgcgggtgcgcagggatttctcggaattttcgacgacagtgaggagatgctccgccgcgcgcagagcacgaatttctgctgccgcggagagggcgcatcttcggctgatgcgatatgcggcgcgctgatctctctgttttcgctcggcggcgaacgtctttcggcgatcggggagaacgggcggcgcgtcgttgagaagtattattccgtttcccgaatggcgggcgatgccgaggagatgtaccgcagcgcgcttgcactccgtcgggattgatttgcgcatcttcctgactttcgcacggcactttgaggacattcaccgatcggtgattcgcccggcagaacgcgccccgcatcgccgaacggcggatgttcggtgccggataaggtacgaatgtacgcacggctcatacctgcggtgtcggcaaatgccgccgcgcgtgatgatgaaatcttcggcgttcggacagcacggacaaacggaatttcgcactctcttttgtgcggcaggttttctctcacgccgtgcatactcgccgtgccgtgccgacatcgcggcgtcaccgagctgatctcgccgtgcgctttgcacacgctgcgtacctgtacactgctgtgtctcagtcgcgcgctctctttacaagcttgctccgccgccgtgctttcggtgcactgatttcgacggattttgtcgccgtgcgtacttcaaaaaataaaatctcgactttccgaaaaggaaagtcgagattttttcatttgtcaaggttgacggtatcagtcgccgatatagctgtcccaatcgaagtcatcgtccccgtctccgaagagaagagagttcatgtattcccaaacggcgtagtcatcatcatctccggtgtccccgtcttcgtcgtagtcgtaggtgttgtcgaagctgcgatagatgtcataggggtcttcgtcgtcgtagtcgtaatcgggatttattgtgtgatgcccgccggatgagccgagaccgggaatgcctaacgcattgaggatcgggagaacgttttgctgaacgctctcgccgagcgcggtgtagtcgtccttgctcatggttgcaaggttcttgaaatcgggcattgcgggaacttcctcgcctgccttcacgaacagcttgattccgagaacggtctcttctccgttgatgataatcttctctacaacgaggctgagatcgttgtcggagtactcgagagttccgttgacctctgccttttcatcgtccatggtgtagcagaagctgaagttctttgattccttatcgtgcttgaagccgatctcgaggctgtggctctcgccgtcgctctcggcgctgaggctgatctttctttcaaagctgtccttgtcgttcgtgcgcttgacggttgcctttgcggtgatttcctgaccgtcaacgtcggtgagcttcatttttgcatcgaagctgtcgctttccgcggggttctttccgaagtcaacggtaacctctgcctttgccttgccttcgtcgctttcgccggtcatttcaccctcaaagagcatgatgtccgcgctttttacgttgagcgcaaagctgagcttaaacttgagattgtttacctcgtcaaggatatccgcaaggcttgacttcatttcggcgggatcgagatcgatatccgacgaacctgcggggagcatttcggtgtaagccttcatgaagtcggcataccaatcgatcacaagacccgcgatctcgtttacggtgtccttgccgaattcatagttaatgaggatggccttgacatcctcaccgccgacggaaaccttatccttggatacggaaacatcggtcttgttgaggaccttcttgacttccttcttgagatcctcaagactctttttgatctcatcttccttttcggaaaatccggagagcgagtcgaggagatcgccgatctgagcttcggcctcactgtatgtagtgccgacaagagcccaaaattcggagttctttgcatcctccgcgagagtggtgaaatcgaaaccgtacgcgctgtcgccgaggagtgagcttgaaacggcaagcttcgagtcggctccgtagatgccgaggtcgatcttctcacccatcagctcgacacttgcgatgtcggctgccttctttgcttctgcgtctatgtagaatctgttcgaaatatttccgatctcatcgtttgagtaggagatctcgaaaagaccttttttgagcgcagcctttaccggatcgaggggagagattgaatttacgacgtttgtcgcagtagagctggtagaggacatgagctgttccgtggggtcttcctcaaccttcttcacgctgagcgcgtcgcacgacgtcatgaggatcgccatgcagagaagaacggcggtgaggatcacggaaatgcttcttttaatctgcataaaccggtaccaaacctttcttaaattataaaatgtatttcaatccggaatctcccggacggaaaacgtgatttacaaaaagatacaaactaattatactccgttttgacttgaaagtaaatagctttcgtatattttttgaccgaaatcttttccgaagccgttttaccgtcggtcaccgcggcaatccctgcaaaatgcacgccgcatcggtgaagctgcaaagcatcgcagacacgcgcctcacggaagcggcacattacgaccgcagcttccgcgcaaatccggaaaccccgtgaatccgtaatcgctcaccctcactccgcaattgcgcaaatcccgcgtctcttgttccgcggccccgtaaatcccgcgaaaaaaggaagcccgcaggcttccttttttatcatgcctcagtcggcgatttcgatgagctcctttgtggagtgggtgaaattgagaattccgtccacggtgacgagaaccatgtcctcgatgcggcagccgtacttgccctcaaggtaaattcccggctcgacggtaacgacatcgccgaccctgagcaccttgcccgatgcgttcggcgaaagattcggggattcgtgaatttcaagtccgactccgtgaccgaggctgtgaccgaacgcatccttgtatcccgcaccgtcgattatgtcgcgtgcggcggcgtcgatcttcgcgcagtcgtctcccgcgcggacagccttcagccccgcctcctgcgcgcggagcacggtgtcgtacaggcgcttcatttcttcgtccgcgtgtccgagcacaactgtacgcgtcatgtcggagcggtatccttcaactgtcgcaccgtaatccatcgtgaggaatcccggctcgagcaggcgctgcgcgggtgatgcgtgaggcgaggacgaggacttgcccgatacggcgatcgtctcgaacgcgatgccgtccgcgccgttcttcttcatgaaatattcaagctcgcaggcaacctccgcctccgtgcgggacggatttatgaatccgaggatgtggctgaacgctgcgtccgcgatatcctgtgcagccgccatctttttcacttcgtcctcgctctttgtccgtctcagctcggtgagcagtgcggatacatgcgcgaattcgcagccggagagctcatttttcagacgctcgaattccgagcagatgagcgtggcctcctcgtatccgacatataccgcgccgcattcggcgatgatctcgggaaggtattttatcattgcacccttcggctcgatcacctcgaacgagccgctgcaaagacggcgcgcgttctccgcatagcggaaatcggcgaagagatacgctttttcggcggtgatgaagatgcgtccgtcgggatttgcgaatcccgagaggtagaggtgattttcgggcgatgatatccatgcggcgtcgaccccgtgcttttccatggaagctctgaaggcttctattcttgatttgatatccatttttatctccgtttcccggcgcgctttcgctcaggcgaagaggctccgttattttttcggttttttttgccatcggacaacgttccgtcggcgcgtcggcggaatttccttatgtaaggcttttcgagaagcctttttgcgcggaagaacagcgaggtcttgtcctttatcggcgggacgattatcaccggaattccgaatctgtgcgcggcggcggcatccgtcagaagctgatctccgagcgcggcgcagtcgctgcgctttactcccagctccgccgcagcgagcgcgtagaatctgccggacggcttttttgcgtcggaaaacgcgacgtatccgagatcgcggttgaattccccgacccgctccggatgattgttcgacacgaacgcaatcttcactcccgccgattccatgtcgcggaaccatcggtgaagcgcggcggtcgggcgcgcgtcgtcgtatgtgacgagcgtgttgtctatatcgcatatcagagcgcggacgccgatggatgagagaaattcgggtgtgacctccgaatatgaagcaaacatgaagtcgggggtcagcagcttttcaaatatcatatgtaaaaaatacgcctttcggtgaattttttgcgtcagcctcttcggcggctttttcgcattcccgcgccgcgcgagtgtttcttcgccgcacggttttttgccgctcaagcggtttctttcgccgacgcgcggctatattacaagtccgccgtttacgccgagatcctgtcccgtgatgaacgacgcacagtccgatgcgagaaatacgacggcggcggcgacctcctctggttttccgagcctgccgagcggcgtttcctccgctatcgcggcgagagtatcggcggaaagggaagagttcatctcggtgtcgatcgcgccgggggagacgcagtttaccgtgatccccgacggcgcaagctcctttgcgagagccttcgtcatgccgatcagccccgccttggcggcgctgtagtgtacctcgcacgatgcgccgacctcgccccacattgacgagacgttgactattctccccgatttctcggatatcatagatcgggatacctcgcgcgatacgcggaaggctcccgtgagatcggtggagatcattctctcccacatcccgtcggtgatgtcctgaaagagggaaaattccgcgatcccggcgcagtttacgagaacgtcggctccgccgaggacggagagggcacggcggaccgcaccgacacattcgccgccgtccgagatgtcggcacggatgcacgacgctcccgtttcgcggcagagcgcgtccgcactttcggtgcggcttcggtagataaacacgacccggtcgccgagtgcgcggaacgcgcggacgcatgcggcgccgatcccgcggcttccgccggtaatgagtacacgtctgttcatatcgtaaattccttcggatgatccgccttattttatattttcgcttttctgccgtccgcggcggtcggtgaacggtgaccgtatgctgcggagtgcgccgccgcataatcttcggatgatcgccggaacttcttcggctgctttcggatgatgcagcatctgcgtcacgtcaggcgacaagctcgggctgaggctttgaatcgaccggagcattcggagcatccggaggcgacggcggacgcctttttttgaacgggagcattatcagattcaccgcacactgtacaagcgccgccgctgcaagcgaggtgaacgccgtcagcgcgaccatgacgggaaaataattgagccttgtgggaatgttcggtatcgcatcgttcaggatgcggtagaaatagttgtccggtatccatgagagaagatatgcgccgagcgtgatcttcgagataaacgcgatcacggcagacgcgcgcttcggcacgtccggatagcgaatcgagtttatgaagagaaagagcagcaccgcacacacggtgatctgaagcgagggataatcgcaccattcgccgtatttgaatttgacggtcgccgttttccatacgttgaatattccggagagcagtatcgccgcgagataggcggcgaaaagcgccggtgtcttcagctttttcatatcgacattcctgcggatatacgcgcctatgaaataatatgtaacggggtagatgtttttccaccagtccggaacgatctgagtgaaggattcggcgagccacggtcggatgagtgcgccgggcgtcttgaaatcgtaaatgttgaatacgctcggcagcacggtcagcgcgatcattaccgtgaccagcgagagctgaccttttctgcttccgattccgttccacagaagattaagaaacgggatcatgagcgcaagcccgatgtacatttctatgtaccacgaatatttccggaaatcgagaacattgcggataacggagccgagggtctcggtctcgccgtttacgaaaatgccgtacacgattatgataacggcggttatgacgtaggtcagaagtatcggaacaagacgcgagtaatatttcagaagaggcttcggcgcaatttcgaccttcttttccgagctgagatagccggtaaggagcaagaacagcggaacgcaggtcatgaacataacgcggatgaacgtcatcaggtacatgcgttcgccgatgatcgcctgattgtagtatttgattttgaaaagaaaatgtatgcacggaacctgaatgaaagcgataattcgcgtgagatcaagtccgatgtcgcgcttcgaacgggaaatcgccatttttcgtcacctccgcgactgtatgtgatagaagggggaattgcaggcgtcttttgcgcacggcaatatgacttaaacttccgctgcgtcagtgcgcatcaccgtccgcgaatctttcgcagatctcgtcggcgatgtcgtcgctgcttcgtattctgccgtcttcatcggcacatatttcgaatgcgtttttgttccgccggaaccacgtcatctgccgcttagcgtaccgccgcgtcgcgtttttgatctcctcgaccgcttcggcaagcgtgatctcgccgcgaaaatacggaaggaattccttgtacccgatcgcctgggacgcgaccgaatccccgacgagctttcccgcatcgtaaagcgcgcgcacctctttttcgagcccctgctccatcatcagatcgacacggctgtcgatccttcgacggagaagctcgcggtcctcaaaggtaagcacgaatacgcgcgcgtcgtacggcgactccgccgccacgcttcgcctgtcccactcggtcttcgtgatcccggtcgtttcatatatctcgatcgcgcgaatcacacggcggacgttgttcgcgtgcgtcgccgctgcgcttgcggggtcgatcgatgccaaacggtcatggagcgcctttgctccgttttcctccgcgaagcgtgaaagctcggcgcgaagctccggagaagatgcgctgtcggaaagcaccgtgccggagataagagtgtcgatataaagtccggtgcctccgcagagtatcggcacggcacctcgccccgcgatatcggctatcgcgtcggcgcacattgcggtgtaatccgcgaggtcggcgcccgccgaggctggatcgagcacgtcgatcagatgatgcgcggcgagcgcgcgttcgtgcgcgtcgggctttgccgtgccgatatccatgccgcggtagagctgcatcgaatcggcggagattatctcccctccgagcctcagcgcgcaccggatcgccgccgcgcttttgcccgacgcggtcggtccgccgattacgagaagttttgttttcaattgaagcctgccttcggcagtgcggacaaatgccgctctgcctgattttcagatgaagaggacggcgcgaccgtccggatgctttccccgatatcggaaattaccgcatcggaaaataccgcgcatcggcgcagcctcgggaatttccgcggcttttctcactttgccgcacgcttcttttacggaaacgcttgtgcgcccgagcaatccgcgacggtgcacaggcgcagcttatgcgcggcgatatccgtttacagctcggctttcttttcgtctccggcaaaacgcttccacagcgcgtttacgataacgacgccgagaattccgaagaggattccgagtacgaccgacgtgaacacgtcggaggggaagtgcaggtataagtacatgcgcgagaatgagataagtaccgcggcgacgagcgcgattattcccgccttgcgctcacggaggaagagaaccgtcgcaaactcaaacgaagcgatcgtgtgcccggacgggaacgagaaatccttcggccgggagacgagcaattccaccgcacggtgcgtgaacggcctttctcgcgcgacgagcggcttcagcgtcagattgcagacgagcagcccgaggatcagcgcgcatccgatcatgagtccggttttgcgcgtgcgcttgaagaagagcatcacgacggctatcgcaatgaacagaattccgccgttgcccagcgcggtgatgaccggcatcaccgcgtcgaggaacgcacagtgcagattgtcgtatatgaaatcgagtatcgccagatcggcgccggttattgcagcaagcatttccttatcctttatgcgttgtttatcattccgcagatcttgaacgtgccgtccacgcggcggaagaatatcgttgaatcgaaatagtccttgtattcctgcgcgcctgcggtgagcacatgggtgaaggatacgcggcatgagaatacgtcgtcgctgtagccgtagaattcgccgacgaacacatcgtcgaagcggtatccgttgtggtcgataacgaacatcgtgagcgaggtgcgcgcgctttcgtagatttcgctcgacggatcgaagtactgcgagatgccgccccaccatgagtcgttctccatgtacttcgagtattcctcggcggctttgagaacgtagtccttgtgctccgccatgagagcatcgtcaaagaggggagagaccctgtacattttctccgattcgacgtattttacttcggacgcaagcccgtcgggactttcggaggtgatctccggggtttttatcagtccctttacggtgtatttcgtgtattttactccctcgacgccctgcggcagaagctcgtcgccctcaccggggatgtccttctgcgtgacctgagcttcgcccagctcaacggaattcacaaacaccttgtacgtctcgggtgccgtgaccgtcacctcggcggtgtcataataaaggacaaagtcgccctcctcatatttgacccagccgtgcttcgatctctcggcgctttccttgagagtaaatgaggatatcttgtagtcgttcaccttgacgatgtaggtcggagcctcgccctgcgcggcgccggaggtacaggtcatctcggcgccgtcgtacttctcatgcaggaaggatgcgacatccgccgcacttgcaaacggattttctgtcgcgcatttcgccgcaagcgtgtcaaagtcgtgcgaggcgtaatactttgcgaaaatctcgtcggcgacgttcttcggctgtacgctttcgtactcctcgagcacgccgttgagcatccacagacccacgccgacggcacagactgcgagcatgagcacggagaaaaagattttgtagaataacggaagggtgcgctttgccatttgaatctgtatcctttccttatggcttgactatgaagtacgtcggtatgcggcgcgggttggtgaacgccttgtacttgttgacaagtcccattttctgatattcgtcgagctggctctggtcaatgttgtatttcgtaaagtagtcgcggtagtagagcatcgaggacgatccgccgtcgagcattcccgcggttaccgctccgtagctgatcagcgtgtcgatgatctcgttgcgcgtcgcgcccatcgagcttgcggtgcgtccgtccgtcacgaggaagatcaccgtgccgtcggcacactgaccgatcgccgtgcgctgcgcaacgccggtgttcgaatcggcatagtagtaggtcacgttcgtgccgtcgttcgttatgaggacgtttccggtctggaaggaaaccgcgtcccgcataccgagctcctccgcctgcgcgtaggtcgtgccctcggcaacgtaaagccggttgtttttgtcgaatcccatgaacgtgcgcgaaagcccgtcgttccagacgcaattgccttcggaataggtaagccccatcggagcgtatcctgtcccgacgccgccgtcgtcgcggaattctcccgcattgattgcggcgaccgcattgtatttgtcggcaagctcgaaaatgcgcattcccgcggtcgcgtgtgcgaaatcgttgcttgatactccgacggtcacgcgagccggatcctttatgagaagaacgtatcccttgaaggttgttccgttcacgttttcgtagatcatgccgtcgattgcgtttgcccatttatcggcggtcggggtgtcgccggctccgtcgcccgacgggatatcggtgatcggcttgacgtcggtaacgacgacctgactgtttttctttatctcctcaacggtatcggatgagagaaacagccccggcatccacttggtcgcgctcgcctgaagcgcggacatgaccgccttgtcgcgcgcggttttgctcggtccgttcgcaagagtattgcagacggcgagcagcgagccgacggtgaacagtatcgcggtgagaagtacaagcagaatacgccgtattacgcatccgacggtcatgcggcgctttgcgccgcggttcgatctgttttgtctgccggaggtgtatacggaggatgagcgcgcgccctcgctgcgcgcattgccgtagtaggggcggcggtcg

SEQ ID NO: 4091 - DNA, 13254 bp, Unknown
  16S sequences of unknown bacteria
cttaatatttcctgccagggggcttttttgtactgtccgcacaagatggggcagttcagcagggcacaatgctttttattttcctttggagaactccagatagagagcccggatggcttcttccatatgttcttctcccacgcccacccaggtgctgatctcgctgatgccttgatggatcatggccaccggaatattccggctctgcaaggtctggaaaatccggctgagggtccggtggttatgaggcacgccgtagcccaccagcacaatacaggcaaagccggtgtgtacctccggcggctggacagcgcccagaacggcggctctggcggcgaattcctcttcctcgtgctcatattccccgctgtccaccaaaaagctgatatgggcgccgctgacggccggagcctgggggtccataccgtgagcccgggcggcccggaggatcttctgggcaaacgctccctgctgggggtcctccccctccagcagcaccaggctataccccttccgaccggcaatgccggcaaaaatggagaagttctcccgcttcaccgctgtgctggtgatcatggtcccgggatgatccgggcggttggtgttgcggatattggtggcgattcccgcccggctcaccgggcctacgctgtcctcatgaagcaccgtggccccggcgcaactgagggcatacatctcatgataggtcaggtggcggatgggctgagggtcctgaacgatccggggatcggccatgaggaaaccggatacatcggtccagttttcatagacctccgctcccacggctcgggccgccaaggccccggttacatcgctgccgccccgggaaaagaccttgatctgtccctgagggcctctgccgtaaaatccaggcagcaccaccggcacccgttccagcaattcctgctgcaaaagggagttggtctcctcttcatccagcttgccgttgtcatcaaaaacgatggcctgggccgcatccaggaaggaaaagcccagatattccgccagcagctggccgttgacaaactctccccggctggcgcagtaatccggaccggccccccgggcgatctgttcccagatctgctggaagatgccgtccagatccagtgtaagccccagatttccggcaatctccccatagcggccccggatgacctccagcaccggctggaagggctcccccttctgccgggccttgtggcactggtaaaacagatcggtgaccttttcgtcctggggaaagcgtttgcccggggccgagggcactaccacctgacggcggctatccgccaaaacgatatcccgcacccggcggaactgggcggcgtctgccagagaactgccgccgaattttgccacgatcatctgcttcacctcgtaggcggcgccggtttggccgccggggatttttgttttgttaagacagccggcctttgaaatcctggtatccgaaccggcggatcacctggatgctgccgtcctctttccgcagagcgatagagggcaagcagatgccgttgaaggtgttgtttttcaccatggaatagatggccatatcctcaaacaccagcttgtccccttctttcagaggatggtcaaaggaataatcgccgatcacatccccggccagacaggtgctgcccgccagccggtaggtataggccttttctcccgcctccccgctgtccatcaagggggggcgatagggcatttcgatcacatcgggcatatggcaggccgccgacgcatccagcaaagcgatctggatgccgttttccaccacatccagcacctttgtcaccaggtagcctgcataataggcgatggcttctcccggctccagataaacctgtacatcgtatttttcccggaaggcccggatgcagtcgatcagggctttccggtcataatccggccgggtgatatggtggccgccgccaaaattcacccatttcatctgatggaggaaggggccgaatttctcttccaccgcctgtaccgtctccaccagcgcatcgctgttttgctcgcacagggtgtggaaatgaagtccttcgataccctccagctcttccggctggaagttcttccgggtgacgcccaggcgggagcccgcggcacaggggtcataaatgccatgctcctgggtggagtgttccggattgatgcggatggaacagctttttcccgctttcagtgcccgctcccggtattttttccactgggcaaaggaattgaaggagatgtggtcgcatacctgcaaaatctcctcaaactcctcctccacataggcagccgaaaagatgtgggtctccccgcccatctcttctttgcccagcttggcctcaaacaggccgctggcggtggtgcccgccagatactccccgatgaggggataaaccgcaaacatggaaaaagctttctgggccagcaggatcttgcagccggcctcctccgccacctgccggagaatggtcagattctcccgcaggcgcttttcatccaccacataacagggggtctgcacccccatcaggcctttgtccattagtccaccagcaccgggttaaagttctcggtccagggcaggccccatttgttcagagcatccatgaagggatcgggatcgaactcttccatgttccatacgccgggcttattccaggtgccgttcatcaccagcatggcgccgatcatggccggcacgccggtggtgtaggacaccgcctggctgcccacttccttatagcactcctgatgatcgcacacattgtagagataataggtcttttccttgccgtccttcacaccctggaagatgcagccgatgttggtcttgcccacggtgcgggggcccaggctggcgggatcgggcagcagcgccttgaggaactggagaggcacgatcttgtggccttcgtattccaccggctcgatagaggtcatgcccacattctccaggcacttcaggtgggtgagatagctctggccgaaggtcatgaagaaccggatgcgcttgatgccggggatgttcagccccaggctctccagctcttcgtggtgcagcaggtacatatccttgtggcccacctggtcaaagtcatactcccgcttgatctccatgggctcggtctccacccagtggccgttctcccaatagctgcccttggcggacacttcccggatgttgatctcggggttgaagtttgtggcaaagggatagccgtggtcgccgccgttgcagtccaggatatcgatataatggatctcatcaaaatgatgcttcaaagcataggcggaaaagacgctggtgacgcccgggtcaaagccgctgcccagcagagcgcagatacccgcttccttgaacttctcccggtaggcccactgccacttgtattcaaacttggcggtgtccagaggctcgtagttggcggtgtccacataatgggtcttggtggccaggcaggcgtccatgatggtcaggtcctgatagggcagggccaggttgagcaccacatcgggcttgtatttttcgatgagggcgatcagctcgtccaccttgtcggcgtccacctgctcggtgtaaatcttggtcttggtggtaccctccagtttttccttcagctcgtcgcacttgctcttggtgcggctggcgatgatgatctcatcaaaaacctcgctgttctggcagcacttatgaatggctacgctggccacaccgccgcagccgatgatcatgcattttcccatggttctctctccttttccttggatgttaatggttgtgcagaagctgcaacaggatttcccgtgtcaccttgcaggccacggcggtggatgtgccgctgtggtcatagtgaggggaaagctcattgatatcgcagcctacaatgtccagtttatgcagaagcaaaatggcttccatcagctctttgaaggtgatgcctccggcctccggtgtaccggtgccgcagaaaatggaggggtccagcacatccagatccagtgtgaaatacaccggcttgccctggaggcgctgtaccgtctctgcaaagcccttcagatcaaacttgtgcagatgggtgtgctctttggcaaattcaaattcgtatttttcgccgctgcggatgccgaactggtggatgcgtccatcccccagcagcttccaggcgtgatacagcacggtggaatgggacaattcttctcccaggtactcggtgcgcaggtcggtgtgggcgtcaaaatggatcacatgcaggtcagggtgcttgtctgccaccgcttccaaagcacccagggtcaccagatgctcaccgcccagcatgaggaactttttcccgtctttcagaatctcctcggtctggctgcggatcatctccagcacccgggatgtgttgccaaagggcagctccagatcccccccgtcgcagatactgcaatcggtgaggtccttatcgcaatagggggaataggtctcgatgccaaagctctcattccggatggccgaagggccgaaccgggtgcccggccggaaagaggtagtgccgtcaaagggcgccccgaagagcaccagatcggcctgatcgtaatcggcgtcacaggccaggaaggtctggatgtttttattcatcggccaaaagctcctttacataattgggaagataaaaagctcccttatgcagctgggaattatagtagcgggtgggaatgcgcagaagctcccaccggctctcctgttggtcctccagagggtccagacccttgctggcaaagccaaagagccaatggcccgaaggataggtgggaatatgggcctggtacacccggctgacggggaaaacccggctgagccgcttgtgggcctggtgcatttcctgagcatccccctcatagaaggggctttcgtgctggttgatcagaatgccattgtcggtaagagcccggtaacagtttccataaaattcccgggtgaaaagcacttctcccgggccaaagggatcggtggagtccacgatgatcagatcgtattcattttccttccgtcggatgaatttcaggccgtcctcaaaaaacaggtttacccggctgtcggaaaacccacaggcggtctggggcaaaaacttgcggctgacctccaccacccgctcgtcgatctccacaatgtcgatctggcggatctgagggtatttggccagttcccgggccacacccccatccccggccccgatgaccagcacccgggagatccccgggcaaacggcaaaggcggggtgagtgatcatttcgtgatagataaactcgtccttttctgtcagcatcataatgccgtccagagtgagaaaacggccgaattccggggaatcaaacacaccgatggtctgataatcgcttttttcaaagtgcagctgactggtcaccttgatggaaaaacgcacatttggcgtgtgatattcgctgtaccaaagatcgtccatctcattctcctttcagcacattgagccgggtcacatccatgctttccggcccggtgagcacgcagcccttgctcttggcatactggatataatcgatgatggcccgggtgatcttctcgccaggggccagcaccggaatgcccgggggatagcacatgacaaactcagcgcacaccttgccctcgcactcctggagaggcaggctgattttgtcggcgtaaaaggcctcctgaggggtgcggatcacttccggagtgatgtattcgtcctccagcatccccttccgctcttttttgtaaaggcggcggatctcgctgagggcgctgatcagccgttcgatgttcttggtcttgtctcccacggagatataggccagaatattccccagatctccgaattcgatctggatatcgtattcatcccgcaggatgtcatagacttcgatcccggccagacccagccccagggtgttcaccgacaacttggtggtgtcaaaatcaaagatgctgtccccgttgaccaggtctttggaatagacgaaataatccccgatcttcccgatctcctcccgggcgtagccggcaaagcgctctaccttgtcgaagatctcctgtccccgggtggccaggttccgccgagaaatgtccaggctggacagcagcagataggaaccgctggtggtctgggtcaggttgatgatctggcgcacatagtgggggttgacatttttcccacacagcagcaccgagctttgggtcagggaaccgccggatttgtgcatgctcaccgccgccatatcggccccggcggccatggcggaaatgggcatattccggccgaaatagaaatgggtcccgtgggcttcgtccaccagcacccgcatccccttctgatgggccgcttcggtaatggacttgagatcggaacaaataccgtaataggtgggattgttgatcaaaatggccttggcacccggatgacgctccatggtggcgcgcacatcgctgagggacattcccagggcaatgcccaggtttttatcgctttggggattgatatacaccggcgtagcgccgcagagcaccagggcattgatgacgctttggtgcacattccggggcaggatgatctcgtccccttttttcacattggagagcaccatggcctgcaccgaagaggtggtgcctcccaccataaagaaggcgtgagccgctccaaaagcgtcggcggccagctcttcggcctctcttatcacgctggtggggtggcacaggttgtccaggggcttcatggagttgacatccaccgaaaggcactgttctcccagaaaacgggtcagttccgggtttccccggccccgcttgtggccgggcacatcaaagggcaccagccggtcccggcgcatccgctccagggcttcctgcaaaggagcgcggtcctgatccatcagcctttcacctcctgaaacacattggcgccgctgaagatctcgatcatttcccggcgcagggcattggtgatatccagccgcaccttgggcgggatctcatacacatcggaattgaagaggtaattctgcagcacgatgtccttgatcagcagcttgctgtggaacatattggcctggtacacattgatgtccacggcgtcgtatttctgcagaatgtcctggctgatataatcctgaatggaagtgatggaatgatcgatgaagatcttttccccttccatgttccgggtaaagccccggactctgtaatcaatggtgatgatatcggagtcaaagctgccgatgaggaaatccagtgtggacagcggggtgatctggccgcaggtggccacatcgatatccacccggaaggtggcaatagaggtctccggatggtattccggataggtgtgcaccgtcacatggcttttgtccagatgggccaccaccgtctcgccgctgcggtttttcaccatgctctcctcggcgatgaggaaggtgacgctggccccctggggctcatagtcctgcttggagatgttgagcaccgtggcgccgatcatctcggtgagacgggtcaggatctcggtgagacggtcagagttatattgttcgttgatatacttgatataatcctgctgctcccgggctgttttggcataacagatgtcgtagatattaaagctcagggacttggtcaggttgttgaacccatacagtttcatttttccgcccatgacgcacctccgaaaaaaaagatgtaccacagcgtactgcggtacatcttgtcaaattggccagcaggcaggcgccttgggggaaagcccctgggccgcccttttgatttttagagtctgtatagtaagaactacttttactactcttattgaccatttcacaagcgtgtaccctagtacacttttggttataaagtaaccaactggcaattaagttgccaacttataaaagctgcgccaaagacgcaatcaatagatgtgggaaaccccacaatcggcagttgaccgggctgtccgtatggccttgcatttcccagaatcaggaaatcggtccaagtcgttcttgctatatgcaacgataacactgaaattataagtttaaaatcattttttgtcaaggcttattgaatattcccccgaaaacccatgcttttttaaaaggaaacggcccaaacgggcatcggtctgctctccatggagcagggcggcctgaccggccatgaacacatgatgaatcccttcgggcttctggaaggggttttcataggtggctttgtcggtcactttctccccgtcaaacaccgtgatatcggcctgcattcccggccggagaatacctctgtctctcagaccgatgatccgggccgaaagaccggtgatccggtgtaccgcttcctccagagtgcagaatcccttctcccgggccagacgcaaaaagcaagggaaggtgccgaaattccggggatggggtttgccttcgttttcttccggcgccaggggcagggacacgccatcggaaccgatggcaaaatccttttgggccagcatataatccacatcttcctggcacatggcaaaagaaatacaggtggcctgggcctgggtctccaccgttactcgggcgatggtttcggccatggacagccccagctcctggctgagctgccagatgttcttgccgtccgccgggggataccgtccctcggtggtgaccacataaagcccttccccgtcttcctttgtggaaaaacgctcttccagctggcggatgatctctccccgcttttccgggtcctgcaagatagccacagccttttctttacccccctggatggtccacttggggaaggaattggtgatgccggaagaggcggccagatagggatacagatccaccgtcacatgaattccgtccttctgggctttccgcacattatccacaaactccggcgccttgccccaggccgcccggccgctggctttgaaatgggcgatatgcacatgggccccggtgcgccggttgatctcgtacatctcctccagggaacggggcgtacccaggccctgatcccgcatatgggaggtaataatgccctgatagcgggccaccacttctcccaaggcgcacagctcctcctggtcagaggacacaccgggagtgtatcccagccccagggacaggccccaggctccataggccatatcctcatccagcagccgcttcatctcctccagctcttcctttgtggccggccggtcctcataccccatcacgccgcagcgcaaagcgccgtggccgatgagcggcaccagattggtacccatctttttgccgtcccgctgtaccttttccaaaaactcaccaaaggaagctgaagcatagtcccgcactgctgcgtcggcaaagccccgtatgcgctccatgtgctccggcgggcagggatagatggtggaaccgcactggcccgccagttcggtggttacaccctgatagatccgggattctccccggtcatcccggagaaaataggtatccgagtgggaatgaatgtcgataaaccctggggccaccaccaggccctgagcatcgatcacctgtcgggcctcctctaccggaatatggggttcaatcgctgcgattttctcccctgtgatggctacatcggctgtaaacccagcctcacctgtgccatcgatcaccgtaccatttttgatcaaaagatcaaacatttttgccctctccacctttcttctgccgatttttccggcgcttgagatcgatgcggccaacaccgcaccaacacgccggtttgcggtttattcactaaacattagcatatcacaactttcccttagcgtaaagcaaaggctgtgggattttcccggcaaaaatcagttcatttcccttcaaggccacaatggagtacaaaaagtcccctgccatggctgctttttgcaagccatgacaagggaccatacatccatcattttatcttttgcttttacaggctttctccgcccatttcttcgcttttcacctggttgcgtacccgcacatcgttgaggaacagggccgtgctgatatccagatgaggcaaaatgctgaaataaagcaccaactgggccagcaaagtggcactggtggtggctgtattcagatcaccaccggagaaaatagaacacaccactgaaatcaaaatggcatagcccaaaaattgcagcatggacagcatctgtattcctacatacttccaataatgaccgcggaccagccgacggctttcccggatacagctccaaggttttttctccggctgctgggccagcagataaggcgccggcaaaaagggaactgccaccagataggaaggaacaatggtgaggaacatcagctgatatacttgcatcagtccttccagctgcttctgcacatcagcgctttgcaaattggccacatagtccatcccggccagataggcgccgccaaagatcaaaagaccaaagaccgctccgatgcacaggaaaatcaccgactgaagcagctgcaacagaatggactggcggatttttctggcatctccataccaggccaacacctttccagccttggtctcccgactggaagccacatcgcacagcacctctttgcttcccacattggccggggagaggatcgccaaagacaacaagctgagcaaaagagtcacgatcaaagcccgcaaaccctgcgtgtcgctgaaaaggaaggtctgctgcaacacgctgaaggcaagggtaatcaccaaaagaatacccatgctggccatgcaggtgccgtaattttgacgcatcagcccgcgggccatgctgcggatatagaaaatgctgagtttcattccatttcctcctggggtgtctctctatctgggcatccgctatgagattcagggtgtgggagtggtttcactgggggtttgtgttggttccgtcggcgtggtaggctccggcgtcggttcgggcgtgggctctggtgtcggttccggtgtgggttccggagcaggcgcaggcccttgcagaatcaccttatccacacgcttatagctgctgttgttttccagtgtccggctgacttccttgccgtcgatgtacaccacccgataagacaccgtcttatacccgggataaccgccatttttaacctgtgttgttcccggggccagagaggaatcctcctggtaaatcacctggaaaggatcataggacaaagtctgggtgacaatctccaccttcttgttctgggtctgtgttcccagcagagaaaccgtcaaggaagaacccttggtataagccaccactttgatgggataattggtattgtttttaaaacgatagtccaccgctccataggccacagtagcgtcctgtcccagcggcacatagctcacatacaaactgtggtttttccgctccacgatctccagatcggcccgaagggtggccacatacagagtcgaagacacctgacagatgccgccgcctacgccgtcctcagcgccgccattggcaaagacggtagcatccttaaagcctgcggcataagtacgggggcctactgtatcattataagaaaatacatccccagggttgaggatcgttccattgatcttctgagccgccagtttcacattggtggtacgccctgtaagactggcattgaatttggtggtactgctgcccagagtgtcccggaaaagcacactctgcagctcttctgtggtcacttccggctcaatcagctgcaccggaatctgcaccatccgctcttccgaagcatccacagtctgctgagcctgggccgcatcaaattccgctcccgactgggagggaacgatggtatttcccgaaggatcgttagccaaatccagataggcgctgtgggcctccactgacaactggttatggatatcctccatgctcaccggactgggctctactaccggagcggtgtattccaccttgccctccgagccttcccgaagatgcttcagcaaaagctctgtcaggtcctctttgtccacctgatagccggcctgccctttgtccaccaccagggtttccccttctagggtataggtgggttcgatcacctgctggctcacctgctggacaatgggatccatctgatccagcacttgctgacgatccacatccaccacaatgtccacctgagctccgccaaaggacgcctgggcaatctggccaatccgatgaaatacattgccttctctgccataatcccaggcattttccgccgtctgtttcaggttataggcggcattcatctgactgatatccagttgatgttctgcgccgttgaccaccatggtcacattcttcagaagatcctgtttttgagcatactcctgctccagggctgtctgtgcttccttctgcttcatctgccccacagagagatctcccacctgcacaccggggtagatgccctgataaagaaacaggactccagccaaagcaatgcaaaccagcaccaaaagagctcctgctccaatggcggctattcctaggggtttacgaaaaaaaggacgctttccatcagcgtatttccccgatgggctttttccttgcgcttgattcattttttcttcctgggtcacttgggccattctgcaccctccacttcataagatccgtcaacaggacgggcttctgccttccattatatgcttctcaccccacaatagcaattacgaaagggtaacaatccgctttttccggctattttcccggattttttacacttttgcaggcaaaacttcactctatttttcagaaaagaatgaacttttttctaatttttaccacgctctatgtaaaaaacaagacaggaacaatcctgtcttgttttttgtgtaagcaccgacctattttcccaggccgtcgccagccaagtattttcggcactcgtgagcttaacttctgtgttcgaaatgggaacaggtggaccctcacggtcattggcacttactattcaatttatattattaaccccgaagggataataaacttggtgacccgtaggagaatcgaactcctgtttgcggcgtgagaggccgccgtcttaaccgcttgaccaacgggccacatgctgcatttatatgaagtccgctcgctcgcagagcgagcggacattcatgctggtgcaccttcagggactcgaacccgggacccactgattaagagtcagttgctc

SEQ ID NO: 4092 - DNA, 5783 bp, Unknown
  16S sequences of unknown bacteria
atctcttcccaggatcgacgccaggtcaaagcggaatccatctacatgataagcgacggtccaatagcgcagacagttcaggatcaggtcccgaaccatcggatgattgcagttgagcgtattgccgcagccgctgaaattgtaatactttccatccggcgtgagcatgtaatatacattgttgtcgatccctttgaatgagaagaacgggccgcgctcatccccttctgcggtatgattgaagacgacatcgaagatcacccggatgccgtgatcatgcaggctgcggatgagccttttcagctccgttccctcccggttatattcgatctccgcgctgtagctcgtgttgggcgcaaagaagctgaccgggttgtagccccagtaatccagcagcgtctccccgttcacttcccgcatgccgcgggtctcgtcaaactcaaagaccggcatgagctcaacggcattgatgcccagatcttgaagataggggatcttttccatgatgccggcaaacgtgccgcggtgcgtcacgcctgcgctttcatgctgagtaaagccgcgcacatgaagctcatagatgacgcagtcttgcaatggcgccatcttctgacgcggcacattccagacaaaatcatcatggacgacccgggccttgtaaaacgaatcatccgacagctgcacgccccacttgctctgtccggtgactgcccgggcatacggatcgagcagataccggctgcggtcaaacagcaggccccgatgcggatcatagggtccctccagcgcataggcatattcaaacttatccgccttcaggccgaagacgaagatcgaccatacgctgcctgcccgatagctttccgggatggcgatgcgtgcataaggttctcgcccctgacgatgaaacagcagcagctcgcatgccgttgccgagcgagagacgagcgtgaaattcacgccgtttggcatggctgtcgccccattcagctcatagaagccgggacggacctggaacccgctgatcacatccagcggcttcatgttctctctcacttcctccagcctgtctcgtccatgaaacagcgccagctcttcgcgctcctgcatcatgagcgcatgattcttctctttgttcatgctgcacctcctgcttccattgtaccgcgtcattgccggacaatgatgtgattcggaaagaagtcatcgtttctccaacagctcgatcagcaggatgaccagcaggcagaaagcatagagcagatgccgctttgtccgatgctgcctgaacatcaggacatcatagatgatcgcaaagatgccggccagcatgatgaacaacaggtcagcgggcaatggcgcgccaaagaccgtgatctgtccgccgatcgccccgaaccaagacagcaggccgatgatgagcatggctagcgtggtcactccgctcacatcatggagcaccttttgctgcagccagcgttcacgctcatcgcctttgcgatgatcatgctgggcgcggcgcatcaattcatctttttccatctttattccctcctacatgatcccagtgcacaggcggacgatccagatgatcagcgcgatgccatagagcagcgccagacacaggctcagcttccggtgaaacaacacggcctgcggtccatgatacaacagcatgtacaggctgaatggcagcatcaacgcatcgttcagcgaaacgagatggccgccgatcacgatctctccgtccaccgcgcccagataagtgagcaggctcatcaccagcacgatcgcggccgcgctctgtgcagcagtgtggctgatcttatccatgatcagcttctcccgctcatctccgtcacgattatcttcctgcgcgcgtttcagcagttcttccttttccatgacatatccctccatttaccaagttttcttatcatatccagcatagcacattcgccagatatgtcaagtatacttgtcaataagcatcgccgttaagcgattttaccccctttcgtcaagggagatgtcaccatcctattctgaacgaaatgactttctgtacggtgagatgtagaccttgcatcttgccgttgctgaacctctggcaggttgatccatgcctgctgaacgacagttcagatactgctatgtcatcctgccacggtagtcagagatagaaggaaaaggtcatcaagtatcgcgaatgatcaaaatgagctatatgaaatctaaatgatctttgtgctgaaaagaaagctgcttcatcatcacttgtccaccttttcacaataggtgacattttcctttaacgttaacactgcttattcctacttttcttttgcgttcagccgatagcccgcgccccagaccgtttcgatgatgcgcggatcatgcgcgtcatcttcgatctagcgcatgactttctgcgcagatgatctttccattcgtttctccatcatgatcctcctttcgcgcatgacgttcttcattcagcttagcgtcaaaagttaaacgatcctgatgaaaaagttagacttttcttaaacgatgaaaaaaggcagccctcatgactgcctggcgctcaatctttcgctcagctgcatatagtgccgatacagcatgccgaaacgatagcggtagcccggatgccacggcttggcacggccgcagaaatgcaggatggcagtatgtgtcatcacccattgcagatcttgtctgccgccgctgcgcatcatgtagctgctgtaattgcgcgcgtcataattccacaaagcgtcctccacttgcaggacatgatcgccgtagcacatgttgagcacatcctgatctgggaacatcagctctttttcatgcgcgcggacaaaagcgaacagctcctgaggccggatgcgctgacggcatgctttcaggttcatgagcaggacgccggaattgaaataatcatgatcgaccttcagccggatccggttgacgctgttggacagctcggtctttcccgtatgggccgcggccgcaaacagatgctcccccaattccagatcccacagcggcgtcagcggattgatcaccaggatgtcaggatccagatacagtactttttccagctgcggaggaagcagctcccctgccataagacgataatacatttctctgggatagcggtccgtgaccggagcatcccggaacagctcatccgctacggcatgcggataaaagcgaaagccatagcgcgcgcagcactcagcgatgctggccaggctcactgcgctcagcgaacgatgcagcagatgcaattcatgatcccgaaaaggatcgttcagatacaccgaagtgagcatcacgcgcagctgcggcacatatccttcgtctaacgaaaccagcaggctcgtcggcccttgtctttcctcttccatgtctcttccccgctttctcatgtctttattatatcatcggcctgccgtcacaaaaaaggggcagaccacatgatctgtcccacgctgctcactctgcgaaattgccggtatacagctgataatatttacccttggccgcgatcaggtcatcgtggctgccgcgttcgatgatgcgtccttgttccatgaccatgatgcagtcagcattcttgatggtagacagacggtgggcgatgacaaaggtcgtcctgcctttcatcagcgcatccatgcccgcctgaacgagctcttcggtatgcgtatcgatggagctggtggcctcatccaggatgagcaccggcggatcagcagctgccgctgaccctgactcaggtttgcgccatccccgctgagcatggtctgatagccatccggcagccggcggatgaagctgtccgcattggccagctttgcggcatcgatacattcttcatccgtagcatccagcttcccatagcggatgttatccagcaccgtaccggtaaacagatgtgtgtcttgcagtacgatgcccagcgaacggcgcagatccggtttgcggatcttgttgatgttgatgccgtcataccggatcttgccatcctggatatcatagaaacggttgatcaggttggtgatcgtcgtcttgccggcgccggtcgaaccgaccagagcgatcttctgccctggctgcgcatacatccggatgtcatgcaggaccatcttgtcttcttcatagccaaagtctacgccatcaaacacgatgccgccttccagccgctgatacgtgatggtgccctcggccttatgcggatgcttccacgcccagatgccggtgcgctgcgcggattcgcgcaatgtgccatcctgatcttcagtgacattgaccagcttgacatatccgttgtctgtttcgggctgttcatccagcagggcaaacacgcgctgcgcgcccgcgacgcccatgaccacgaagttcatctgctgagagatctgcgtgatcggctgggtgaagttcttattcaggccgacaaaggcgatgacggtgccgacgctcatgccggcgccgccatacagcgccagcagcgagccgatgaccacacagagcacatagctcagattgccgatgttggcattgatcggcatgagcaggttgacgtagcggttggccttgtctgcgctttcccgcagctgatcattcagcttcttgaagtttgcgatggctgcttcttcatgacagaacactttgacgaccttttggccatccatcatctcttcgatgtagccatctacgttgcccaggtcttcctgctgtttctggaaatactttccggacagtccggagaagacggtcgtgacctttaacatgaccagcgccatgagcagcgtgacgatcgtcagcggcacattcagcacgatcatggagatcagcgtggctgccagagtagcagcggaattgatgatctgcgggatgctctggctgaacagctgccgcagcgtatcgacatcgttggtatagaccgacatgatgtcgccatgcgcatgggtatcaaaatatttgatcggcagtgattccatcttggcgaacagttcatcgcggaagcgcagcatcgtgccctggctcacattgaccatgatccggttataggcataagacgcgatgatgccgatcagataaaagatcacgatgccggcaagggcgcgtgccagcggcgtgaagtccggatcttccgcattcagcagcggcacgatgtaatcgtccaccaatgactgcacgaacagcatgccttgcatggtcgcgaatgcactgatgatgatgcagacgaccacgacaaggaaagaaaagcgatagtttttgatcatataggaaagcagacgcttcagcacatagagcgatgctttccggttactttgttctctcattgtctcaccctccttatgcctggtcaaagtcgccgccgccctggctttgcagctcagcgatgccgcgatagatcgcgttggtcttcagcagctgctcatgcgtatcaaagccgctgatcttgccgccatcgagcaccaggatgcggtcagcgtcctccacgctggacactcgctgcgagatgatgatcttggtcgtgcccgggatcactttgcggaaagcgtcccggatcttcgcgtcggtcgccgtatcgaccgcgctggtggagtcatcgaggatgagcaccttcggccgcttcagcagggctctggcgatgcagagccgctgtttctgaccgccagacacattggtgccgccgcgctcgatccatgtctcataacgcttcggcatccgctcgatgaactcatcggcacaggctgcgcggc

SEQ ID NO: 4093 - DNA, 1649 bp, Unknown
  16S sequences of unknown bacteria
ccccctccttttcaaaagcttttcaacttcaagttatccggtggagagattgtaccgggtaaattcatcgggatgacatagggatatacggctgctccggcttcacgctcgcgtaggcggggcggattatcctgccgttattctggatctcctctatgcggtgcgcgctccaaccagctatacgggcgacagcgaaaagcggagtataaagctccggcggaagctccagcatctgatatatcagtcccgaatagaagtcaacatttggcgcgacgcccttatacatccgccgcttctccgcgattatcccgggcgccagctccgcgaccgtctcatagagattccagtccctctcgcgccccttctcgaccgccagctccttcgcgcacatctcaagaatatccgctctcgggtcggacagcgaataaaccgcgtgtcccataccgtaaatcagccccgcgccgtcaaacgcctgcttatcgagcagtctcgcgagataatccttgacagcgtccctgtcctcggtatttatagtattcttcatgtcctcgaacatcctgacgaccttgatattggcgccgccgtgtctcggtcccttgagcgagccgagcgccgcagatatcgccgaataagtgtcggttccggacgacgtgacgacgtgcgtcgtgaaggtcgagttgtttcctccgccgtgctccgcgtgcagaacgagcgcgaggtcgagtatcttcgcctcgagcggagagaactgtccgtcttcacggagaagccgcaggaagttctcagcggtcgaaagctccgggtcggggaggtgaatgaagagactcttaccgcggtgatagtgctggtaggactggtagccgtagactgacaggagcggaaatacggcgatcagctgtaagcattgccggaggacgttcgcgaccgagatgtcgtccggcgtttcgtcgtaggcgtagagggcgaggacgcttcttgagaggatgttcatcatgtcgcgtccgggggctttgaggatcatgtctcggacgaaggatgtcggcaggctgcggtagacgccgaggacttttttgaagtcgtcgagtttttcctttgtcgggagttccgagaagaggaggaggtatatggtttcttcgaagccgaagcggttgtcctttctgaaaccggcgacgaggtcgcgtacgttgattccgcggtagaagagttcgcctttgcaggggatttcggagccgtctggggcggtttctttggctttgatgcgggagacttcggtgaggccggtgacgacgccgttgccgttgatgtctctgagaccgcgcatgacgttgtgctccgggtacatttccgggcggatgtggttgttcgcgcaggatttgtcggcgagcgcgcggacgtatggagttatctccgaataattcttaacggtatactttttaataagaccgcctccttgagaaatttgatatttacatgtattataccacaatttctataccacaaaatgcacacaatgtaaacattctgccacgttgccataaaaaaatacagttatgaaaagttttgaaaaggtgggagggaggtgtcggagggagggcggaaaaactttttcaaaagttttcccccgcgctctcccgtgtgccacgcactct

SEQ ID NO: 4094 - DNA, 4357 bp, Unknown
  16S sequences of unknown bacteria
cccccgccgcgccctgctcaagctcggcgtcgactaccgctccaagacctgcacgctacgcgacagttccgacctcatgtccaacctcaagtccgggatcatcctgctgcccgaggcgtacgagggggtcaccatgctgcgcaacacgggccgtgcggtgataccggtccacgggatcgtcaagcgactcgtcgccgtgtgccgcacgggaagcggcatggcggaggttatctcgtcgctcgagctcgggaccctgccctaggaccttctgccggccagatcacccacctcaaatctgcatagctgtgccgtcagatatggaatgcccctcccccatttccttgcatcccttgcatcatggcgggcggggcagatcgactggcagacggcgataatcgaatcagagggattgggaaaagagagaaacgaggcgattatcatggaagtcctgacaaccatcttgacggtcatcggcatcatcttgctcgtcatcatcgcactggcgatctgcatgctgatcggcatccactgcttctacctctggggcaagaagtgctacgcgacgcccgaggagtgcgcgctcgcctaccccggcgacgagctcatggaccgcttcgaccagagcaagatcgagaccgtgacggcggccataaccatcgacaagccggtcgaggacgtgtacccgtggatctaccagtggggcggcacgaagagcggctcgctgtcgtccgaagtcctcgagcgcttcttggggcgcatgtccatcttcaaccgctacgagctgtgcgaggagtggcagatgcccgactcgttcatgcccggcgacttcatggactgggaccgctcgggtatgggcagcgaggcgaccgacgtcgtcgccgacaagtacatcatgtcgttttccgatatgaagcacccgccacgcgcccgcggcgcctacgccatcgccggcggcgactgcgacgacatgaacttcatctggggctggtacttcgtcccgctcgagggcggcaagacgcgcttcctgtgccattggaagtactacggcacccaaagcggcgccacgaggttcgcgctgcgcaactccatcctgaagtgcggcaccgccatgcagcgctggcagatggagtacacgaagaaatgcgccgagggcaccatgcccgtccacaagcacgtcaagcgctaccgcaagatcttcggacggtaccactacgcgcccgacgaggtccaggagagcttcgattgcccgcagatccgcgacgggcgcgagaaccccgcggtcaacgaggtgcgccccgcccgcatggcagaccccgcctggccgcccgcagacggcccctgggccatcgaccgggagtactaccgcgagcgcattccccgtgccatcgcagagatcgaggaaaaggcggcaaagcagcagcatgcggccgagctcaagatcgccgcgctcaaagaggagctggcagcgctcgacgagtagcgcttgcgagctgcgccgcgcccgagcacgggaacgcgcagggcagacagccacgaagggcagtccggaaagcaccgggctgcccttcgtgcatgaacggggttctgaggcgattgcggcaggcgcgagaggcggtcctgccaccgcgcgtacggctagatgaggcccgcctcgtagggacgattgcactggggggcgctgagcgggcagttcttgtggcagagcgggcaggtgccagacgcgccgttggaagagccagagcccgaaggcgagccagagccgccgcccgtgccggagccgtccccgtacgtcccttggcccaaagtccccgaagagacctcatgaccgcggcgcctgcgctcccccgtacccgagccgctgccggtaccgccgccgttcccattcgaagcctgggacccaaccgatacgagcgcgtctcccgcagcaccaaagcccgtcgcgcccaaggcgacgacgccgacgaccgcgaccgtgttcaccgcagccccgatggccttgcggcgcgccgggttgtacgggaccttgaagacgctcgcgacggcaatccagtgcatggccaggtggacgacgacaagagcgcacatcaggtacgagctcgcgacgtggacgaggtaccatacctcccccgtgcccgcaacggccaggctgatgcccgccgaggacaggacctggctgatcatcaaggaactgaccacaagggcgatcatggcgagtgcgagcaggatgcccatgatggcgagcagccagcggcgcgccgtcatgcgcttgcccttgatcgccgcggacgtgcccgctatccacgcacgcgacaagacgagatgggcggcgatgcagataaagaacacaaccccgagcacctcgtgcaaaaagtcgccggtcagctggaagaacatctccacgacgagcagggcggacagaatcgcatcgaacgcgatgcgggctttgaacgtgtgcggtttcgagctcacgagaggtgcctttctcacggggagtcttgcttaggatgagaccatcctagccgcccatgctgaaatctacctgaaagcacggctgccgaaaccgcccggcccactcgaataccggcagcgccacgacctcacatgcccaccggaaaaggctcgggaaacaaaacggccccgacacgaagtgtcagggccgaaagagacggaatgcgctttccgtctggcaaatccatggtgggcaatactgggttcgaaccagtgacccccgccgtgtgaaggcgatgctctcccactgagctaattgcccatgtgcgcgatgatgatatcacatcatcacaagaacaaaagaaggccgctcatcgcggccttctgaaaatgctggctccccgggtaggattcgaacctacaacaactcgattaacagtcgagggctctgccgttgagctaccgaggaatctcgtgcgcttgcgacgcaagacgttagtatagcgaaaagcctttcagatgcaagtgcctttttggaattctcttaattcgcgtgcaggtactcgttgacgtgcttctcgtagcgcatcgtcgagcgtgggccatgcccggaaaagacgatcgtgtcgtcgggaagcccagaaagcttgtcgcgcatggacgcgacgatgtcatgaaagctcccgccctcgaagtcggtgcggccgaagcagcccggggcgaacaaggtggctcccccgaacaagacaccctcggacgcgcagtacaggcaaatcgagcccggtgtgtggcccggcgtctcgatgacggagaacgtgcactcccccacgctcacctcgtcgccctcgtgcagtaggcggtcgatgtgcggcgcgccgtgcccgcgcgcgatgtcgtggccgccatcgacgctttgcccgtcgacgcgcggcgcatccaccgcagacatcgccgccggcgcccccgtggcctcctcgagcgcagaaagcgcgctcacgtggtcgaagtggcagtgcgtgagcacgatctctttgacggggcgcccgtcgagcacctcgaggatcttgtcggcatcgtcgccggggtcgatgacgatcgtctcgccggcgtcttcggcgatgtagcagttggtctggatcggcccgaccacgagattcgtaagcttcatgttcactccctgcgatagatcgcagccgcagtgcctgctagctgcgcttgctcttcttcttggacttggggcggtcgtttgcgccgggcatcatgcgcgtcgcgtcgaacacgccgtcgatcgccttgatcgaggtgatgatcgagccgatgcgctcggtctcgcctacctcgaacaggaagcgcatctcgacgatctcgtctttgtgggtgttcgtggagctcgagatgatgttgaccccggcgtccgcgagcgtcatgacgatgtcctgcaggaggcgcaggcggtcgatggcctcgacgtagatctcaacctggtagacgctcgcctcgatctcggactcccacgcgacgtcgatcatgcgctcgggatgcttgagcaggtcggccgcgttcgggcagtccgcgcggtgcaccgagacgccgcgcccgcgcgtgatgaagccgatgatgtcgtcgcccggcagcggattgcagcagtgcgagaggcggacgtacacgtcgtcgaggcccttgaccacgacgcccgtcttgttgtgggcgctgcggcggctgcgctcctgcggcgagcggggctttgccgtgatgttcgagccgttcgtcaggtagagctggtcgatgaccggcttgtcggcctcctcctcgacctcggcttccttgttcatcgcgtggatgatgcgatgggcgagctgcttggcggagtacttgcccgagccgacggcgacgagcagggcgtcggtgc

SEQ ID NO: 4095 - DNA, 4221 bp, Unknown
  16S sequences of unknown bacteria
accgattgtgtcccgttttatgagcttctggaggtgttggcagaggaagtggctgtcagcacctttgtaagccgcgtgtgccgtctgacagggagaagaaatccgtgcttttttcaaagtggtcatagagaacggtttttggctatgggagagaagtgtaacagagccattgaagaagcagcgacctgttctgcggtctatcttctttccgcagatcgatttttgtgtagcagagctttagcggcaattgaccaggaggggattcatttttccaaaattcatatccacggtgttgatttggatggctacgttttgtttcatatggcaagggatctgtatcagggaagcagtcatattcgtttatcagaacttacagatccagagttggtgagcgaccgagtatttgaatggattatgacggcctgtgtgattcgcaggcatggaagcagagttttacgagaggaggaaagaagtattgacaggagtaaaatcggacagcatcagtgaaaaaacaacggagcgttctgtacttcggtttttcagtcctttgatagctaccatgtatacaaaagatgactggggaaatttggaggaatacggagaggaggtatttccagctgagttgtgcagctatgagacggagatcctgaaacggattgcagaggaaaatcttgaggaagaaggagatagggggctggcggtctatctggatgatccaaagttagaagaaaaaatttacagtatgaagcctaccgtggaagtctggcggggggaactatggggagttctggaagtagaaagtcataaccagctttctgaaagggagattgaagcagtaaaggagtactgggaaggtcaggaaagtgatgggtggggagaaggatttgaacagcggggaatcaaaattccagagggagaactgtatgtcagcttttggaacagtggagatgaattctttctgaccacagaagaaggtttgaaaggagaagagcaggaaccagccgttcagaaaggagggattgtttttggagcattatgatggagaattttatacccttcgattgttcagccccatagaaggagagatatattctctgaatagtacagaggaaggtattcatctgaccgcttatgagatggaaaactattcgtcttttatacgcgaccatatggaaggtgtaggattgttgggaaaaagaaatcagaaattgatgacatactttaataatgcaaagaggctgcataagccggttagcctatcactggatctggaagcttatgagggaagattatggagtgtactgcaggcagactcacaggataaactgacacatgaggaggttcagagtttagcagaaacatggggaatgattgctgctggaggctttatcagagaaatgcaagagacaaggatcctggtaccagatggagaacttatggtttttcttggaaatgagggactggattactttgtatgtccggaagaggttttgaaagggacggcacatacattaaaaccagccctggatgttgccatttattcagaagcatatttcccagagcggagttatcaaggggcgaagctgaggcttccagcagaacccgcttttttgaaggatgcaaagatgagagcctttattcatgaaaatgagccttaccggattgaacttctggggaactggccatcttttcttaagaatatattggaaaaggcagcgtctgttaccttagaagaagtcaatgtattagcttgtctggttactcatatggactccagtcagatagaaacttatgaagccgccattcagatgcgtcaggaagaaaatatagatgttccagttgggataaaagagttactcaatctttgttataacctggagtgctttaaattcctccgaggcattatagatgacaggaaactgggagaattctacctagaggaagacagattagagtggatccatatgcttgaagtggatataagagaattattggatccgcaaagagtggggatggatcagcgtaaggaggaaatgggcatatttacctcaaaaggttatgtatttgagaatgctctttcgtatcaagatatttatgatggaattcaccttcccgatattgacggagtggccggagggattttttctcttcgcctggtcggatctcaatatccagaagaacagggaacctggttggaacttccaactacagatttggggtttcagtgggcgctgaacagattaaacgagagaacttttgatgactgtatcattacggagagcatcagcacagtgcatggattatccgttaagcagacagatgacattgagacattgaatgaactggcaagacagcttcaggaatttcctgatgatagaacgctttgcaaattcaaggcagctttggaactagagcaatgcgatagcttggaacaggctcttcggattgcggaaaacctggattgttattcctatgatccacagatgtattccatggcttcgtatgcaaggtatctgtttcgggaattggagttcaatattgatgatccagcatttgctacatttgattttcaaggatatggggaacgtcagcttgggctgttggaaagtgtgcagacaacctacggaatgattacccgtaatgaagattttccaatacagacacagcagaacacagaacagggaatgaaaatgcagtaagggaagcgttgaacgtgcttgatgatcaaatggaggaaactaataagaatgaggtgtgaaggagaatagaaaatgacatatgaagaatttttgaaattaacaaaaaagaatttaaaacgattttttccggaatcttttcaggaaagaaaagtggaaatcatggaggtgttaaaaaataacaacatcaaattgcagggagtataccttccaggcactaaaagctatacatccgttccgcttttatatctggaatcctattatcaggaacttgaggatggaaagaaactggaggatgtgtggcagaaaattgctcaggattatcagaagtgccaggaagcagagataagcatagatggcatttcaagcagggaatgggattatgaaacgataaagaagagtctgaccgtctatgtccgcaacgcacaggaaaatatagattttctggcaagctgtcctcatgaaatacgagaggatctggcactggtttatggatttcatgtgttggtggatggagaaaaggccggaagtgccattattaattatgacaggctgaggtggttgggagtcagtgaggagcagttaaagcaggatgcctgggaaaacatgaagcagagcaatcctccttgttttttggatttacaggatatgctggcaaaaatgtattctgatgaactgggagatgtaaaagcaggtagtttggaatatttagaggatgtggatcccaatgcaatgatgtatgttctgacgaattcaaattaggtcaatggggcggtttatatgtgtgacgaagaagtgatgtctcttattgcagaaaagctgggatcagatttgatcgtgattccgtcatcgattcatgaaacgattattctaaaagaaacagagaatgtaagcgtaactgaactgaatgcgatggttgaagctgtaaatgaggaagccgtgaccccacaggagaagttggggaattcagtttatcgatttgatagggaagcccaaagactggaaaaggcagtagaacaggcagagaagctggactttgaacctgggatgtcaccggtattttcgtaggactcagttatatgtttcatgagtattgtggatgttaggagggatgcagaatcaacagttttatttcatgggttggcggaaagaaagcactccgcagcctgatttacacaatgtttccggcaaactttgatcgttacattgaagtgtttggcggaggtggttgggtactgtttggaaaaccaccagatgaccggtgtatggaggtttataatgactataactcaaatctggcaaacctgttttattgtgttaagaaccgcacgggggcattccttaaggaactcggatttcttccgttaaacagtagggatgaatttacagtaatccgtaaatttattgaaaagcaggaaccggatacccgatttttaattgaggagttggaacttgcagagaagtatttgctgccgccggattatgaggaagtgaaaaaaatcctgctggaaaatgcagaggtaac

SEQ ID NO: 4096 - DNA, 2474 bp, Unknown
  16S sequences of unknown bacteria
cacccgcttgtcaaaaagacttttttgacaagcaggcgcggcacgatggccgcgggcgtagcaataggcgcagcccgctgggcaggtgccatatgtgccaatgtccacgctgggcgcgcagccgcagccggggcgctggtttttgtcggctttggcgggcaggccaaaatccgcggcgttcacgcaatgcgcctgcgtcaggggtagcccctcttcgcagcaggcgcgcagaggcaggcggcaggcgtccgcgatggcttgcaactgctgcgcaagggcttgccgctcttccagcgcgatgtcccgcgcgccgcacgcgcgcaggccgcgcagggcgcagcggtaaaaatccacaaagctgatcgtgcagccccgcgcatagggcgcgatggcgcgcgcgagccgctcaaaggaagcaaggtgccgctccgcgggatacgcggcgctgatgaggatgggatcgtagcgccactccacgcgctccgggccgaaggcgtccgccagccgcttcagcgtttccagccgcgcggcttcgctgggcgcgccgggttcgacgtccgccgcgtaggcgttcagcgtaaactgccacgcgcagcggtagggccgcagcgctttttcatatgccagcagcggcgcgggatttttcgaccagaacacgatgccgtccaccgcctccggccgtaaatccacccgccgcacctggcgggggttcatggggttggccaccatcgcaaagccctcgcgcagccgctccatcagccagggcgcgtggtaagccgggatgtctgtgcggcggctggcgctgatgatcatgcgctcaccttggcgctttcgcgcacgaccgcgccatccgcgatttcgcaggcgccggaatattccacgcggtcgatttcgcagtccgcgccgatgcgcacgtcgcgcccgcgcacgactttcgcccgcgtggcctccagatcgatctggctggcctcgatggtttccacggacaagcggcccgcgcggcgcgcgccattcaacaggcgggataagaaggtgttgacggcggttgcgcttctatatatgcgcacgctttccccgccgatttccccggcctggcacgcgccgcccacttcgatttctacctgctccgcgttgagcaagccctggatggcaaagccgccgtgggtttcaaaccgctcgcattccacgccctcgtccaggcgcagggaaccggccgcccgcagctgctgaatgcgcgccgccttgcaaatgtgcgcgctgccggaaacgcgcatttcgccgcaaacttccatgccgccggcaacgtgcgcgctgccagatacgcgcaccgcctcggcgtggacatcgccttccacttgcaaggaaccggaaacgtggatttctttggccgccagatcgccctttgccgtggccgcgccggacacgtgtacgtcctcctggcaaacggcgtcgccatcgatcttggcgctgccggagatgtggatggattcgtattcgccgccagggagatgaccggcgccggagatgcgcgccacgcgcgtctgggattcttctttcatgggttttcctcctcgtcaattttgttgagtacgggcgcgtaatcgcgaaacatgtcgctgagcggcaaagaatagagaagctgcgccccgcgcgagggcaacagcgcgtcttccgcgaaaatgagcagcggcaacggttcgccctgccagcgcaaaatggcgatttgcccccgctcggccaggagcgtgttgccccactccagcatgccgcgcgcgatgtccagggtttcgtcctccgcgaggacgcattgcgcgcgcgcgccagacgccaccaacaggcatagcgcttgcgcatggttccactcttccacgcacagcgcccgcgccagggcgctggaaaggccgctcgttgccgcgtcgagcgctttggcgggatagcgccggttttctggattgggcgagagcatttccaccagttcccgcagcgcgtagcggtctttgttttccagaataaaggaaatacgctccagaacgcgttcacgggggaaaaacgtttcctgcccggtgaaggccgcccgcttgatgaaccaatcgtctggaatcagcttttcgcgcttccagcggtagagctggccgtaggatatgcccgttttcgccagcaattccttcttggagatccacttttccatgcaaaaccccctttcacagttagtataacaaaataatgttacggagtaaatagcaatattacacatttaaattcatataactttggatgatattaggtgttgacaaggggacctcattttgctataatagcacacgccgccgaaaaaacgggaaacgctgagaaaaacggcgccggacattcggcagcgatcgacccttgaaaacgacatagtgagaagaagaaggaagagaaagaacagtcagattccgaaagagttaaacaccatgagagtgaaagcgaagcgc

SEQ ID NO: 4097 - DNA, 7411 bp, Unknown
  16S sequences of unknown bacteria
aggatattcacaccggtccagcgccatacacacagcagcagcagtgcgcaccagccggtcgacttggatctcagccacggctgagacgcctttccgagtgcattcatgataacgttcagctgtccgttgtctccctctgagaacatcagacggaacagcagaccggaaataactacggatgtcagtgccggaatgtacatgatgaccttccatacaccctttgcctttgtcagacggctctcaagcagcacagccagaagcatcgggatcggcaccatcagaagcagtgtcagcaccatatattccaaactgtttccaacggcaatacggaacaccttatcacccaacagctttttaaaatgcttggcacccacccatttcattccgccgaacgatacgtcctggaaactcatggaaataccagaaaccagcggatacaaccagaaaatcagcaggctcagcacaaacggaaccacaaacacatatggtgcgatcttctgggaatacaataacttctttgcttttttcacaatgtattcctcctttcacatcttcacatcaaagaggggcggtccgggaatgcaattcccttgacctccccatatcatttcatattactgatttaatgcgaaccgcctatcagccgatctcgctgtcaattgcatcctgtgcctcctgaagagcatctgcaacatccgcgccatcaacgaagatctcgttcagggtgtaggtattgatctgctcattcagtgccggagagttagcggtcgtgtagattgttccgatcgcatcgtttgctgccagctcattcagaacctcatacggctttacacggaagaatgtgttgtactggttggactcgtcatatgcgaatgcctcatcagaccacagagcctcattgcaaacgtcaaatccaaggtcgttccagatgtgcttctcaccgtcctcagagcacttagcccatgcaagccactcagctgcaagctccggattctcacacccgtttgttacaactgtaccggtaccaccgataccaacagaacacttctgaccctcttcgaataccgggcaggttgtgatatcccatttgcccttttcatccggcatgtagtttgtgaaacggctcatgtaccacattgccttcgggaaggaagcgatcttgccatcaacgatctgtgcacggcatccgtctgtatcggtatgtccgtcagtagagatcattgcaataccatcgttcagccactcctgctgcatggtcagcatcttctgtacagaatcaagctgtacatttacctctgcatcctcgccaaggccgccggtccagtcctcaccgcactcagccatagccagccacagccagtctgttccgcctgtatcaacagaagtcaggtacacttcaccattggaagcttccttcagctgctcaccaagtgcggtataatcatcccaggtctttacagacttataatcaaggccatactgctcaaagatcgctgcattccagtacattacggtagcgcctacgtgtgtcggaacaccgattcttgcgccatctgctctggagtatacgtccagacgagcctttacaagagaatcctcatacggagcaagtgcctctgtcatatcatacagcgggcaatcctcgccaacgtagttcgggaactgaccgatctcgatatcacacatatccggtgcaccgctgccagcctgcaaggacatcatcagcttattgtgcatgtcagtgtacggataagtgctgaacgtaatctggatctgcttgtccgggttctgcgcattccactcatttaccatgtttgcgtagaactcattgtgcacgtctacgaatgaccacagctcaaagtgtgtaccgtcttccggtcctacggtggtgactgcgctcggagctgcctctgtctcttcctaagcgaaagcaaccgttcccatggatgctaccatagaagcagcgaggagcattgtaagccatttcttcttcataaagatcctccttcttggtacaatttgcacatacgactgtttcgattacttcgaaaagcctttgtgcatcctgtacactttttttgtgttgtttaaaatttctagtcataatatacaacatttccagcgcattgtcaattataaattaaattattttatgattttctataattaacaaaaagtccgtccgctattgtaaataatacccctgtgtttttgtgcatgatgctcaaacccaacttttgtcttttatttttccttaaaaaattctctgttttctttacttttttctaaaattcaattgcgttttccgtggttttattttaaaatttataaacagacacaaacatgagaaagtaagaaaggaacaacatgcgttacattaacaatctttccgaagaactggaggtcttcaaagcactcggctcagaggtccggatctctatcctgaatctgctgctggagcgtggcaaaatgagcatgaatgagctcgcagagcagctcgatatcacaaacggtgctatgacgaatcacatccgtaagctcgagagtgccgatctgatccgggtcacctctgatccgaatgtccacggcaatctgaagctgtgcgagccgcatctggacaagatcctcttcattctgaaccgcggcatccagtacaataacgaatataagtcttatctgcgcgccggacagtactcctcctacgaggtctacccgacctgcgggatctccaccacctcctctgtgatcggcgaagtcgatgacgcccgttatttcgcacatcagaagcattttgaggcggatattctctggttttccagaggctatgtggaatatcagattccgagcatcattccctatcacaacaaaatcgaccagatttccatttccgccgagctctcttccgaggcacccggcagcaatgaaaactggccgtctgatatacatttctatctgaataatacatttatcggcgtctggacaagtcccggggactacgcagatgtacagggactgttcacgccggactggtggtttgccaactggaaccagtacggtctgctgaaaacgctgaccatcaaccgcaacggcgtatttatggacaatgaacgcctttccaacgtaagtatcgatcagctgcacctcgattaccgggacaagctcttcttccgcatggaggtaccggattccgccaagcatatcggcgggctgaccgtgttcgggcgcggcttcggcaattacaatcaggatatcgaattccgcattcaatatagtccgcttcctaacgtattacccgagatgaggtagtgccggtacatggcaaaaccgacatggaagctttactcgtatgagaataccggtgtgccatcctccgcccactttacttccataatcatcgcatggcggtttggattgtaaagcgggtcaccgatgatctccgtctcagtacgggcatgatagatcatcagatccttactgccgtcctcagacttgacaaagcaattgtgacccggtccataaatttttctggacgcatcagaacgaagaaccggatagcgggattttttccaggaagccggatccagaagatctgcatcctcgtctgcggtcaacatgccgacgcaatagtcgatgccggtctcgcttgcggaaaacgtcaaaaacagctttccgtcatgcttgagaaggaacggtccttcatttacccagaagcccacacgctcccagtcatagtccggtgtcgtcagaagcacctgtgcagtcttaagcttgtacggactctgcatttttgcaatgtacagattcgaaatcttcttgccgacgccgaccttctccgcccatacatagtaatgctcgccgcggtgctcaaagaccgtcgcatccagtgagaagtcctcaaaagaaaactcatcgtcatcacttctctgcattttccctttctctacccaggtaccggtgatcgggtctgcatctgcacactccagcacatacggacgaatcgcccatatatcgtcgatatcgccgccggcaaaataaatgtaccatttcccgtctaggtaatgcagctcaggcgcccagatatgtacgctcatgatccctttgtcatgttttttccagatcatagtctcttcggcatccgccaggtctgccagagtcgatgcgcggcgcagcgcgattccattgtactccggaagcgatgcggtaaaataatacatcccgtcggtatggcggtacacatatggatccgctctctgaagaatccacggctcattgtatttcagttcttttgtctcgctcattatttcctccttcacgcacaatactttatgcatttttaaaatattttaagtaactgtaaacattatatgcataatgttcacctatttcaatcattttttatttttttgtcagtcttccataaattctagtaaaacggacattcgcaatccgcttcgctacttgctcatgaacgcagtcgcttcgcgatctgcgttcaaaaaaattgagccattctgctaatggctcaacttctatttattctgcgccggtgtaatggacgcgcacatgaatatcctgattgtaattgccaaagcccgtaccgtaaagcgctacaccaccctgataccgtccacgcttttccacaccgatacgcagcttcagatgctgcagttcctccgctgtaaaatcgcccatcccgacctccgataccttcattccatcaacgtatgtgccaacgcgtgtcacaacgatcattttcatcagcccgaactgccgctctcgcccataccaccaggccggggtatagatgcccttgctccactgaaactccggcggcgtcacccacgtggcaattttccgctcattcagataaaaatcgatctccgcttgactgtccggaagcattccgacccgatccggggaaatctcaaaataaaacgttatctgattcatcttctgattcgccgaaagcatatttggaatccggtattccacatagccctctgagaaccagagcagcccggcctgcagccggtccggcagtgcaaagtaatgtgtgtcatcttcccggccgatcatactgtacacactgcatagtccgcacggagcagccacgtcaaacgcatcgaaatatccgatctgaagctcctcatccttcacgcggatctcccgcacctcctcggtccgtccgttcaccagaatctggtctaccttcatactgcaccgcttctgatttccgtgtccggtgcactcggtcaccgtgtggataatcccacactcctcaagtctgcgaatatgtgccgtcagcgcaccatttgtcagctccagcgccgacgcaatctcattcatgttcatttccccgcgctcggaaagcagctccacgatccgcatacgcacatccgaccccaacgtcttaaatagttccaggccgtcattcaaatttttaatatgcagcatatcatccccccaggcggatatttgcaatccgctttatttcctgctcacaatcgaatctgcgcggtcagccaccacagtatccccttggccggaatttctcacgcaaaaagactgccgcccaccatcaagtgtctgcggcagcctcatcaactgcaattattatatactttttttatatacagcgcaagaaaaaataaatcggatcatgaacgcagcggtctcgatcagatgcgtgctacgccgctctttcttgccgcttctgcaactgcctttgcaacggtatcctttacacgcggatcaaatgctgccggcagaatataatctgcattcagctcttcgtcgcttacaaggcttgccagagcgtaagctgctgccaccttcatctctgagttgatgtcagatgcgcgtacatccagagcgccgcggaagatgcccgggaatgcaagaacgttgtttacctggttcgggaaatcgctgcggccggtcgatacgactgctgctccgcctgcctttgcctcatccgggaaaatctctggagtcgggttcgcgcatgcaaagataatcgcatcctttgccatcgtctgtaccatctccttggtcagggtacccggtgcggaaactccgataaatacgtctgcacccttgattacctctgccagagtacccttttcatggttctggttcgtgatcttcgccatctcttccttgatcggattcagaccctcacgtccctcatagatcgcaccggtacggtcggtcatgataacgttcttcaggcccatgctcatcagaagcttgatgattgcgataccagctgcgcctgcgccgctcgtaacgatcttgatgtcatggatgtctttcttcacaagcttcagtgcattgatcagtcctgccagcgtgataacagcggtaccatgctgatcatcatggaagatcgggatatcgcagcgctctttgagcttctgctcgatctcgaagcagcgcggtgcactgatgtcctcaagatttacgccaccaaagctgcctgccagcagagcgactgtatttacgatgtcatccacattcttgctgcgtacgcagagcggaattgcgtctactccgccgaatgccttgaacagcacacactttccttccataaccggcataccagcctccggtccgatatctccaaggccgagaactgccgtaccatctgttacaactgctacagtgttccagcggcgtgtcagctcatagctcttatttacatccttctgaatctccaggcacggctgtgctacgcccggtgtgtatgcgagagaaagagcctccttgttgtctacagacgctcttgccgtcatctcgattttacctttcagttcataatgaagcttcagtgattcctttgcgtaatccaatgtgatatcctccttacgaatgctttgtcattgcttttcgattccatatctattctaccgtttttttctgattcgtcaatgttttttttttaacaatctacagaaatccgcattattgagaaaacagagcaaaatcttaacggcatacaaagcccttcgccctgagcatggactcggtctcctctagatattcgcagtggaaaatcaccgactgaccatgttccccgccaaaggaggaatacatataattgatattcacattgctctcggtgcacgccagaagcagcgcatccaggctctccatatcttccacagccacttcgatcacatcataattttttatgagcagtccctgcgcagcaagcacgtgctcagcctccgccggctgatcgacaatcagtctgagaatcccaaactccggggaatcaacggaacaaaatgcctctgtctcgatccggtgctgccgcagcagctccgtcacctgccggaaactgcccggcctgttctctacaaatacggaaagttgtctgatcatatatactaccctgtcctttctgact

SEQ ID NO: 4098 - DNA, 7161 bp, Unknown
  16S sequences of unknown bacteria
gatttatgacataatctattcccatggccgaaagccgcgctttaacctgctcaaaatgctccttgcagtcgtcgcagaggtaatcgagcattatgggagcgtttttggcgatttcgtggcaaacgggagatttacagtcgagaattctcatgggattgcgggaaaggcggtcgcggcaggtgtcgcagagctcgtcctttttaccctcaaaataggccttaagagcctcaagatatttctttcggcaggtcgggcagccgatggaattgagctgaagctcgatgtttttaagtccgaagcgctcaaaggcggtgtgtgccaccgaaatcacctcggcgtcggcagagggcagcggcgcgccgaagcactcgattccgaactgatgaaactcgcggagtctgcccgcctggggcttttcatagcgatagcaggaaagaacatagcttgcctttacgggcagagcgtcgttgtgaagcccgtgctccagcaggcagcgaaccgcgccggaagtaccctcgggacgaagggtgatggaacgtccgcccttgtcgtcaaaggtatacatttccttttgaaccacgtcggtggtgtctcccaccgaacgcaaaaacagctcggtgtgctcaaaaacgggaacgcgcaactcggaaaatccgaaaagacccgccgtttcgagaagtgttttttcgacatactgccatttatagctatccttcggaagcacgtcctgggtgccccgaatggcggtttgaagctttgccataattattcctccgtaagctttataagagtttccttaagacggcgaacatcctctttaagagcggtttcttcgccgttatttacaattttaaaatcggcgcgggaataaaatccgtcgtccttttgagccgaaagcctaagctcggccgcttcgtccgaaaggccgtcccttgccattatgcgcttttttctgacctcgcggtcggccgtgacaaaaagaaccttttgacacattttgtcgcttccgctttcgtaaagggtcggtgcgtcaagcattatgatttttgcgccgtttttttcaaaggcacttattttgtcgagaatacgttttgttatgaccgggtaggttacggcgccgagcatggaaagggagtttgcgtcggaaaaggctttttttgcaagggcgggtcggaaaatttcgccgtccccgccgagaatgtcctcgccgaaccgttcgcagagcagcgccttgacctccctgtcaaaaagcacctcgtgagccaccttgtcggcgtcgatgctgtcaaagccgagcagctttgtgacggtggattttcccgagcctgtctgtccagttacaccaacaatcattttaaagccgcctttcgtcaaatcccgccgcgcgcacaagtcggttgaacaccgcaagccccacgccgttttcgggcgggcaatgggcaaataccgtttgatagtttccgtcgtcggcctttctcagcgcggaaaaaaggcggtgggcatgagccctttcgtcgcccttcggaccgagggaaatcgtcggaaccgacagcaggtctttatcctcttcaaagcatattgcggcgtcgccgtcctttgcgtttcgatttacaaaatccgcaaatttatccccgtccccgtgtatcagaatgaccttgcaggagggggaataatgcttgtatttcatgccgggagaggaggccttttccacctgaatgttgtgaccgaccgacgggtcgacctcgattttcccgatgaccctttcgatttgctcgacggtcaccccgcccgggcgcagcagcctcggtggatcgcagaccattgatatgacggtggactccacgcctacgtcgctttgacccccgtcgataataagcgggattttacccttcatgtcgtgaaaaacatggtcggccgaggtgggactcggttttcccgaggtgttggccgagggtgcggcaatgggcacccccgcaagctctataagctcgtttgcaacggggtgaacgggaaagcgaaccgccaccgtgtcaagaccgccggtggtttctttcgggacgcgcccgtttgacttgaatatcatggtcagcggtcccggccaaaattcctttgcaagcatttttgccttttcgggcacaaaatcggtgagctcttcaagctcgcaaagacggccgatgtgcacgatgaggggattatctgccggtctgccctttgcggcgaatatttttaaaacggccgagctgtcaagggcgtttgcgccgagtccgtagaccgtttcggtggggattcccacaacttcgccttcttttataagctcggcggccttgaaaagtccctctttcggggaaaaaatctgagtttccattatatcatttcttttactttttttatttgctcgagagaacgttcggcaagagcggtatagcgctcttttttgtctcttatgtgggtttcaaggggcggcagcagcccgaaggaggctcccatgggctgaaaatccgagatgtcggggtcgctgatatatctcgaaagggctccgataatcgtttctctcggcagcgttaccgtgtcaagccccgacagccgcctgtaaagatttatgccggccataatccccgacgcggccgattccatatagccctcgacccccgtgagctgacccgcaaagaagaggtcgggacgtttttttgccgaaaagtcggagcaaagcaccttgggcgaatttataaaggtgttgcggtgcatgaccccgtatctgacaaactcggcgtttttaagggcgggaatcatggagaaaacccgtttttgttcaccgaatttaagattggtctgaaagcccacaagattatagagcgttccctcgctgttttcttttctcagctgtacggcggcccacggtctgtgtcccgttttggggtcgcgaagccccaccggctttaaggggccgtagcgaatggtgtcggcaccccgttttgccattatttcaatgggcatacagccctcgtaaaccttgggacggtcaaattcgtgaagaacggcgccctcggcatttataatctgctcataaaaggcttcatactgctccttgttcatgggacagtttatgtaatcgtcctcgcctcggtcatatctcgaggcggcgaaggcactttccatgtcgatgctctgccctgtgacaatgggggcggcggcgtcgtaaaagctcagatggccgagcccgaaaaactcggaaatcgctttggaaaaaccgtcggatgtcagcggcccggtggcaacgacgcagggacgatcgggaatttcggttatttcctttgatataatctcaatgttgggattcgaacgaatcttttcggtgattatttttgaaaaatcgtcgcggttgaccgccaaagctccaccggcaggcacgtcacatttatacgccgtttcgacgcaaaccgacgaaagctcggccatttcggcctttaaaagccctcctgcggcggaaatccgccttgccttgagggagtttgaacagacaagctcggcaaagaggtcggatttgtgagcgggcgagtgcttcttcggcttcatttcggcgagggtcacttttatacctctgtctgccagctgaagagccgcctcgcatcccgcaagccctgcgccgataacgactgtctctttattcatcggtcttttccgccttttttctgcctctcggctttttttcggcgacccgttcatatccgcagccctcgttgttgcagacgataagcccgccgcggcgtttgaaaagggtctttccgcagttgggacaaagctcgtcggtgggcacgtcccatgtcatgaatttgcagtctttatagtcctcgcagccgtaatatttatagccgcgcttggattttcgttcgattatgggcttgccgcatttcggacaggagccctttgccaccgtgacgatggattttgtggtcttacattccggatagcccgagcaggcgagaaattttccgaatctgctgttctttatgaccatctttttgccgcagttgggacatatctcgtcggtttccacgtcgggaaccttggcgtgcttgccctccattttctgctcggcaatttcgaggtttttctcaaagggaccgtagaatttttcaagggttgtgacatagtcgagcttgccctcggccacaaggtcgagatcctcctccattttcgccgtgaatttggagtcgacgatgtccttgaaaagctctcgcatgagccccgtggtcacctctccgagcggagtgggtttcagcgttctcttttcccgttcgacatattctctctttatgacggtggcaattgtgggggcataggtgctgggtcggccgatgccggtcttttccatgacgtcgatgagggtggcgtcgttatatcttgcggggggctgggtgaaatgctgatttcccgcaagctcgcggagcacaagggtgtcgtcctcggcaatgggcggcagcaccgactcgccctcctcgttttcgtcctttgcggtggcgtagacggcggtaaatccgtcgaatttaacggtgtatccgcttgcacggaaaatatagtcgtcggcggcaatgtcgatcgagcgggtcgactgtatgcaggcggccataaggcttcccataaagcgctcccaaatgagcttatacagcttatattgctcggccgtcagcgactccttggccatggcgggggtgagggaaatgacggtgggacggatggcttcgtggccgtcctgcgccgaggccttggttttataatagcggggctttgccggcagatagtttttaccgaaattttcttcgatgaactgattgcctgcggctcttgcctcttcggaaattctcaccgagtcggttctcatataggttataagaccggtggttcccatgccctttatgtcgattccctcgtaaagctgctgggcgatacgcattgtacgctcaccggtcatgccgaatttgcgggcggtgtcctgctgaagggccgaggttatgaaggggggaggcggctggcaggttcttgtaccctttttgaccttaagaaccttatattcggccttttcgagagcctctttaatggcggaggcctcctgctcgtttttaatggcaatctttttgccgtcgatggtggtgtgaagcttcgcggcaaatttcttggacgacggcttttggctcagctttgcgtcaacggtccaatattcctcgggaacgaattttctgatttcttcctctctgtccacgatgagccgcacgaccacgctctgaacgcggccggccgaaagacctcttctgacctttttccaaaggaaggggcttaatttataacccactatacggtcgagaattcgtcttgcctgctgggcgtccacaagattcatgtctatggagcggggggcggccatacccttttgcactccggatttggtgatttcgttaaatgtgacccttatgggagccttttcgtcaagggcgagcagctcggccaggtgccatgcaatggcttctccttcgcggtcggggtcggttgcgagataaactttgtcgctgtttgcggcggcggcctgaagggatttgataagctcctccttgccggcgacgggctcgtatttcggagtgaactttccgtcgagagaaaccgacatcttctttttgggaaggtcgcgtatgtggccgacggaggccattatttcataatttccgccgagatatttttttatgctttttgcctttgtgggggactcgacgataactaaatcggacatatataaaaacttcctttcgtgaaaggtatagttgcgaatttaagacagcttttcaaaccgattgcccgaaagccgcgacacaagaccgtttatttcaagctcggtcagcgcgcacatcaatcggtcgcttttaagcccgcttgagcaaacaaggtcgtcaaagagggcaatattttcgcaaaagctattatacactacacccgcgtcctctgacaagtccctttgcggggcgggaacggtaaattttttgttaatttcatcctttttataagccgagggctcgttatgtttttgctctgctttttttgcaaagcggggcggttcttcggacgcatcgggtgacggaaaggacgggatacttgtcttttccgggcagagctcacccgcgctcaggtctattttaccggggaaaagtccggaatattcctcggcgatgtccgagaaagagaatatcggctttgcgccgtttttaatgagattgtttgagcctgcaaattcggtttctcccgcgtggccgggaagtgcgaaaacgtcgcggccctgttcggcggcaaatgaggccgttatgagcgaaccgcttttctctcccgcctgaatgacggccgttccgagggacagcgccgaaataatgcggtttctcatgggaaaggagaacctttgaaccgccattccgggcggaaactcggtgatgagagcgccgttttgagaaattcttttgcggagaggctcctgtttcataagatagtttgaaagaagtcccgtgccaagcaccgccgcggtccgaccgcctgcgtcaagagcgccgaggtgggcggcggaatcaatgccgacggcggctccgcttattatgacaaagcccgaacaggcaagctttcttgaaatgttaaatgccgaaagactgctgtactttgtgggctttcggctgcccacaatcgaaatcgaaggggtctgtgaaaagtcgggaaggtcgccgagggtgtatagaacgcagggcgggtcggcaatcgaccgcagattttgcggataatcggcgtcggttacggcgatgggtttaatgccggaatttttgcaaagagaggcaacctcacgggcataatcaagcgactcggcggaaattccgccaagctgtttttcggtgaaaagcccgctttgttcaagaatttttctgtctgcggcaaataccgcgtcggcgcttttgaaccgcgcaatgattttgccgatacctttgcaggcaaagccgagagccttctgcaaggcgatagaataaatgaggtcgtccgacaaatttgtcaccccttggtcatttcgtatatgattatggcggcggccgcagcggcgttattctttcagccctgtaggttgaaattatgtccctaaacttt

SEQ ID NO: 4099 - DNA, 7078 bp, Unknown
  16S sequences of unknown bacteria
ggctgaaaaaggacatccgccgtctcgaaaattccgcccggcggacttcggactggtcggatcgggtggagagcagcaaaaacggaacactcaattccggactcaagcaggataagggatatgtggggcataaagcggccaagatgatgagccggtcaaaatccatcgaaaacagaaaaataaaagcggcggaagaaaagaggcagcttttaaaaaacgtagaattgcagaaggaattgaaaattcttcctctcgtctttcactcagatccggtggcagagctgcggaatgtgtccgtggattacggcacggggcaggccgtctgctccggcgtcagcttttccatcaggcagggggagcgcatcgcgctcaaaggcaaaaacggatcgggaaagtcgagtattttaaaactgatctgcggggaggatatctctcacagcggcgaactgaggatcaaccggcagctgatcatttccagtgttccccagagcggcgattttctgaagggaactctcagagagtatgcccgaagccggggaatcgaggaatctctgctgaaatccggcctcagaaaaatgggcttttccagagagcagtttgatcagaatatggaaaacttcagcagcgggcagaaaaagaaagttctgattactgccagtctctgcgagagggctcatctgtatgtctgggacgagccgctgaatttcatcgacgtgatttcgcggatgcagatcgaggaactccttctgaaataccggcccacccttctgtttgttgaacacgacagcgctttttgcgaaaatatcgccacgaagaccgttgagatcagataggatatgtttgctaactgtcactttgtactgaattcgctttgtgaaaaattattttatgaaaaatataggagagaaaaatatgctggaaaccggaaagaaagcgcctgatttttcattgaaaaatcaggcgggggacgatgtcagactatcggactaccgcggcaaaaaggtcgtgttgtatttttacagcaaggacaatacttcgggctgttcagcccaggcatgcgcatataacgagctgctgccggagtttgccggggcgggagcggaagtgatcggtgtgagcaaagattcttgggaatctcacagccggttcgcggaaaaaaaggggctcagatttactcttctgtcagatcctcagagagaggtactggaactttacgatgtgttaaaagacaaaaagaacggcggaaaggtcgtccgttccgcggtgcgctcctcgtatctgatcgatgaaaacggtatgatcacgggagcttacggaaatgtgaaggcggcggaaaatgcggcggatatgctggcggcgctgcaaaactgaaaggagttttttgttcgtgccggattatcgccgtgacttggcgtcaattcattgataaaaaagtgacggattggtataataaacgaaggaaaattttgaaaggaggccattctgatgagacagatggaatattctcctgaatctgattttaatgtgagttatgacggtaaatccatggtgattacggcctgcggggacaaagagtcccgggagatacgcataccgcctctcatcgacggtcagccggtgacgggaatcggaaacggggcgtttacgttctgtcacgaaatgcggagagtcgttcttcccgatacggtgacggtcatcgaaaacgcggctttccggggctgcggcaatctggtggacgcggtattgtccaaagacctcagaacaatcggcgctctgagtttcgcgggctgttcgaagctgaaacgagtgacgatgggaaactgcctggagcgtttcgagatgaattccttccgggactgtacagaactgagagagatcgtcatctggcaccgggagaagcagcagtacatgtcctttgcggtctcttctgaagaggaggcggcgatctggttgtatttgcggggggtgatgagcgctacggctcctcacgacgcctatatggataaatacgacgcgacttttcttgagatcaagggagcgtatgacgtatataatatcgcggtatcgaggctgcgcaatccggtagatctttcgccggagcgaagaaagatttacgaaaacgccctgagcggcgcagtgcctcagattatccggcaggaccgggtggatcagctcaccgccatcggcgagctgggatgtatcagagaggatgccctcgaagaatatatccatacggccagccgtatcggcggcggatgcatcgcatatctcctggattataaacacagaatcgggaaaaatacgggatatgatttttctctgtaatgcgggttcctgcgtcttgtttcaaccccgaggggacggcggctttgcggaaaaagtaaaattttccgccgcgcgcggaatggatgcgggcggcggaattatagctccggttttaaaagatgcggaaaatggtgagaaatatgtctgatgcaaaaattatcaacgaaaagaacaggacggagatgaaaaacggtgccgcagagcgggcggaagctgtcagagcggaagccgacagaatcgcttcgcagattctgacgcttacgcgaaacggtcttttcgtctctctccgtttcctggatctggcgctctgccagttcgaatatatcaactcggaaaagatcagggggatcgccactacgggacagcatatcgtctacaacagtcagtatgtgatcgagagctacatgaaagatcgtcagtctctgtcccgggattatctgcatatggttcttcactgtgtcttccgccatcctttcgtctcggaaaatcttcatgaagaatactggaatctggcggcggatatcgcggtggagacgataatcgacgaactggatctgaagcagacttctacaaacgactgtgatgaagtgagggaagaggtggcgcgcatcaaaaagatgatgcgtcacgtcaccgcggaacaggtctatcagatgctgctgtccggctccgtcgcgcagaaagatatcgagcggtggagaaaactgttttaccgggacgatcaccgggtctggtgggagatcgccagacagatcgcagaagaactgaaacggcgtcaggaagaggaagcgaaaaaggacgagccgccggaaagtgaacgggcgaatcgggaggatcctcgggatgaggaagatgaaaatcaggaggaggaacatggggaagacgacggaacagatgaggaagaaggtcaggaaagcgagacctctgaagaaagcggagaagaatctgaggaagaaagcgaagacgctggagaaagcggcggagattccgatgaagaagatgaagaggaaggccaagaaggctctgaagaagcaggagaagatggcggagaagattcagaagaagacgaagacgatgaccgggaaggctcagaacagagcgaagacgatggaaatggagatgatttcgacgaatacgaagaagagtacagcagtacgccgggtcagtcgatggagcgcgagaatcctgatgatcttgccgatcctgattctgatacacaggaaagcggaaacgacagcgacggagagggcagcggaggcggaaagccggacggaaacgatccgcagcagtcagatgaggaaggaacctcaagaaaaaacgaccagaccggagaaggcttagaaggtcaggacgatcatcacaagccggagggaaaaaataacggagccgattcgctggagggcagcacggaggaaggtcagagagacgactctatgggtgaagatccttttgccggcgagcagaagcagaacaacagcgcgctcggagagggcggaaacaacacgaaaggtaccggacagcagggacagcattccgcgggtaccggcgggggcggcgacggctctcagtccgcctgggagcatgagtccggcggcgcaaaccgcagagacggcggagaaaagaaggatgaggaacgccgtcagctttcgggagaagccaatccggacagcgaacaggaggcgtctcagggcgatattccgaaagaagaagccgtccctacggaagcttccaaagaggatggagacggggaggaaaaagaaccgtcctacatgcacagcggcgaagagcaggaagaactgaaggacaaatggaaagatctcagcgaacggattctggtggatctgcagacgtcttccaaagaatggggcgagagatcggatacgatgctgcagggcgtcaaaaagatcaatcgcgataagtacgattactctaccttcctgagaaaattcgccaccatgcgggaagatattcagatcaatccggaagagttcgactatgtctactatactttcggaatggaacgctatggaaatattccgctgatcgagccgttggagtacaaggaggtcaggaaggtcagggattttgtcatcgctatcgatacctccggttcctgtgcgggagaggtggtgcagaaatttctggataagacatattctctctttacgcagcaggagaattttttcaagaagatcaatctgcatatcatccagtgcgacgcgcagattcagagcgatgtgaaaatcacttccagagaggaatttgacgactatgtcagggatctggaatttaagggatttggcggaacggattttcgtccggttttcgaatatgtcaacgaaatgatcgagcagagagaattcgacgatctgaaggggctgatttattttacggacggcaacgggacatatccgaaaaaacgtccgccttacgaaacggcatttgtattcgtcgatgacgacgagttcgaatatgaagttccgggctgggccatgaagctcgtcctcgaaaccagcgatatcatgcaggaggtactgatatgaatataaaagaagcaaaagacgaaatacagcgtgcgatcacatcgtatttgatgaaggatgaattcggtgagtatcgcatcagccgggtcaggcagagaccgatcctgctgatcggggatccgggcatcggaaagacagcgatcatggaacagattacgcaggaactgggtatcggtctcgtctcttattctatgactcatcacacccgtcagagcgctatcggtctgccgaagatcgaaacgaggacttacgaaggccgggaatatatggtctctgaatatacgatgagtgaaattatctcctctgtgtatgagtttatggagcagaccggtcttgcggaaggtattctcttcctggatgagatcaactgtgtgtccgagacgctggcgcctgcgatgctccagttcctccagtataagactttcggcaaacacgagatccccgaaggatggattatcgccaccgccggaaatccgccggaacacaataaatccgtgagagaattcgatatcgtaactctggaccgtgtgaagaaaatcgtggtggaaccggattacggcgtgtggaaagagtacgcttataaaaaaggtatccatgccgccattacgacctatctggagatcaagaaaaatgacttctaccgcatcgaaaatactatcgacggcgttcagtttatgacggcgagaggttgggaagacctttccacgatgatcaagctctacgaagaacagggctacgccgtggatgaaaatctcatcagtcagtacctgcagcacgaaaaggcggccaaagaattcgcgatttactatgatctgtataataaatataaatcggattatcaggttcagagtatcctggacggctcttattcggaggaaatacgcgacagagctgccagcgcgaaatttgatgaaaggctgacgctgatcggccttctgctggaggcggtcaccgaaaacataaagcaggatatcgaaacggaagactatgtgacagagttgcataagcttctgcaggaactcaaggtcgtctgccagagggccgatccgaacagagagacgatcgatacgattctgggcaaatatatcgtggcccgtaccgcttcctaccgtgaagaaaagcgcagcaccgttctttccgctgagagagagacgattttaagaagagtgattctggctattgaaggatataaaaacgatctgctcagggaaggtatcgcagatttaaccgacggcttcgagtttatcaaagcggcattcggacagactgtggcggaaatgaagcagcatctggaagatacgcagtttgccctggagaatatgttcctctttatcgaggatgtcttcggcggcggacaggagatgctggtcgtcgtcacggaactcaccgtcaactattattccgcgaagtttatcagccgttacggatgtgaaaagtattttgaacacaataaggagctgctggtctacgaaagacagcaggaactcctgtcggagattatgctcttgaacgacgcggatgagatcgatctgtcgattctgtgagcaacggatcgcagccgcagggatgatcgaaagaaaaagtaaaaaactccccttgacggtaaaaatgatctgatctaaaaagacagacagaaaatattgatacagctatgaaagattgagctctgtattggcggagctcaatcttttttgcaaaaagtattttaaaggtgtctcttttttatattgattttcgttttacataaaaattaaaaactattgattttgcagcaatctctgcaaatagaaatctgaatacgtctttctggtctcagtcggcgggaatctggccgccaagcgtctgtgtatattttaataaacagggtaatcccggtaaaacattcagatatcaagcgaaagaaacggggaattatacatttacatacgtagatggggtagtacataatccaaatcatagctttaccgtcaatattactccgtgaaaatagtaggaaggataaaaggagggactattatgaaaaagaagatgatatttatttgcggtatcatagcgtgtatttcccttataggcgtcggagtgtatgcttccatgcagacagaaaaaagcagcgtacagtcggcggcagaagtgggagcggcggtaaaaacggcggtaattgcattgaaaaattctgacagcagcggaatttttgaaacggactcggggac

SEQ ID NO: 4100 - DNA, 11492 bp, Unknown
  16S sequences of unknown bacteria
gcagggggatcatccccctgccggggtttggggcagagccccaaagccttatgccgcagcatatttcgtgagcgttgcgagcgtccgaaggacgcaagaaacgcggttctttccaaaaccaggggtttttcaacggcctgaagcgcccggcgcaatgccgggcgcttttgcgtgtcgctttggccttcgcgcagcagtccacagggcacacgcttcccttcggcgcctctggcgcggccgggaaacgcgcaagaccgaacccgcggcgcatgtcggcgccgcccccaggaggcgggcagcctgtcccgcgcaggcgcgggatgccttcgtccaatcgaaaatccggaaaaggcaccggagattcggacttcattcgcggccttgcgaacctctcaaatgggtttttggacaagcgagggcgggatgcgcatgacgcgcaccccgccccgttcatcttccgtttggcatttgcggattacaggccctcggccgcggtctcggcggcgaagcggccgctgttggcggcaaaggacacgccgatgcccacgccgggatactggcgggtgaaggcgttgcccgcgatcagctcgccggaggcatacaggccttcaaccacctggccctcgccgtcgagcacctggcagctgtcattgacctcgatgccggggatggtgccgaaggtacgcagggtgaccttttcgatgtagaagggcgcggtctccaccttggtggccttgtcggcggccagctcatactccagggcggggatgggctcgccggcatcggcggcctggttgtaggcgtcgatggtcttctggagctgttcggcgtcgatgccgttgtcctcggccagcgcctcaatggtgtcgtactgcttcacatagcccttttcgatcttctgggcgatggtgtccatatcggcgtagttagcgtccgcgatgaggaaggcggccttctccggctgctgagacaccgcgcgctgcagcacgtacttgggctcgccttcgcccacaaagcgctcgccgttgaggttgaccaggaagttggcggttatcaggctggagccatccggcgcgacgatggagcccatgctgccgtcgcccacgatcttggtgccaaactgacgggtcatcaggatgccgtcgccggtggcacccgcgttggtggcgatgacgccgtcggaaaacaggggcaggtattcctccatcagttcgggattgctgccgaagccgccggtggccaggatgaccgccttggcgcggatgtcgtagcgctgctcatcgtcctcggccaccacgccggccaccttgccatcctccacgatcagctcggtggcggtggtgcccatgcgcaggtcaaaggtgttttccttcacatagctgttgaggaaatcggcaaagctctggccgcggttttcggtgcggatggcatacaccttgtccgaataggtgctggcgggctcggtttcgccggtgaagggggtgccgtagtcaatcagacggttgagaagcacatcgctcttggcgtatacgttttccaccagagcggtgcgtacctgggtaccggaggtgtaggtgaacagcacgtcaaaatccttcgtggtgcactccacaccgtcgcgcacatgatatttcgagctgatgccggcgatcgcgccgccggaggccggcagcgagccgctgaccatgtccagcttctccaggacgatgaagctgacgtccgggtagtcctccttgagctcataggccgccatcaggccggaaatgcccgcgcccacgatgacgatatccgtctccaccgcttcgccctccacaagctcggtgggctgcttttcctgcttgaagggggtcacatccacgccgccggccgtgagagcggcctccgccgcggtgagaatggcgttgctggtgacggtggcgccggccacggtgtccgccgtcaggctctgctcctccacgatgcggcggggaatggcgttgatcgcctggtcgccgatgccgggcgtttcgttgttttcgcctacggtgacagcggtgatgcggccgtcctcatagctgacggtcaccggtacgtcgccgcccatgccgggggcggaggcggtgtagtcctccgcaaatgcgccggcgcaggctgtgaccagaacacaggcacacagaaccgcaatcatttttttccaatgaaacacgttgattcctcctgttacaagatgtttgccaaaaagcgaactatatataataggcggtcttttggattgtcaataacataacagatggcagcgctatcaaaaaatcccgtcgccacaaggcctggccccgcggaaaaagcaggcggcggggcgcgggcgcgctgctatgaggaggaaggcgctgccggagaaaatgcccgctgttaagcggagcgaaaaagagaaaaacccgggcagacgggcgaaggcgcgcaggaccccggcgccgggccctacagaaacggagcaaagcgcagcagcgcggccctgtcgccccgcacccgcaccttgccgccaaggagcgccttcaggggcgcaagctcatggcgaaagacggccagcaggtccgcttcgcctccgacgatggatacgtccaccggcgcatcgggtgcaaggggagaaaatacgccgctgctcagggcaaaggcgcacgcaaagccggtgtccgccgcaaggacggcatagcggccggtgatgcccgccagcgcgtccggatgacgagccagcgcggcgcatacgccgtccatcaggacgggcagggtttggccgtcgccggcctcccggtacagagcgcggagatcccgctgtagatccgccttgctcaccggcggcgcctcccttcgcctttggaggccggatgcgcccaaagggcgcgccgtccctccgaaacatttcggttgtttgcaatcggccggggaggcagccacgccgccttgcccgccgcagaagaaagcggagcgggcgccccttccccgaaaaggatttaccggtttccggggttgtatgcaggcatgttcccggtcgggatgaagccggcgcaaacggcatggggaaggcagcggagcggatgccggctcccgtggtatgttgcggacaaaggaaaaagaattcccgttttggccaaatcacacgatgcaaatacttgcagttttacaaagaacatagtataatggtatcaattacaagaagaaggagaatatatcgactgtctgcttgatacgacagtcgatattaaaaaaggcgatgcgaaaacgatttagtcaaatcctgctgccggtcgttgtcttgggaatgtgcgtttgccttgcaagcattgcgctggccggcgaagccacccccgcatgccggacggtttcccaggatttccgaagctctccgttccatacaaccaacccgctgggcatcgccgggaactttcatctggtgggcttctcctctgtgacgacgtctgcccacaccaatggcaacattttaaccgacacgctgcgttatcagagcaactttggcaccaacggcgtggaggaggtcagctacatccgcaaaatcgaatttctcagcggcggcggcttttcctccacgtattcgacaacggattccctgctggtggtggggacggaggtgccggtaggtacggcggataatggaaacgcctggacccttgacggccgcaaggtggacgcgcccatgcgaagcgtccatcccgacaggctgatgcaggattccgacaccctgaagtatattgatttgcaggccgtccacgatcagaccgtgcgcatcaaccagacgctcagcacctacgaaaaccggctgggcaaggtcatcgagcagacggacggacagcggacctttatccagaaagtgatcctttccgatcctgcgggcgtgaacgtgtgcaacattacggatgcgcacgactttaaggagggcaccagcattgagtgcaaggactttgacagccaacggccgggactgttgattctgaatgtggatctcgcgggcgttgaagagttccttctgcccggcacggatcttctctacgcggacggaagcagggcgccgaacggtgaggtgacggagtggcagacgggcaacgtgctgtggaacctgtacgattcctccgccgcggatggcctctaccggggaaaggtccgcaacgagcgcgccgtggcggcgcatattctggcgccggaggcggatgtgacgctgggggccaacctgaacggaacggtcatcgccagaaacatagacgttcaggcggaatcgcaccgcacggacctaatgatgttcagcgtcgatccgggcggaaacaccctggagatacccgtggggaaggactggcagtcggacgagacgttcgaggtggaggcggttctgatccgcatcgacgtgcagggccgccagacggaatgcgattccctcaggctcaatgagagcaaccggtggcggggcacgtttgaggaggtcgaaaagagcgacgccgatggcaacgaatacgtctatcaggtgaaggaacgcgtcgggagcgtcatgcatggcgacggcgacgcgctggtctacggcggggagacctacagcgtatccatccggggcacgcccgcggatggctttctgattaccaatcgccgtcagggcggcacgcccggcgcgaaaaggctcagcgtttccgtcgaaaagcggtgggacctgcgcgccgccgggctcgccccctatcctgtgacgatccggctctatcagaacggcgtgggcatggaggggcgcacgctgacgctgggggagggcgcatggtccggcagctttgaggacctgccggcggaaaacgccaatggccagccctatgaatacacgatccgggaaatcatcaacggccgtccgcacggcgacggcgacgtatttgcctatggtgagacgcataccgccgtctcggtggcgggcagccagcaggagggctatgtcgtcaccaatagcctgtggaaggcgggactggtcgccgtgcccgtgtacaagacgtgggacctcggtccgggcatgagcgggtatcccgtggcctttgagctgtaccgccatgtgcagggggaggacgcatccggcgcggttcgggtggaaaaccccgtctgcgattatagcgggccctatcaggtggagtttcgtgatctgcccaagtatgacggggcgggcagaagctatgtctataccgtccgcgaggtcgtcggaggggagagctacacggacggcgacgtgtttgcttcgcccggcggcggaacaaccgccgtttccatcgccccggccgaaagcgggggatatgtcgtgcgtaacgtggtgcgccgcgacggggagctgctgagcataccggtgcgcaaggtatggcgcggcggcacgggcgccggtgtgacggtgcagctctaccgcggaacggagggtgatgaaaaaatggagggccgcgtcctgctccttggggagcacaatggctgggagggcgtctttgagaacctccagcgccatgacgcggccggacgggcctgcacctatacggtgcgggagatcgtggaaggcgtttcctatggggacggggaccgctttgtggcgggcggcgcgctgatccgcctgagcatcgagggggacgagacgtccgggtttaccgttatcaacacggtggaaagcacaaagggaccgcccatgaccggcgtgacaagccctgcggcgctggccggcgcggggctgctggcctccgtggccggcatgagcgccgcgtggcttgctctcaggcggcgcagaaggggagaggaaaaaccggggaattgacagcgggcggggagccggggcagcctgtcccggctccgaccgcttcccccttttggggggaggaccgcggctctcggagccgcatggcgtccccggggggcgccggcaaacgaaaaggcggtggccacccgcacaaaaaaaggaaaccacaaggcgaatcggcccttgaaagaagcggttcgggcttcattcgagggccggtttcctgtggtttgtcgaggaaatttgtgcggcagccccatcccgcgcgggacgggctgcccgcttccggcgggaggcctgcctcgctgccatgcgcggcgggtttggaagccctgcgcagcagggggcgcgcttgcatggccgggtccctgaaggggggcgaagggaaacgccggctccacgggctgctgcgccgggcacacgcgaatgtgggggctgcgcgcatccggcgcatgggatcaggcgagcacggcctccacctcatgctccgcaggcgcggcgtccgcggggatgaggctgccttcgacgggctttccgtccacggtcagggtcaggcggcccttctcatcgcccgcgaggttgcgaatgtggatgcggtagaggctgccccggaagcggcgggtcaccgttacctcgctcagctgcgcgggcaggcagggatcgacgcgcaggccgtcatagtctggcctgatccccagaattccctgcgatatggcatagaacgtccatgccgccgtgcccgtcagccagctgtttttggcctggccgaagcgcggggcggcggggcctgcgaccatctggctatagacatagggctcggtacggtgcaaagcggggtcgctcagataggccggacaggtgcggcagtaaatatcgaaggcccgtccgccgtgtcccagcatgacctcggccagaacgatccatgggttgttgtgacagaagatgccgccgttttccttgtatcccggaggataggagctgatttcgccgagctcgggatgataccgggtatagggcggggcgagcagggccacgccatgcggcgtgagcagacggtcgcgcacggaatccagcgcgcgctgggcatagccctccttgatgcccacgcccgccatcaccagaaagccctgcggctcgatatagatctggccctcctcgcattcccggcttcccaccttgcggccgtgcgcatcataggcgcgcaggaaccactcgccgtcccagccgtgcgccagcaccgactggcgcatcttttcgccctgggcggcggcctgacacgcctcgtcctcccagccatagaggcggcagagcgcctgataatccgcgcacacgccgatgaacatacccgcgatgaagagcgattccgccacgccggactcgatgttggccgtggtctggaagctttcgcccggggtggtggagaagcagttgaggttgagacagtcgttccagtccgcgcggccaatcagcggcaggccgtgcggccccagatggtccagcgtgaagtggaacgaccggcgaaggtgttccatgagcggctggctgagacgctcgtcgttgtcaaagggaacggactgatgcaggatggaggcgtcgccggtttccctgacataggcggcggcgccgaagatcagccacaggggatcgtcgttgaatccgccgcccacgtcaaagttgccgcgccgggtgagcggctggtactgatgataggcgctgccatcgggaaactgcgtggccgcgagatccacaaggcgctgccgcgcgcgctgcggaaccatgtgcacaaagcccagcaggtcctgcgcggagtcacggaagcccatgccccgcccgatgccgctttcataatagctggcggagcgcgacaggttaaaggtgaccatgcactgatactgatgccagaggttgaccatgcggtccagcctcgcgtcgccgcttgcgacctgatagcccgagagaagcgtgcgccagtgggcggcgagcgcctcaaaggcggcgtcaaactgcgcctccgtagaaaagcgcgaaagcagcgcccgcgcgggggccttgttggccacgccgggcgcggagaacttctccgcatcgggattctggcaaaagcccagcacaaacagatagctcacgcgcgccccgggggcgagatcggcccgcaggtggtggctgcccacgggggaccagccgctggccatgctgttgaagctttcgccccgctcgacggcggcgggatggtcaaagccgttgtaggcgcccagaaaggtctcccggtcggtatcaaagccgatgacgggcgcgttgaccgcatagacggcatagtgattgcggcgctcgcggtactcggtgacatgatagatggcgctgccctccacctcgatttcgccggtggagaggttgcgctggaagttggtcgcgtcgtcctgcgcgtcccacaggcagaactccacaaagctgaacacatcgacccgcttttgccgatcggtgcggttttccagggtcaggcgggtgaccagcgcgtcctcgccgcgcggcacaagcgaggtctgctcggcgcgcagcccgtctttttcgccaaggatgcgggtatagcccaggccgtggcggcactcgtaacggtccagtggcgttttgacgggcatccagccgggggtaaaaacgctgtcgccgtcgcgcaggtagaaatactggccgcccgcgtcggtgggcacgccgttgtagcggtagcgcgtcagccgcagcaggcgcgcgtcgcggtagaagctgtagccgccccctgtgttggacaggagcgtgaagaaagcctcgctgcccagatagttgatccagggggagggggtatccggtcttgtgatgacatattcccgggctgcgtcgtcaaaatagccgtattccatggcgatcctccctgcttttatggctgtaagccttatattcactgaacgaatacgatttagtaacagcggcgccttacgcagacaatatacaatgaatgtcccaaaaaatcaagacttatctgaaaatttcctgtgaaaaacccgcgatggacgaaaacgtattccactcggaacacggcccggaagaaaaatttccgggcactataatgtagaaaatggtttataaaaggactaatcaaatatttttttcaaaaccacttgcattttggaacgacctggggtataatcctttacgaaaacaatttcgtttaacgatgacaacgggaaagaggaaaccaatgtcagtgaccatcaaagagttatccgcccactgcggcctctccgtatccaccgtgagcaaggcgctcaacggatatcccgatatcagcgaggaaacccgcgaacaggtgcgccaggccgccgagcagctgggctaccgccccaacgcccaggcgcgcagcctcaagctgggccgcacatttaaccttggcgtgctgtattccgacgataccgaaagcggtttcacccacagctttttcagccccgtccttcaggccttcaagaccgaggcggagcgccgcgggtacgacatcaccttcatcacccaccacatgggcgatacccgcatgacctacctggagcactgccgctaccgcaatgtcgacggcgtatgcatcgtctgctcgcatttctccagcgccgaggtggtggagctggtggccagctccctgccggtggtgaccatcgaccatgtgtttcacgaccatacctgcgtgcagtcgcaaaaccgtcagggcatggaggagctcacgcgctacgtcatcgacaggggacaccgccgcatcgcctatgtgaccggcgaggagagctcggtcacggacgtgcgcacggtcagcttcctccgggccatgaatgaggcggggctggatgtgccgccgggctatctggtgcccgccgcctatcacaaccccgccgtgacccgcgaagccaccctccgccttctcaagcagggcccgcgtcccacctgcatcctcatgcccgacgattacgccgccctgggcggcatggaggccgtgcgcgcctgcgggctgcgcatcccggaggatgtgtcggtggccggatttgacggggtgaagctgctgcagatgtgcgcgcctgccctgaccaccgtcgagcaggacacccagcgcatcggcagcgaggccgcgcgccagctggtgcacctcatcgagcatcccagaaccacctatcacgagctgattaccattccctgccggctgctggagggcgcgacggtcgcccggccctccaccgccgccggctgatgaaagcgaaggattccctctgcctgcagggaggggaaacaataaaaaggaggcatccatccatgaaaaaaggactgtgcgtgtttctcgtacttacgctggcgctgacggcgctgtgctttcccgccctggctcaggaggagggcaaggtgctcaacatctggtgctggaatgacgaattccagagccgcttcaacgacttttatcccgaggtgaaggaaatcgccgaagataaatccaccaccaccctcaacgacggcacccttgtgaaatggaccatcaaccccaacacgaacaacaactaccaggataagctggacgccgccctgcttgcgcaggaaaacgccccggccgacgaaaaaatcgacatcttcctcatcgaagccgactacgccctcaaatatgtcgattccccctacaccctggacgtgcgcgccgacatcggcctgaccgatgaggacctggccgatcagtatgcctatacccaggaaatcgcctccgccgacggcgtgctcaagggcgtgacctggcaggcgaccccgggcctgttcgcctaccgccgctccatcgccaaggacgtgctgggcaccgacgatcccgatgaggttcaggcgcagctgagcgattgggacaagttcgacgccgtggcggccaaggccagcgaaaagggatacaagatgctctccggctttgacgacagcttccgcaccttctccaacaacgtttccgccccctgggtggacggcaccaccgtcgttgtagacgccaacatcatgaagtgggtcgagcagaccaagacctataccgataagggatacaacaacaagtccagcctgtgggacagcgtgtgggctgccgatcaggggcccgaaggaaaggtgttcggcttcttctactccacctggggcatcaacttcaccctgctgggcaactccctggccgacgccgacggcccgcaggaagtgggcaacggctgcttcggagactatgcggtctgcgagggcccgcagccctattactggggcggcacctggatctgcgccgccgccggcaccgataacgtctccaccatccgcgacgtgatgctcaagctcacctgcgacaaggaaatcgccctggccatcaccgagacgacgcaggattacaccaactgcgtctccgccatgaacgaactggccgcgagcgactatcagtccgcgttcctgggcgggcagaaccacattgcgctcttcgccgccgctgcgccggagatcgacatgagcaatgtcagcccctacgatcagggctgcaacgagggcatccagaccgccttcaaggattacttcaacggcgtgattgatctggataccgccaaggccaactttgaaaccctcatcatggaaaagtatcccgacctgaccgaagtcgtctggccgtaagcaaacaagatccatccggcgggggcgggccaag

SEQ ID NO: 4101 - DNA, 3955 bp, Unknown
  16S sequences of unknown bacteria
tgctgataactgcgttttacgccgctggaggtgcaggccacatcatattttgctgcatcggccagcaattccagtttttccagaagctccatggtttccaccgcctgaaacaaatgttctgattataatatatagaataaatgttcgattgtcaagggagaagcaggtttttgaatatgctgcagatgtatttccaggcctttcagcctgttgacagcgaaagaaaatgtgctatgatgtaattagatgacacatcatctttttgaggtgtacaatggatattacaaagcggcagatcacgaaaattgcaagagaggtcagtaaatttaccgtccgaaccttgcgtgacaccgggatcggaacgggagagctggatgttctccatacgatccgtaaaaacccgggcattacgcaggccagtgtctgcaggatccttggcatcgataagggcctggcagcgcgccagacggcaagtctggaaggaaaaggctatatcacccggcaggagaatccggaggatggccgcagccaactgctgtttgccgccccacaggcagaggtgctgaaaaactccaaggctcagatcgaagctgccttttatgaatggctcctggaagggctgaacgaagaacagcaatccgaatttgcccgtctgctgtgtattctttatgagcgctgcaagcaggaaagcaaagcagagttcccgcatatgacagagcgtatccaaaaagaggaatgaactatgaaaaacgggaaaacaaagaagctgtcgtttgccatgcagttcattgtgctgttcggtatcgtcagcctgttttcggacatgacccacgaaggcgcatccagtatccgtggcgcttatctgtcgcttttgggggcttccgccgccactattggttttgtatccggtctgggagagctggtaggttattccatgcgttatttttttggaaagctgaccgataaaaccagactgtattggccgatggttcttctcggttatggggtggatatccttgcggtgccggctctggcgctggtgggggaagacggctggatctgggcctgcggcctgctgcttgtacagcgtatgggcaaagccatcaagaaaccggcaaaggatacggtgatgtcttttgcggcttcgcaggaaggtgcagggaagagtttcggcattcaggagctgctggatcagattggtgcgtttctcggcccggtattgctgtatatcgtcatgctgttcaaaacagacggtaccacttttgaggtgtatgcgttctgcttcgcagtgctggccgtcccgggggcggctaccctgattttgctgctgctgacaaagcgcaggtttccaaatccggagcggtttgaaccggagccgaaggagtaccgtccgtttcagatgaaaagggagttcgtcctttatattgccgggatcagcctgtttgcttttggctttattgattattcgatcgtaattatgcacatttcccgcacgtttaccgcgttctcgccccaattggagcagacggcaggcctgattaccaccggtacactgcccctgctgtatgccggggccatgctggtggatgcagtggcggccctgattttcggatttctttatgacaaacacggagcggcggcgctggtgctgtccacgttgatcagcgcgcctttttcggtgttcatttttgcttttcattcggtacctttgctgctgctgggcattgcactgtggggtgtggggatgggagcacaggaatcgattttgaaagcggccgtgaccggtatggtgcctaaaagcagccgtgcgacgggatacggtatttttgaatgctcgttcggcgtgttttggtttatgggaagctggctgctgggggtactgtatgatgccagtcttcccgcaatggtggcggtgtccgtcctggcgcagttggcggcgattccgctgtacctccggtcggcgcagctgcataaggcagcgcgccggaatctgccgcagtaagcagagatgcagagttctgcagaaagccgataggccatccagcatcatatatatccaaaaaggaggaagcgctgtccggtacggcgcagagagtgaatatggagatcagagcgacacgagaacaggatttggagcgtgtgatggcgctgtatgccgccgcacgaacctttatgcagcaaaccggaaacccggatcaatggagggaagggtatccgccgcgcgcattaattgcccgggaaatcgaacagggaaacagctttgtctgcatggaaggcgaaacgattgcagcggtgttttcgctgattatgggagaagatcccacctatgcggctatttacgacggcgcttggctcagcgatgcgccctatggtacagtacaccgcgtctgtgtggcgtgttatggcggcggtgtgggcgcgtactgcctggattggtgcctgcgccgttgcggcaacgtgcgcatcgatacccaccgggacaatcaaccaatgcaggcccttttgaaaaaatgcggctttgcatactgcggacgcattttactggcagacggttctgaacgcattgcctttcaaaaaacactgtgatcagctcaaaaacaaatccgcgcttttccgttcaaaacggagaagcgcggatggattcttatttgctcagacgggtcaagtctgtgagaaattgggtgacagcttcctccggcgtggcccaggaggtgaccaggcgaatgcaggtgctgctgtccttcatgggctgctgcacttcgtattcgtagtccttttccaattggcgcagcagggtgtccggaaaaatggggaagatttgattggtgggtgattccaccaggaaggaatagcccaaggcagcaatccctgtctgcagggtttgggccagggcgttggcgtggcgggcattgtccagatagcggcccttttccagaattgcctggaactgaatgccgagcaggcggcctttggccagcatggcgccgcgctgtttcatatgataacggaagtcggacttcagtgcgtctttggtgatgaccagagcttcaccaaagagaatgccgtttttagttccgccgatggtaaaggcatccagtgtttgtgccaaatccggccagtcaagaggggcgcaggtactcaccatgccgcttccgaggcgtgcaccatccaaatagaggtaaaggccaagctctttacattccttgtgcaaagcagaaagttcctctttggtatagacagttccgatttcggtggagttggaaatatacaccatacgggggcgaaccatatgttcggtagaatgcgcggtgcaaacggtgcggacctgtgctgctgtcagcttaccgtctggtgtggggacggaaatcaccatgtggccagtggcttcgaaagcgccggtctcatgcaccagcggatggccggtgctgggggcgataacggcttcaaagggccgcaggaatgccgagcagcaggtcagatttacctgtgtgccgccgacaaaaaagtgaacgtctgcttccggcgcatcgcacagggtgcggatcagggtacgggcttcttcgcagtagcggtcggtgccgtagccgggtgtctgcacggcattgctcttttgaagcgctttcagcacggcagggtgcgcgccctcgctgtaatcgttgcgaaaactgtacatcaaacaaaacctcccaatagaatgtcatcatccatacatccattttaaaaagaaataaactacaaatttttatgttcgatcatgcacgatttgtaaaattataacaccggatacgggtggtttcaacgggaaagaaacagcggacagaaatatgatcataacaggacagaacgatcctgaagaatagaacagttgaccgagaattggatttgtattacaataaaaaagcaccgtatttctattgcggtgaggcaaacagcaaggggctgcttgaaaaaggaa

SEQ ID NO: 4102 - DNA, 16978 bp, Unknown
  16S sequences of unknown bacteria
gcaatgcgagaaatccacgctcaaaaaacgggttcggattattctcgtttgcctaaccgatgattaccgtttcataatattttgtacactgcacaatcagcctctccgaataacggggaggctgatttttgatggaatattgccgctgcgcaagtcaattctgcagtttactgattattccgggcttcggaatatcgctttctgcgccggcataagcggagaagccggctttaataatattttaccgtaccgaataaatccgtgttttccgttatatcctgtccctgatgattcaattcggcatggtgccgttcctttcttcggcttcgtatataagcaccgcaacatatgaggcgaagccgtgattgcagctggcaaatgtgtttttatgctcccaaagagtcccggtaagctctgccatgtaaagaaaataaccctttatctcctttaaaagctgttcacataataattgaccgtttctatcgcaatgtgatttccgccctttttcaaattgaggtcgatctcatcgactctgtaatatccgtgcgcgcaccttgcaggaccgaaataagtgaattttccgttcacaaatactctgtaaaagcccgaagcggcgattttaagaatcgcgcttcccgattcgcagcggatatttttataaagccccagggttatatttttttctttttcaagtccctttgcccaaatcggctttgcatgggtgaaaaagttatcggtcgcatttattttcattttaaacagccttccagttcggtatatgatttcttgcattataaaacacactgccaaataattcaagctttattcgtaattaccaattgtcagcggaaaaacgaaaaatgcggcgtttccgccgcataaaatggtgatataaattttaaatcacttatttttaattttttcaaccggcttttcaagcaccataaacagcgccacaccgccgactatggcgattccggcattaataagggtcgaagcctgaccgagtgcggcagttgtcagcgcggcgccgggtgcagagcctgcaagcgtataggtcactgtcttccatgcagtttcgccgataaggtttaccagcattccgcaggaagcgcccacaattgccgcggcagtcttctgggagaatttatttttaagaagtccgaaaactatgcagataagtccgataatcaaaaacagcggaaaaagccatgcgcccttgccgatataagcgtgattctgtgtgagcgtgtgtgcaagtatacccgtgcttatcataagggatatagcgcccgagacataaagtgccgcggcgggatactttttgcggtttttaataaagttataaaccagccccgttgcaagacctataagcattttaagaataaaggtcttcggggaggaatcggcatggccgttgaaaatatcgtaaaagcccattccgatagagcctgccaatccgccctgccagccgcctatgagcagcgccgccaaaacaactattaaatttccgaagtgtatgtacatattcgcgaacggaataaaaagcaccgtcagtgcaatgtagcagagcgccgcgaaaagcggaatcattgttatgtttacaatttgctcgtgttttgtttttttcatttttcagcccttctttaaaaaagtatttgcatatcaaacaagtaggtgttattattatagcaacgatgtgtacattaataaatagccaaatttaattattttttaaaggacagttttaatatgcttttggacttcattgatttaaaaaacggctcgggtgctgtctacaggcggctgtatgaggcattacacaccgcaattgtaaacggcgttatcaaaaacggcgaacgcctcccatccataagggaggcggcggaacagctgtcggtcagccgaacaacggttgaaagcgcttatctgaagctctgcattcaaggacttgcggagggattgccgcaaaggggctatttcatacgcacgaatccgccgcaaaagccgcagcggaccgaaagaatagaaaaacgcgaaatgcgctatgatttttcgggcaaaaaaatagaccccgccgccgctgacaccgatctatggaaaaagactgtgcgcgaggtcttgcgggataccgaagagcttacctcctacggcgatccgcagggagagccgggcttaagggaggtgcttgcagattattcctacaaagcacgcggagtaataacttcagcggaaaatattatagtcggtgcgggcgtaggaccgctcatcagtattctgtgcggacttatggaaaagaaaagaagcgtcggtatagagggcggcagctttgatcaggcggctcgtgtttttgaaaatcattccattccctgcactgccttgaaaagcgaccgcaacggcgttattttaaatgagctcgaggataaagacataggcaccctgtttttgataccctcacgccttgccaaaatcagcataacgggactatcctcccgccggaacgccgttgcggactgggtaaacgccgaaaacggcagacttataatagaggatgattacaacggcgagctgcggcgctccgccagagcggtctgcgcctttcaaagcaaatgtcccgaaaaaacggtatatataggcagcttttcaaagctgctgcttccaagcgtcagaatagcgtatatggcgctgcccgcctctattgccgaaaaattccgccgatcgcacggagtttacaaccaaacctgcgggaaaatcgagcaattggcgcttcaaaattacatatcgtcaggctcgcttgaacggcatttgcgcaggctcagaaagctgaacggcattaaaagcaaatgctttttcgacgcggcggacaaataccttccgtctgcacgaataactcttttcgagccgtccctcacagtgcttttggaaacggatacaaacaaagaaagcggcgagctttgcgccgccgccgaaagcagaaatatcaagctgatacccgcagaaaaaaacggagcggtatcactttgcctttcgggaatacccgaagccgacatagcccccgcccttgcggaattaaggaaaatatttcaagaggatagctgatatcgtatttcatccgaattcttccgcagaagccgttttttcttttcacatattacataatacaataaaagaccgtgccgatatattatttgcggcgttgcttcatccgagacttaaattcgcatcattcaagctcgagccgcattaaaacaagctcctgcatacccgatatccgtgagcgaaagcccaacggatttctgccgtattcgcaaaagccgagctttttataaagcgatactgcggctttgttttcggcaaccacattaagctctaactgcgagaatcccgccgcccttgcgcactcaatacaggcatttgtaagtgccgagcctataccgagcccgcagtattcctttaagattgcaataccgaagtcagcgcggtggcttattttgaatttaccgcccacagcgtcaattccggcagtacctacaattttaccgtttatttcagccacaatttcaatttcatttttactctcggttttttctttcaaaaactccgattcctgcgctgcggtaaagctgttttcatcgggataagtaagcataaaatcggtttcggcatgcgttttattgaaaacgtcaagcacctgttccccgtcatgctcagtgccgtttcttaaagtgcatatatcgccgtttttgagagtgatttttttattgtatatcataatttatcaccattgtcgacctttcttttgaaaagaccgtttttttctatcgccaaataaaacggtattccgagacccacgcatatcacaagctcaccaagccccacctcaagtgcggaaattgcaaagccccaaagcagacttacatccggaagaaagaaaaacgcaagctcaagacctatgactaccgcgtttattatcacgggaggaagcattgaaagcagcggaatacccttaaatcttatattccgcaaaaaatatgtaagcagcgcagctatcagcgttgcggatgtgccgaaaatcatatcaagcggattaaatgacgcgatattcgcgataaagcaccctattgtgagtccgggaatcgcagcgggggtgaatatcggcagtattgtaagcacctcggaaacacggaactgtatctgcccgtaagcgagattgaaaatattgcttaaaaatgtgagtcccacataagccgcggcaataagcgctcccgttacaatataagtgattctatctcttgactttgacatttatcgttcttcctttaattttttgtaatattcaaccgccaggcggtcgcagcgttcgttttcggggtgacctgcatgacccttcacccactctatttttacatcatgctcagccaaaagcccaagcagccgctcccacaaatcggaattaagcgccggctttttatccgacttgatccagttgtttctccgccaggattccgcccagcccttgattattccgtcggaaacatattttgaatccgttacaagccttactacacaaggctcctttaacgcttcaagcccctttatcgccgcggtaagctccattcggttattggtggtttcgtcttccccgccggaaagctccttttcatactgcccatagcgcagaataacaccccagccgccggggccgggattcccggagcaagcgccgtcggtaaaaagctctatatattttttcattccgttattcctcaatattttctgaagcagcctaccaccttaccgatgacatgcgggtcttctggataaatcggtgaataatcagggttttcgggcatgaatataattcttccgtcccgaatcaatagacgcttgacggttgcctcgtcaccgtccattccgataacaatatcgccgtttcggcaggttttgtttttatcggctattataacatctccgtcgagtattccggcgtcacgcattgaaagccccgaaacccgcaaagcaaaaagaccctcggaattttttgagggatacggtatataatcctcaatttcctcaaccgccaatatgggctggccggcagtaatcttgccgacgaccggcaccaaggacgaatcgtactccatatcgagccgaatcgcacgggaggactttgcgtcccttataatatagccctcttcttcgagtatgcttaagatagaatgaacggtcgatgtggatcttatcccggtggcggcgcatatctccctgaccgtcggcggaatgccgccgttcatttcctttataagataattataaacagcaagctgtttttcggtaagaggtgattttgacatagactgtctccgttctccgccttatatatcacgggcggtttttatgcgaacctttgttctttttattatagcaccttcaaagccgctctgcaactgttttttccgtcattcggcatttacggtgcgggactttcagcactcgtcttcctttttaatcttattgccgaaggcataaagctttattataacaaaggttatgggacctcccgccgcagtggctaatacggtcgcccaaaactgatccattttccaaagatttatcgttataaaggaaaccagcgtatatattatcagattcggtatgtaggatattaaaaagcgcagatattttctcaatttcagccggcttttaaagacaataatactgttgagtatataattgatcgtgagcgatatgaaaaagccgatatgcgcagcaacattttcctgcaacttaaaatgcgccagccatgaaaaaaacgcggtgttaaaggtgtttactatacctattgagcaaaagcccagaaacttcctgttgataaatgtttttttaaggcggtttaaaaacgtcaatgctttcacctcgcaagaaaataaagtgctgtaccgagcagatagtattataacaaaaccggacgaaaaagacaagcccgcttttttcgttaaaaaaatgaggtttggggatagacaaacggaattctttattatataatatatttaaactgcgtcacggcgaagaaagctcgccgaaaaaggcagtatgcattttttgccgacgcataaacggcagaacggagattgaaatggaaaagattttagtgcttgatttcggcggtcagtataaccagcttatcgccaggcgcgtaagagagaataatgtctattcggagattcgtccttacaccgccccgatcgaagaaataaaggcagcggactacaaaggaataattttaaccggcgggccgaaaagcgtttacggcgaaaacgccgtgctttacagccgcgagcttttcgagctcggaatacctgtaatgggcatttgctacggcgcgcagcttatggcgcacatgctcggcggcgaggtgaccgcgggtgccagcgaatacggcaaggttgaagtaaaggttgataacagcagcaagctttttgcggatatccccccgaaaaccgtttgctggatgagccataccgattacataaggcaggtgccgctcggctttaagattgtcggcaaaaccgatgtttgccctgtcgccgcaatggaaaacccgaaggacaggctctatgccgttcagttccaccccgaggttatgcacactccgctcggctctcaaatgataaggaactttatatacaatgtctgcggctgcaagggcgaatggacaatgtcctccttcacctcacgcacaattgacgcgctcaaagccaaaatcggtgataaaaaggtgctctgcgccctttccggcggggttgacagctcggttgccgctctgcttttgcacaaggcggtcggcgataatctcacctgcatttttgttgaccacggtctgcttcgaaaagacgaagcaaagcaggtaaacgaccttttcagaggtacatacaacattaatcttatatcaatcgatgcgtcggagcagtttttgggtcagctccgcggaatcagcgatcccgagcaaaagcgcaagataatcggcagagaattcatccgcgtgtttgaagccgaagccaaaaagatcggcaaggtggactatcttgttcagggtacgatttaccccgactgcatagaatccggcgtgggcgatgccgcacttataaaaagccatcacaatgtcggcggtctccccgaccatgttgattttgatgagataatagagccgctccgcgacctgtttaaggatgaggttcgcaaggtcggccttgagcttggtatgcccgaaaacatggtttaccgtcagcccttcccgggacccggactcggcgttcgcattatcggagagctcacccgcgagaaaattgccattctgcaggatgccgacgcaatcttccgcgaggaagtggcaaacgccgggcttgccagagaaatcggtcagtatttcgcggtgcttacaaatatgcgctccgttggcgttatgggcgatttcagaacctatgattacaccgtggctctccgcgccgtaacaaccggcgactttatgacggcagactgggcgcgcatcccgtatgaggtgcttgacgccgcctcccgccgcatagtaaacgaggtcaagggcgttaaccgcatagtctacgatataacctccaaacccccggcaactattgagtgggaataattttgagatcattaaaaacccagtgtttatgcgggttttagtgatttcaaaggacaaattgatagcaaaatgatagcaaactatcaggtcgttttattccaaatagaccaagtggcttgtgaatagattatcttaaatactaaaaaggcattactgactttttgcagtcggtaatgcctttttctatgcttatttatgtgcgttaaaagcaatactttcaggatatgtataacgccaattatcgtattcctcttttgtgatttcaccgtttttaagcttttgagcctgctctttccaagcggtgaacataccaaacattgtaaggtagtttgtacccatacccttgtccaagtgcaaacaaacctctccgtcaatttcggtgattttgagaccatataaatcctcaagggtaaataaggtgtgcattaagccgtcgtagttgtctatgtcaggaacagttaatgctttagtggatacaccgaatatctctgcaagattgtttgttaaatcagcttttggtgttcttgagccggattcgtattgtgccatacgaatatcagcagttttctcaggaaagcccacctgcataccaagatatttttgagtcatacctcttaaatttctgaaaaaacgaattctttctccaatagccataaaaaatactcctttcgtactcctaaaaaagagtatagcatatagagttatgacttgtcaagataaccaaagcaaataaatttaatattttttcaaaaaccacttgactttacggaatatgtttagtataatagttaagcaaatagcgttaggttatttgcttaacaacagaataaccgtcatatgtcacggtaatggcatatccgctcgggcaaatcggaatgcggtcagaaagttctccgacactaaataattgtaaaaaatgaaagaaaggatgatgaaaatggcagacaaaatgtttttgcgtgttgaagatgttgcggaagaaatgggagtttccgtttcctatgcctacaagctcatacgcaaattaaataaagaattaaaggcaaccggatgtataacaatacccggcagaattgaccgaaaattctttcatgaaaaattctattcaactaaaacaaccgaaaggagcgattaaaaatggcggcatttaagaatgaaaaaaacggaacttggtatgtgcagttccgttacacagactggaaaggcgaacgacagcagaaattcaagcgagggtttgcaaccaaacgagaagcgcaggaatgggaacgagagtttctcatgcaaaagcaggctgatattacaatgagttttgaaagctttgcagaactttatgagaaggatgtaaagccaaggctcaaagaaaacacctggcttacaaaggaaagcattattgagaagaaaatcctgccttattttgcaaagcgcaggctgtgcgatataacggcaaaggatgttatcgaatggcagaatgaaatcagaaaactcaccgataagagcggcaggaagtattctcagacctatctgaaaactgttcataatcagttaagcgccctgtttaaccacgcagtacgctattatggattgaagtccaatcctgccgccatcgccgggaatatgggaacggaggaacgaaaagaaatgcagttctggactttggaggaatacaagaaattttccgaagcaatgatggacaaaaccatttctttttacgcttttgaaatgctttattggtgcggtattcgtgagggtgaaatgcttgccttaacgcctaaagattttgatttcaaagcggaaacggtgacgattaacaaatcgtatcagcgtttaaaaggcagagatgttatcactacgcctaagacaaagaaaagcaaccgcacaattaaaatgccgaaattcctttgtggagaaatgcaggaatatctcggtatgttttacggcgccggagaaaatgaccgaatctttcctgtttcaaaaagctatatgcatcacgaaatggacagaggtgcaaaagaagcaggcgtcaagcgtataagaatacacgatttaagacattcgcacgtttcgcttttaatagaaatgggatttacagccttagccattgcggacaggctgggacacgaaagcattgaggttacttaccgatatgcgcatctgttcccctcaaaacaaaccgaaatggcaaataaattggatgatttgggaaaaggagatttttaagatgtcagcaaaaaacagagacgaacacaaccgctggagaaatataaccgtaggctttcgagtatcgcccgaagaaaacgatcttatcaacaaagctgttgcactgtcggggcttccaaaacaggaatactgctaccgccgctgtctgaaccgtgatgtggtggtacagggcaatccgagagtgtataaagcactaaaaaatgaacttgccgccgtgcttcaagagttacagagaattgaagccggcggcgatgtgaatgatgaattacttaatattattgaactgattgccgacattctcggtggtctgaaaggagaggataacaatggagaataaaaaagaaatgaccgctccgaatgtatctgttggcgcagatacggagcagtcaatccaaaaatgtactgacattagtataaacgataacgatgaaaatatcaagtgttttgaagaaatgcaaaaagagttgatgttaagtttagacccgtcatatctcaaaacaatttcaatgagcgagctatacgacgccgtgtaccaaagcaaacctccgctgattgacggcttactctaccccggcacatatatttttgccggtgcgccgaagataggcaagagttttcttatggcgcagttagcttaccatatcagcacgggtacgccgctttggaattataccgtccgaaaaggagctgtgctgtaccttgctcttgaagatgattatcacagattacaggaaaggctgtaccgaatgttcggaacggagagtacagaagatttgtatttttctgtttcggcatgtcagcttggaaacggtctcgatgaacagcttacaaggtttatggctgaacaccccgatacaaaactgatcatcatagacacgcttcaaaaggtgcgtgaagtcggcggagataattacagctagttttgagaaaaattgaaaggaggcaacgcctatggcggaattaaaaatcatcagtatggatgaagtgcccgtcgaagaagtggaatggctgtggtatccctatatcccatacggtaagttgacaatcattcacggcgacggcggtgaaggaaaaacaacactgatattgagattagcggccctgttgtcaaggggagaaaaactaccctgcgacgacaccgagcgcgagccgattaaggtaatatatcaaaccgcagaggatgggcttggggataccatcaagcctcgtcttcttgccggtaatgcagactgctcacaaatcaaggtgatcgacgaatctgaggcagcattgacgatgcttgacgagagagtagaaaaagctattgcagaaacaggtgcaagggtaatgattttagatccaatgcaagcctatatcggcgcaaaggtagatatgaaccgagcaaatgaagtccgtaccattctctctcagcttggcaggatcgccgagaaataccgttgtgcgattatacttgtgggacacttaaacaaggcacagggtaataaatccaattacagaggtctcggctctatagactttcaagcaacagcaagaagcgtccttgtggtcggcagagtaaaggacaagccagaggtgcgtgtggcggctcatcaaaagtcctcacttgcaccggagggcaagcctatcgcttttgaactgagtgaagccaacggatttaagtggctcggtcattatgatatttccatcgacgatcttctcagcggtatcagtcgtgagaagaaatccaatatggctgaaagccttattgttgactgcctatccggtgggaagtacccgcaacaaaccttgctacaaaaggcgcagagtttagatatctccaaacgagtgcttgatgaagcaaagaaaactctgcgtgtgcgatctgttaaggaaggcagtgtgtggtattggcaactacccgaagaaaaagagagcggcgacctgtaaggttgcaacattgcaaaggtgcgggactttcgcaatcttgcaatgttctttttcggcaggtatgccaatacgaagtttaggcggggtgcagggtgcccttttcaaagggcggctctgccggggagttgtccgcagacaacggggcaacgccccgcaaccccctcggagagcgcaatagcagcttttgatggcagaaggctgtcaaaagtgcttttgcgttactcttgacaagagtaacagaaccgagaacggtaaaattttggagattggaggtaataaaatgcaaagaacgataagcgcaatggtcggtaaaggctctgtaaatcataacagccgcaagttcaaagctgaaaatgttgacggtatctgttccagtctttgcagttcttcggttaaacttacaagatagtcccgaagatatttttgtatccttatatttggatgaacagtaatgtctgttccaagtagtcttcgggtgcaatattcttgtttatcctgccccctgacttatgtttttttggttgcgccttacgtttatcggacggataatcaaacgctttaacttttataacacgagtatatataggtacaatagtcaaaaaagccgatcaaacatccgattttatttgcaaaattattatatcatacacacatatgcttgacaatgcaataaattaacgattagatgtgaaaaattaaaattacttgttatttatttacaaataaatgtgtttaataaaatgtttcttgctcactttataccatatatatgaatatgctgataatttgtcgcttgcattttacttaaattttgatataatttaaccaagactttacacaaaggtgacgaagcatgaataatgagcgcataaattcatttccgtttaacccaaccgagttcccgttcaacattgaaatttcgggaatttccaactgtgatgaggaatatacggtataccgcgagaagagctattgctacattctagaatatatatacgagggctccggcacgcttatatgcaacggcagagaatacaaggtcggcaagggagacgcatacctgcttcctaagggcagcaatcatcgttattatcccgataagacatgggataaaatatggttcaacatagacggcatactcgtttcaaaccttattttcgcatacgggctggaaaacacgataatatttaagggcttcaaccgccaaaagcttttcgaggatctgtacgaaatcacaaattcaaagaaatccaacgcggagatcatgcttacggcggcgatacaattccatgtcattattcaggaaatgtataattccacccaaaagaacacctacaacagcaatgttaataaaatcaaaaaaatgcttgatgacaacatctacgagaaggatatttcgctgaaggcgattgccgacgagctttgcatttcgcaggcgcaggtaatcaacattttcaaaaagacctttaacatgacgccgtatcagtatttttcaaaaaagcgaatcgaaattgccgcctcgctgctgctcaattccaattcgcaggtaaaggaaatagcggagctgctcaattattctgatcagccgtatttttcaaacgcctttaaaaagatcatgggaatatcccccgagaaataccgcaagatgaacattaacagcgacctttcaaagtccaacataaacaacaagatccttatggagcaggcggaaaatctcccctttgcgcttaaggttgacagacattaaataaaaacagaaagcgagtcacgacatgataaaattttcagccgaaagcaataccttcttccttggtaccgaaagctcgagctacatcataaaaatactcgataacggtcttctctgccataaatactacggtgcggcggttgcgtgcgataatttcgactacctcaatcttttcaaaaagcacgaatatatgcccgataccgttcttaacggcgtaagcgtcgcaaaggacagtgctccgcaggaatacccggccttcggccgcggtgatttcagaagtcccgcggtctgcgttgaggacagctgcggcagacgcgtaaacgagcttctttacaaaagccatgagatattccgcggcgtgccctcgattcccggtcttccatatttcgacagaaatgccgaaaacgccgaaacccttaaaatcattttatccgacagtgtaacaggctttgaagccgcgcttttctattcggtctttgaagcggaggacgccgtcacgcggcacacggtaataaccaatgtatccgaccgacccttaaagctttgctcggcggaaagcctttcgatagattttgaatcgaaaaattttgagctgctcaccctgcacggagcatgggcaagggaacgccacataagccgaagaccgcttgattacggtacgacctccgtagaaagccgccgcggctcatcgggtcatcagcacaatccgtttgcggcgctcctatcacccggagcggatgaagaaaacggcgaggtatacggctttgcgctggtttacagcggaaatttcagaatttcggcgtaggtggaccagtttgcctcaacgcgcctgcagataggaataaatccgcacggcttcacctaccttttaccgccgggagaaagctttgcgacgcctcaggcaatatccgtctacagcaaaaacgggctcggaggtatgtcccgccgcttccacgatatgtgccgcgggcatttgggagtctccgccgataaaagtataaagcacccgatcattataaacagctgggaagcaatgtgtttcgacataaccgaggaacgcattgaaaggctcataaacagctgcaaggggctgggaatcgataccttcgttttggacgacggctggttcggctgcagggaaagcgataattcttccctcgggtactggtatacggatgaaaccaaattcccgaacggtctgcacggaattatcgatatctgcaaaagaaacggcatgaagttcggaatatggtttgagccggaaatgatttcggaaaacagccgcctttaccgcgagcatcccgactggtgcatccattctcccggccgcgctcccgttgaaagccgcaatcagttagtgctggatatggcgcgcagcgaggtggttgactgcatatacaaccagatttccgccatgctgtcaaaatatgatatttcctatgttaagtgggacatgaacagaaatattacggacaacggctctgcgtccctgcctgccgaagcgcagggagaacacacccaccgttatattctcggtgtttacagtcttatgaagcggctcaccgaaaattatcccggcgttttgtttgaaggctgcgcgggaggcggcggcagatttgatttcggaatcctttactatatgccgcaaatatggacgagcgacgacaccgacgcgatagaaaggctcaaaattcaatacggcacaagccttgtctacccgccctcttcaatgacggctcatgtttccgcctgtccgaatcatcaaacgggcaggattaccccgtttaagacccgcggagatatagcgcagatatgcaatttcggatatgaattcgacacctcaaagctttcatcatccgagcttgcgcaaatcagcgagcagataaagctgcacaaaaaaacagagccgctgatttacgacggcagcttttacagaataataagcccgtttgaaagcgattactgctgctgggagcttgtatccgccgacagaaagcaggcgcttgcggtattcgccgttcagcgcgccacgccgaacaccggcgggcaatacataaggcttaagggccttgaccccgatgccgtatacaccgtgtcgcccaatatgcttcggctgcacggcagcacccttatgaacgcgggactgcctatagccgaggatttgaccgactacagcaccgtgatttttgaactgaacgcagaatagcataaggagaacttaaaatgaaggatcaccgcattgccgataagcttatagagcaaagattcgaagaaataagcaaaaaaacagatgccctgccgaaaacgcaggtcaactacattttcgtaacggacacccatgccgacgaatatcttttaaaggatgaaaacggcaagctgacggtttttgaacccgaggataccgtaaacgaccgcataaatcaaattgcaaagcatcttgaaatcgccgttaacgtagcaaataaaaacgataatattgactttatcgccgtcggcggcgaccttatgaacgcctactgcataaaaggcaaggagcatgttttgagcaatctgcacaggtcggtcgctccgcttaaaaacagcttaaagccggtgcttattgccttcggaaaccatgacgacaacgccttccagtttttgaatccgaatattcccgcagccgaaagggaatggattataagcgataaggactggaaggaaaaagtcaccgatttgttccccggagcagacggagaggttcacgatgaccgctatgaatattcgaaatattattattatgatcttaagaaaaaaagaacaagaataataattctcgacactatggactgccgccgcccatttgatgaaaacggcgttgtaaacggagaaatgcgattgaagcgcatatgctataccgatcagcagctcgactggctcgtaaaccgcgcaatgaccgcccccgcagattacaattacatttttatctctcacatgggtatcgattcagccgtaaacagcaacagaatgctcggcggcgagacgctccgcgaaattataagggcattccaaagccgctcctcctacagcttttcatacaccgatataaacggtgaggaaataaccgtaaacgccgatttccccgaaagcataagcgggaaaatacttttttattccttcgggcatcagcattccgaagcgatactttacagcgaggatattaacctctggcaggtcgcaacaggctgcgagaatatgcgcggcggcgagggtgaaggcggaagcgacgcgtccgtgaaatggaaaattctcaataatcgccgcgagggcgacgaaaccgaaacctgcattgatataatctctgcagggacagaggtttgtcataaattcaatataggccccggagacgatgccgaaatgccgtataaatgtgaataaaaatgaaaaag

SEQ ID NO: 4103 - DNA, 32759 bp, Unknown
  16S sequences of unknown bacteria
agccccactaacgcaagacagcaaatggcaaggaaaagcgatttctgcgccgattctcccatgaccatcagcacgacgagaaggatgaccgggataataaacaccagcagattgaggaaggcggaatgaaaggccgtcagcgtttcatcacgaaccttttcgtcccccagcttgcaagccttgatatagacgctaagagcaatgccgccgtaataaagcagcgcgggggtgatacctacaaataccagtgtgatatagggaatgcccgtccagcttgcgataataaacgccgctgcgttcatcacagggggcaggatggccccgccggtggaggccgccgcttcgcatgcggcggcaaattcagccgggtaaccgcgctttttcatcaaagggatagatactgcgcctgtaagggtgatgttggcggccacgctgcccgtgatggagccgattagcccggaggaaagcactgcaacctgtgcaccgccggagcggatcttggtggaggcagacatggccacattcataatggcgcctatggcgccgaaggcatccatcattccgccgaagatggtgaacaggatgatggtgtttgccgacacggaggccagcatgccgtaaataccgtcgaaattggtggtgacataggtgataaggcgggagaaagaaagcccgccatggaataggggccccggaagataagggccaaaatagccgtacagcagggcgatgaccgagatgacaggtattacccagccccaggtgcgctgggtggcaatcagcacgatcaaaagaatgcacacgccgctgaataccttatcgaacggctgtgcgcccagggcagtcatgaaattggtgtaattaaaatgaatatacacacatactgctatactggcagccagaaggcctatcatgcaccagccctgccaggtggggcggccctccttgattttaatggcctgtaaaaacacaataacaagcgcgaacaaaatatgcaggttgatgtgctggcccgcctgaaacaggttgatgttgcaggccaccagatgatagatgctcatcagaacggccaccacggtggtggcacggtccagtgtacgggcaagcccggctttggcggttgcttccatggatacctcctgtcacgtcacggcaggcatgcttttttcactgcctgcctgaaaataggggcgccctgcacgggcgcccctgctgcgcctcacgacgagggcatcacagctactgtctggcagagttataccccgtcatatacagtgaacctgtcttcccacaggccggcttctttcagcgcctttgccgcgccagggtggaaggggacgccttctacacatacgctcatgcaaacatcttcaaaggcgtcaaaatagttggagatgcccttcagctcttccagattttccagcacagccttggtgtactgataaatgctttcttcatccacgctggcatcggcgatgataacacccgaattggtaggggcgatcacttcttcgccgggggcgatagaatcgtcgttttcactagtgagcacaccgctgctcacacccgcattggcctgcgccaccgcctgcgctgcctcttcgctcatattcagaatacgaatatctttggtggctttgagctcgatcagcccgctgatgggatcgccgttggcccaggaacccaccatggcgtcgatacggccgtccttcaatgccgtgtatccttcattccaggtgaaattctctatggtgacgctgtcagtcaggtcataggcctccagaacgagcatcagcacctcagcggtggaagaacccaccggcgagaggccgacacgctttccggccagatcctcatagttttcaatgccggaattatccagcactaccaggggcagatcccatgtgacgaagccgaagcactgcagcatatgagaggggtctacggcgtggtcgaaagagctggccccgttcaaagcattgatcaggtcgatggtgccggaataaccggcctgaatgtcgccggtctctagcagatagatgatttcagtgcctccattggtggtgatggtagaggtcttcaggccggtcttctggttgaccacagaggagatcgcctccaccacggtattatctgtgccgcctaccgagccggtgccgatattcaaaatggaagtaccgccgacaatgctgccgtctgcaggggcatcagagcagccggctaacaacatgctgcaaaaggtcagtacaagaaaaattgcgattgcctttttcatattgcgctcctttgtctcacatcaaaaggtggatttcattggtgggtttcgcgaaaagatatccggtggatccttgccggatggttctctccacttttctgtccatactataacaatttcagaattttatgtcaaattgcataaaattaaatatattttatatagaatttatacaatttctccaaacttaaaattttatcttgacgaatttgttcgttaatttcataacaaatcgtcaatatgacggatgttttcatgcgcttctatgtacattgcctgattttgcatagatacaacaaaaaaagaaaatttttccgcgaggtgtttttgttggaatatacaatttattcgatgaaattttgtgacagttatcagtcgggttgaatataaatattgtttgcggaggagatacactttttcgacagcagggccgggagaacggcctgttaagccggggtgcatgttttgattcagaatgcgcatactaacggcagcgcgcaaaggccgcaagcgcccgtgtgcgccaaagcaaggcaaaccgcagagaaggagagacgcgatatggacagccagacgcagaagctgctgggcgccgtggtgaaaaatacgcagatgtgccagactacgctgaacaagctgataggcatcaccaaggacgccgagctgaaaaagaagatacacgaacagcttgccacacatgaggatatttcgaaccgggcgcgcgccatgctggcggcagacggctgtgaggtgaagcctgaaagcgccatggcaaagatgagcgcccagatgggcattgccatgaaaacaatgcgcgatgcgtcctcgcgcaatttggcgcagatgatgatagagggaaaccatatgggcgtgacggacctcaccatggccatcaaggaggccgagaacgccaaccccggcgctgtggcgctggcccagcgcctgcagcatgcagagaatgtttacgcaggccagctttcgcagtttttgtaacggcagcacagagcataaaaagccacgcccgtaattctaatacgggcgtggctttttcttgctgccgcatgcggcaggaggagagagaaaccatgccgcatgcgaaaacaaacggaataaaagagaaaataccggcagccatgcagcgctgcgcaaggcatgcacttagacgctgtgcgcggagaggaaggcctcaacagtggccctgtccgcatagccgggcagacattcgcgctgtgtgacggcgtaagcagaatagcctgccgcccagcggcaggcctccggcagaggcctgccccacacaaggtttgccgccacggcggcaaggtagccgtcgcctgcgccgcagctgtctaccgctgtgacaggcacgggcggagtgaaaaagaaatgctgcccgtccaggcagtaactgccctttgcgcccagcgtgagaaacacgcgcgtgggctggtagcgcgcacgcagcgcctcgcacacgccgcgcgcatcgaaggtgtcgcccacctccgcagcaggcaggccaagaagaagctgggcctccacctcgtttacaaaaaaatcgtccacatagtacagtggggcgggcaggccgccttcaggcacagggctggggttgaacatcacccgcatgccaagctgcttggcaagctgtgcagcgcgcagcaccagcggcatgcgcacctcaagcccggtgataaaataccctgcgcccctgcggcgaagcatggccgcctgcacctcctcccaggtgagcttttcgctggagctctcacctgtgatgaggatattatcgccgttgtcggcaatgatgccgatgccctggccggtggctacatctgagcttacaagcacttcgctggtatccaccccggcggcctgcatccagtcaagatcccgccttccggcctcatcatcgcctatcttgccgataatggcacacgaaatgcccaggcgtgcaagggccacggccacattgccgcctttggcaaggtcttccgtcaggtgcatatgcttcatcatgatggtctcgtgcgggttcggcaggcgctttacaagaatgtcgaacccgcctccgatattattcagcaccagcacatctgcaggcttcatacacgccgtcctttcattcgcaaacaaggctgttcgggtggctcagcggatggtccgccgtgaattcatcgcacagaagggtgatatccggcacatatttggggaacagcgtcaccgggtattccagcgtgggctcactgaacatcgccacgcgcagcaccgtctttttccacgatccggtggttatcatgtatacggcgcgctttgccgagagcatcaccttcatgccgatggtgagcatcatggggttgcacaggtcgtagcagccgccgaaatcgcgctcgctgtactggatgatgttatccggcgtgcagtacaccacgcgcgtgcgggaattggcatactgctccagcgtcacgcgctggtaggggtccagcggggtttcattgttggccacaaggcccttgtagcccacgccggcccacacggtgtcgatgccgcccagctgttcgcaaagcctgtccgggccgtccaggtcctccagcgtgggccagatgcgctggctttccggcacgttcagttcggggtctattttatcgtaaaattgtgcacgcatgcggccctcgcagctcattttgtgtacgcccagggggtatttgcgcccctcccagttaaggcattcgtccatctggaacacatacaggtttttcaggctgatgcgctcgcggtttacgcgttcgataaagcgggggtaatggtccgccgggccgctgcccaacacccattttgtgggcctgcccgccgcgttgttgcgcacgagctcttcgcacatcatgtcggcggcgacgttcatggcctcctgccgctcctttttcatgatgaaatgctgcaccttgctttcagggtgctgcgccagctcctcttttgggatgctgcaccagtgcagcatctcttcccgggaaatacggtattcctgcatgccacatcattcctttccgcttcatcacgccccggcagcagatgccggcagtttttcaaaacaggacgttatgttacgttataagtatagctatacggcgcggctatttcaagcaaccgacagtgaaatgggcgaattcccgaatatatacggtgcattttgtgcaatatcacggcctgcggcagaggacggacggaaaaaagagaaaaactgtttgcacaggtgctttgagcgcccgcgcctttcttgaaaagccataaagggtatgctatgatattttcaaaacagtgcagccggggcacaggggggcggcaaagccccttgcgcgcaggccttgccgtttttggggaacttttggaaaaggaacgagaatatggaacagagtgcgggccgtttgcggcagtctaccattccgctgtacaggcagattctggagggcatcaagcagaagatagaagcaggcgagctgaaaacaggcgataaactgcccagcgagcaggagctgatggaacattaccgcgtgagccgccgcaccgtgcgcacagcagtggatgaactgtgcagccagggctgtcttgtgcgcaagcagggcaaggggacatttgtctccaggccgaaactccaccgcaaaatcgtgaatgtgctgagttttcaggaggcgtgtgaaaagtgcggcatgcgccctgcgcaccgtctgctggcctgtgcagtgcgtatggccacgcctgaagaacagcagcagctgagccttggcggcggggcgcgtgtgctgcacacgcagcgcgtgctcacggcggacggagagcccgtgatggtggaaaacgccgtgtatccttatgaggcctatgcctttctgcaaaaagaagacctgaacggcccgctgtatccccttttgaggaaaaaaggcctgtgccctgcgggcacgcgcacctgccatctggagatggtgcgggcggatgctgaaaacgcccgccttctggctgtgccggagggcgagcccctgtttgagatgcgctcgtgcctcacgctggaagacggcacacctgtgacagtatcggataacttcattgtcgccagccgctacgcattcgatatcccttagctgatggaggccgggatgcaggccggcggccgaatagaaatataaaaggcacagccctgccgggctgtgccttttctcattcttttttcacagcgccgcaataagagcggcactgattttggcggcggtgcggcagtattcgctcacatcgaaatcttttaccaccagcgtttcataggcgttttcatctgcattgtcgctcatggcgcgcagaatgacgaacggcacaccgtttttggccgcgatgtgggccacagctgcaccctccatctccacacagtcgggcgcgcactttacggcaatggccttcttggtggccccgtcgcccacaaactgatctccggtggcaattttgcccacgatatgctttaccccggccgcttcgcaggctgaggcggctgcggccagcaggcgagcgtcagaatggaactcccgcaggtgcgggtacgtctcggcaaacatgcgcggctcaccatcgtggtagaccaccgtgccgcccaaacatacgtcgcccacgcctattttgtccgtcatgttgccggcgatgccggaaaaaacaatagccgtggcgccgaagtgggtgcacagcagctgtgtggcagccgcagcctgtgccttgcctaccccggcgcagcacagcaccgtttttttgccgcccagaaggccgctggtaaaggtgatgccgccgagggtgatgttttcttttgcttccatacaggccgccaggggggcgatttcgtcctccatggcgcccatcaggccgatgatattgtccataccgtactcctgtctttcagaggtgtaaaaagcaatcatacattgaacaggaattcaatgatatcgccgtccttcaccacatattcctttccctcggtgcgctgcaggccctttgcctttacggcggccatgctgaaatcgcacgcggcgaaatcgtcataggcaaccaccgatgcgcggatgaagccgcgctcgaaatcggagtgtatcttgcccgcggcctgcggggccttggtgcctgcgcggatggtccatgcacggcattccttcttgccgtccgtcaggaagctgatgagccccagcaggctgtaactggcctgaatgaggttgtcaaggccggtagcctcgatgcccatttcagccagaaaggcctttttgtcttcgggggaataatcggcgatatcctcctcggtcttggcgcagatgggaatacaccttgctccctcggcaccggccagctttttcaccgtctggtagtgcgggttttcctgcatgccgcccagaaggtcgtcctcactcatgttggcggcgtagatgatgggctttttggtcagcaggcccatctcgcgcaccatggccgtctgttcatcatcctcttcatcgaaggcaaaggtgcgggcgtttttgccctggcccagatgcccggcaagcggagccagccaggcggccgcggccgcggcctttttatcgcctgttttgccggccttttccatttttgcaaggcggttttccaccacctccaaatcgctcaggatgagctcggtgtcgatggtttcgatatcgcgcacagggtccacactgccctccacatgtacgatgtctgtgccgtcaaaacagcgcaccacatgcacaagcgcgtcacattcgcggatattgccaagaaatttattgcctaggccctcgcccttcgaggcgccctttacaaggcctgcaatatccacaaactcgacaatggcgggcgttttcttattggtctgccatatttcggccagcttgtccagccttgcgtccggcacgggcaccacgcccacgttgggctcgatggtgcagaacgggtaattcgctgccccggccccggcgttggtgatggcgttgaacaaggtggatttgcccacatttggaagccccagaatgcctaatttcatttatctcatcagctcctcgaaaagcgcgtatttacaagggtttctggcgactcgacagcgagatgacaccattttgacaccatttttgccactcatgcactttgcaccggatgagggtcgtcaaagtgtgccgcttggtgctgttcaaattgtcgaacgccatttatcaaagaatcaccggttacatgaacataccgatccattgttgttttaatgcttgcatgcccaagcagtttttgcagcaccttcggttgcatgccactctcgattgcgcgtgttgcaaatgtatgtcggagcacgtgcatacaaaaacgcctgatatgagcttcatcgcataatttgtacaaatgcgtatcataagaactgttttttgcaggttcgccggttcggaaattgatgaagacaagatcactcatcacgagcgaccttgttttgccagatttccgatcgataaaaaataaaacttgagaaaggtttgacgactgttttcgagtactgcgggttgcagcaatctgctccagaatatgataggcacggtccgttagaggaatggtgcgatagctttgtttcgttttcggagggccggctctccattcccctacagagtggcgatactccaaagttttattcacggtcaaagtgcggttttcccaatcaatagcgtcccatgttaacccgatcatttcaccggtgcgcagcccagtttccaaaataagtacatattggaaataattgtgagagcgccgcgcagtctctagaaatttttgctgctcttctattgtgagaaaccgaacgtcatctggagaacggatcggctttgtgcatttgacccccttcataggatgcttttggatcaaatcgtttattaaagcagacttgaacatggtgcccattgcgatatacgtctggagaatcgtggagccggcataggtgtcatccataagattcaaaatcatcttgcagtgtagtggcttgacatctgtcagcagcatgctgcctataacgggctgtatgttgcggagatatctgtcacgatagttccttcttgtgttcggagccaaatctccaacgatgtttttgatccagtattcaaaccatgcgtcaactgtcatattggttggaacaaagatgtcgtgcctgtccgtatatctggcatcagccaaccagtttttcgcctcgggaagagtcgaaaagtaattgtcgcgacgtttgccgtgcttgtctacaaaccttgcgtagtacctaccatcctttctttgacaaatgccctttccgcattccttgcctttcaaatttttgcccatttagaactcctttcctacgatgagaaaaagagccagtgcaacaaataaattttatcacaaaggctgattttacacaagagaaaacactcggatagaaactttcaaatcattacttgtttactgatgaattcttcaaattccttgcgttttaccagctttttggtacctacatagagaacaaacgggcaatttggtgcacgcaacatactttcgattttgttaatcccgatattactgtattccgcagcttcttttatagtcatgaccatcttaagatgagaaggtattttatcatacgacgatgcactcatgattgctaacccctttcggcgatgcgccttacagttgaacgaaaaagagcgcatgatagtttaccatgcgcttccggatattgggataaggtgtccaaatttggacaccttacaaagaaaaatcgatgccgggcaagactccaaactgagcaagacggctatatagttcaatcaatcgggtcatccctcgttttcgccgtttcatgaccgtacggatacagtgatggccagcgtctgcaatactttgccaagacataccctcaaaatagtgctttctcaaaacagcagcatcctcgggatataatgtaccaagataggtgtccaatctatttaccagcagcctgtaagcctcaagctgtacagctatgccgagccgggcatccctggtttgatccagcccgatcgtgtgatacgacaaggcaatcgcggctgttttatcggaaatgtggctatcctgtacgggcgcgtctgttggatggctgaatgtcagcgattcgatcagttctcccgcctgctgccgatcaaatggagccagcgatttcagttcaaattcaagtgtggtaatatcccggcaaaactgcgaatagctttccaactggtgaacgacatattcttctatattcacagcagttcaccgcctctctgcagccgcttatagtgcaacgtgaaaggaaaaactttcctgcttccacggttaaagaataccaccgggaaaactgcactcgcaagtacatcaattctgcatattttcatgggcgattcgcgtgtggtgtcagtgtgcatggatgggtgacatactgtgtcgtgtatcgggtgcggcgctgacatcatgcaaacggcaccctgacgagctgggagatagtgtttgagcattttacttcctccttacagcagggcagaagcctgcttgtttgataccgcatatctgcggccaaacaaatttaggaaggaaagaataaccctgttgaaacaaaaagcccttgcaagtattggctgatacttgcaaaagctttccagaatcatggggaggggagggcggatatcgtttctattaaattaaggcaggattacgaaatttgttaacaccaaaaaaacagttgaaattttgtgcaaaaatatataaaaatatttgtgcggcaaatgtgggggccaaaaagtttttaaggcagacgatataaaaaatcataccgtgcacggggatgaagccttagtggtctaatatttccatgaactcagaaaaatctcgcatggttaggccagtatgccaagaggaatcctcttgttttttggcaccataccacactttcagtattccgttatcaatcaacatggaggaccgataaatacagaaatcatcccatccgccagctactgacggtttcaaaattggttgattaaaagtttcccactgttttcctgtccggttcactgcaaaaaacaaattgcagtggtcacagtctgtaccattcggatacgccggataaatcgcataataggtttcggtcggtgcgtcataatggacatcaagatgccatatttgatatccgggctgtaccaaatctgtacaggtaactgcacccgaccagtggattccgtccgccgatgtacgatattttacttgattgttctgactattccagcccgcatttcccgcatctacataccacatcatataggtcccatccggcaggatttcaatggatggtgacagaatgctgtatttacgaatcagatctttcagtacgacctgcggctcactccattgtacgccatcgcgagagctcatcattttcacacgtgaactgatgatgtcatctgcttcgacataatagatccgtaattcgtccaattccggtacatagacaagatctgcatcacagttatggcccggatttggtgtgcaaaccaaaggattggtgacaccttccggcacaacccagttttcaccatcgctcgatgccacaatggaggggttctcataacttccgtcattgaatgggtacggggtcatcgccatccaatatttataaccatgccaaggctggtcaaatttaaccacagagggatgggtgggctggtctgtgccgtcataagtaggaataacttggggtaccgcggcattcatgagcggctgataaggagccagattctgaacggatgttaactccacatcgtcaaaatatcccgccccggaaccactgttttgtctatatccgtaaattgtcgccgtttgtgtctcaggcccagtcgtgaaggtcacggtcaatttttgatattctgccgaaaccgtcgtcgaaaagacttccggcccgccgtaattcttgacgcccaaggtcatgaccgcaccattttcggtttttgcccaaccggttagcacataatttgtatttggggataaggcaacagtctgctcatagccgctgtttttggccacttttgcgcaatagttcccactatgaggagctgtaccggcgactcccgcagtattgaacgggttccatccgctgctatcgccggtttcaaagctgccgttggtcaccaggtcaggtccttcagctgccgctacggacaaaaagctgatgcacagcaacacgcatgcaatcaaacaagcggtcaatcgctttttcatattcaactacacctcttttcaaaaattccgattccgtctccaatttcaatttcgcaaatctcacccacgctgtttatgatttctcctctcgaggaataccatcttccttcgggcagatataccgtgcgccgcaccgccccttgtttcagaattggtgcgaccaacaaataatccccgaccatgaactggtccgtcacttctgcgcaggcgggctctggaaacacataggccatcgggcgcaaaaccggctcgcctgtacgtcggcagtgctccagtgcccgccgcagcagaggcatatagcggttacgcaacgccacggcttgctgtatctgttcatactctctgccagaaagtatgcgccaaggtgcggccgaaaactgcatcatcggcatcaggcaggcgagttgcgcccagcgcaccaccaattcgtgatccagccgttcttgatgatagaaattgcggtattcgccaccgccaatcatgtccggacacaaaaacggatgccctgtcaggctttgcacaatagcgccgggaatcaaggcggccagcccggtgtccccccagctgtgatctttgtcgcaaagccgctgcgccagcgaccaaccgcccgcaccggccgtcacgcggaattcattcaggggatactgttcaccgaaagcagcccaagcacggctttgttcatcgcccgacacagcgccatccgtcggataataaatactgtcacccgcgtcgaatttaaatccgtccacacccagcgcctgtaagccgtccagctgtagcttcagccaactgcaggctgccggcttcctcatatccagtactgcggaccacccgttccaccaatgggcgatatgtggctgcccactctggtccgtcaccaaaagccccgcctgttccagctcacggtattccaacgtgtcaggtgtgataaaagggcatatccaaagcatgactgcaaatcccaggcggtgcagttccgacaacatctgcgccggactgtcaaatttttcaacagagaaatgccagcgtccataataatcactccatccatcgtcaatcatcagtaccccagaaggcaggccatgctccaggatatcataggcataccgtagcacaccctcctgggtttggtggaaagtcagttcaatccaggtgttgtacaccgggctgtcgaacagacgtttgtccagccgaatctcgtgtggggggaagcactgcgccatggcattgaggtatgcctgccgcaggccacccgcgccctggctcagccgcgtcccttcggtgcagcatatccgccctttgcagaatgaaacgtgcatacctgcagggttccacaaccaacgtcccgccgtggaaagcagcaggggcatcatctgattgggcgttcgattccaagtcagatccagctcttgctcgctgtcctccgtgtagggctgatggataccatccgtcacggcaccgccgtaaaatacctctcccggtaaaatcttgatttccatacaacaaaccctcttttattctttactgcgcctgcatatcgtatatctccagttcattgattgcaaagtgcttccatttgaggtttgcatcatgtactctcatacgcagaaagctaatatcttgtacctgctcgaaggaaatggtctgcttctccaacgtcgtatcggcatgattccattccagagtcaagggggaaacgatatcctgccaattctggccgtcccgtgatacctggaacgaaacttgcgtaggagcctgattctgggcgtaccagcaatacatttggacttgattgaaggatacaggggtcggccagctcaatacgatgtccatgggcagtgaaggccggtcgctgctttgtgccgcctcggtatagtctccgtccgtcaaaaggccgccgttttcactatcccattctgatgtgctctcggtggcgatgttgatattcgacaggcttgcagaggaatcttttacaaggatttcattgatagcataatggttccactgcaggttggcactattgattttaatccgcagcgctttgccctgcaccgccggaaatcgaaggatctgattctccacatgccaatcattcccattccagaccacgtcgccagaggctgccacaggcatccatcccgtttcgccatcagcagagacctccagttcccagttggtaggtgcttggccctgcccgtaggcagccttcataataaaggtgtcgaaggtttgtgtatcctcccaatccagatacaaatattgcggaaaagaaggggattcattgctctgcatcgccgagtacgcgtcgttatcaatcatattgctaggcggactgtcccaattccagtcctgtgctgcacctgccacggcataaggcgccacgttctcccccgctgcaggcgcccggttttcggcggcatcccatgccagcatttcatcggtcttgtacacccggaagtagtcaatttcaaaccgttttgggtattcgctgtcataatccggcgtaccgctccacagcggtgaatcattttcatagatacccaaaagagtagtcattttatagtcgggcgactgatctgtttctttgaccagctgaccatcaaagtaaaatttcattccactgggcttccactcgaagccgtacacatggaaatcctgcgacacatcacatgcaggataataatccaggctttgctccttcaggccgccgtccgtccaagggtgcacagagacacgtacccggcttttattcgacttgatatccggcccgcaaatttcaaaaatatcaatttcagcggtttcgtcggcttttgcttctgttccaatcatccaccaggcgctgtgtagcccgctgtcgttaggaatacgcgcccgaagctcaaaatagccgtattttgtttcaaaattagtaaccgcgcggtggtggtcggtaattgtacaggtatcccagaagttgtgcatgccgtcccgcattccagtttggatactcgatatcttttgcacgtcatcaaatgcccaccacggaccctgcgtatccttgtcgatacgcagcgataaaatcccgtccgtcacatcgtaatgggcaaggctctgttccggcgtggtccagtgcggcatgtatgaattggaaaattttgtggggtctaaaaccgcatcgttgaattcctcctgaaacaccaggctccagttttccttgtcagatggctgcgtatcagtaccctcgccatatacaactggcacggatactatgactagtgccaccgacaaaaacagcgccccaatcgttcttttccaacacatatgatccacttcctctctttgtttttacaattctatgattttcccttccaaacgcgagcgctcagcagcccagcaaatcagatggctttccagcgaaactcgggcggaagaaaggctttctttccccccgttctgtacagcgcgcacaaagttccgcattaaataatagtccccgccgccatgtccatagttgttggtttgcggtggtgtttccaccgcgattttccgaggagagtcctctccgaaacggtgtaggtagacgctattcgcattcatatccgccgtaatctgtccctgagtaccgcataccttcagctgccgggccatatccgtggtaaacgccgtcattgtaaagcttgccactgccccattgctgaactccaggttcactacctgacggtctaccacatcgttgtcacagcgatagacgcagcggccgtaaggaccctcctgcagagccttcaaccgtccctcgtagctcaaatctgtagtgagcatgtccgtaggccatcccacattatctgttagataaatttttcgggcatcatagggacacatagcgctctgcgggcaaccgtcggtacaacgcgccggcgcgccttgcggtgcatgcgccacattgaaatagcgtaggctgccgaaactagacaccttcgcgcatcgttgcccgcaaagccaaagcagaatgtccatatcatggcaacttttttgcaggatcatggggctggtctgtttaccactgcgccagttgccccgcacgaagctatgggcgtgatgccaataccccacgttttcaatctgcgtcagagagactacctccccgatctgtccttcgtcgatgaggtgtttgacggtcatataaaagggcgtgtaacgtagtacatggcagacgctcaatacacgttgtgccttttcagatgcctctacaatggcccggcattccgtttcactgttactcataggcttttccagcagcacatgatacccttgtttcaatgcagccagtgtaggttgtgtatgcatatcatccaatgtgcatacaagcgcagtatctgccagctgcgggtaggccagcaacttttcccagctgctgaacgccatgtcatctgggataccgtaagtgcggcataccaaagcacgcctatcctcttttggctccgctacggctatgattcgaagctcttcaggatgttcctgcgcataatgggcgtaaacctgtccccgcgcacctgcaccgatgagaatcgccgttacctgtttcatagttccacctcttttttcgccaggatgcgcaacaattcttcgtaaacggcttcaaatacagctggatcatcgttatagtgttggttgtcttggaacacgcgccctactagtgcatcatgagctgtttcattcctgcagcgaagtaccgccagcagggcggcgtcctctgcgccgcggcgggccgcctctaggcgcatccctagccacgggccgtccgtgcccgggtacacgatgaacgagtccccgcagggaaagttcgtgccgatgcctgtgtggttcgggcagcttgtgcctacgaagggatccatcccggccgggaattgattgaagccccaatgcaggaagcctcccagtcggttcgccgcacagccccagaacagcaggcggcccttcagtactgcaaagtccagaaaacggttgagccaattaccttctggcccacagcacacataggcccacacggattcccccaagacggtcaactcatcgaaatcggctttgcggctctcgtaacccggcgtgccgggcacccaaatatctacgccgccgcgaaactctggtgaagcaaccgcttcaatggtgcgtgcgccaggcaaatatttacgcagaatacttgcagcaagatagtactgccgtttccgggcgagaagtgaggcttcgtctttaaaatggatgtccggctcgtcgtggatatgaaatactactttgtcctgccagccatatttgcgcagaaattccgccagcgcctgcacaaagcgcacagtgaccgcatagccttccggcgtatcaatgggcagatcgggcgccatggcgcatttaaagctgtcggtgtacatatcgggcttcccatccggcagaaaaccacggctcagcaaagtacccaactccatctgctgcattccctcatcgaaaaacgactggatcaggggacgcagatattcaaaatcaaatgtatagggggtacggcttgcaacacaggcctcatccagttcaatataaaacatcgtttgatgagcgcgccgcatagtgcgggcatagcggcgcaccatttcatagaaagccggcgtctctttttgtaggccatggcagcggctgatggcatccaaactgaaccagtttgtcacggggaaagtatcctgtgggatctctatgtcatatacctgtatggtcagttggcagcaataactccccagtcgcagcactgccgtatgcgtaccggcatcaagcccaggccgggggcacagacaaatatacaatgctgcacgcccattttgagattcaatcacaccgtcagccgccggcttgaggcagtcatacacttcaaagggggccatccgggttgcgtaagacggtttataagtggggcgttgttccaacaccatcgcaccgccttgctcactgccgtccccggtgttatattccacaggcacggctttcatacaaaaaaattccggggtaaatgcattgctttccaaagatgcacacagctgcacagctttcgtttcaagtaaaagctgcacacctggctggccattacgcggcattgccagccttaggcttttaggaagcggcttcaaaggcatatcgggatagaaaaactcttcccgcccgctgagagcgccccggaagataaactgctccatggttgttcctcctaaaaagcgcgggccgaggcgtgagaagcccggcccgcgcagtgttttttgttttgttattctgccttgatgccaagttctgcagcccttgcattgacctctgccagcatatccgaaaggccctttgtctcgtaatttgccagcaaatcatcgaccatcttttccaccggttcgttacccatcataatttgcagcaggtcatcattcgtattgtaaacgaacgcatccttcaatggggtggagaggaagagcacgctgtcataataagtcggcagtgtaccattttgcacggcatcttcgtggcgcgcagtgttcagcgcacgatactcttcagaaattgtggagggataatcgttattccaatattcgggattccacatggccagatcggcgatattgctgttcacatttttgaatgtgtatttttccgccaggtttacgccttctttcataacgacctcgccgtccaccacatcgtagtcctcgccctcgataccgcagtacacaaggcgctgaccttcttctgagtacagataatcgaacagtctgcagatagccgccatcttttcatcgtccacgttggcggagatgtagctctcagaccaggcttcagtatcaacaaaataatatttgttgccgtcctctgaggggtacagcttggcaatacgattgtcctctaggaaactgccctcgccgtacagagcgtcataatctttgccgatctgcgcctccaagcctgcgggaccggaccatgcaaataccatagccgcactctgcccctgaagatatttttccttgctggtttccagttttgccaaagcgatatccttttcaatcacaccatcggtatacatatcgcgggcaaactgcatagcacttactaatgcatcgcggtctgcaaaatagctcggtacgaattggccgtcctcatcagcaacccactttttgtcgatgattccagcataaggatacacaaagccgccaatcagttcgggcagagcctgcgtcatgccggaaatgcctttgccctccgggtctgcctcaatgatagccttgatcatatcgcagaactcctcgtaggtttcgggctctttggtcacgccagccgcttgggctagatcccagcgatataccacattgcggtccaacacgctgtaagagatatcaccgtaggtagtgcgcggaatcatatagaacttaccgtcgcgtgccgcagcctgtgcgcgctccatctgcatatgctcagccagattgggataagccgaaagatcttccggcagcgctcgaatcaccccctgctcgatccagttgccgtagaacgattttgctacaaagtcgcctgcgaagatatccggcagctggccgttagtggcccacagctggattttctgctctgaatcgtcccaagtgacatgctgtgataccaagcgcacgcctgtttcttcttcgattttcttcaatatggggtcattgggatcagccaaaccatcatccgcgccccaaatcgccacactaacctctatcgggctgctggatgatgctgagccggaaccactgggagaaacatcgcttgatgccggagctccgcatccggtaaatatccctgctgccatgagtgtactgagcaccaatgctgtgaatcgttttgcctttttcatgttcatgttcaactcctttttaatcttctatcacaaggatcggtccctattccttaatggaaccaatcatgatacctttaacaaaatatttttgcaggaaaggatacaggcacaaaataggcagcatagtaatgacgattgccgccatttgtaccgattggacgaataccttgtcgcccgaaagcatggactgcgcctggcttcccaattgagtattaaaactgactaggatatcgcgcaggtaaatctgcagcggcttgatgtccttatcattgatgtagagaaacgcttcccaccagctgttccatctctcgactgcgtagaacagtgtgaatgtggccataaacggtttggagataggtaaaaagattcgtgtaaggattacgaattcattggcgccatcaatccgggcggcttcctccaggcttgacggcatactggcaaaatagtttttcataatgatgaggtagtatgtactgatcatcgtaggcaggatcatactccatatggtattatccagatttaaatcgcagatgaccagataagtgggaatcaagccgccggaaaacagcatagtaaataaaattgctttgaggaaaaatttacggccaatcagccgtttacggcttaaaacatatgcggcaaccaccgtagacagcatattgagcgcggtacccaccactgttaccaacaatgtggtacctagagatttgaaaaaatacacatccttgataactgccttataaccagtcaagtcaaacacatgaggaaacaggtagggagtatactttgcactggttacggtattggaaaatgagacaatcagcacattgtagaacgggtatagtgttatcagcgccaaaacgccgaaaaaaagatacaaacatatatcaaaaagggtcagctttttctttgtttttaagcccattgcccgtcactcctttaaaacagcccatcttcacccagtttagtggttactttgttggccgtccaaatcatcacaactccaattacagacttcagcaggccgacggccgtagtgtagccgaaattagtgccaaccatgaaggactggcgataaacatatgtatcaatgacatctgccacaggatacaccggcgccgaatacagattaaaaatctggtcaaacgatgcgccgctcataatcccaccgacctgtagaatcagcatgatgcagactgtgcttcgaattcccggccaagtgatgtgcagcatcttctgcaggcggttcgcgccatcgatgctggccgcttcgtatagctgagggtcaatgctggtgagagccgccatgtagatgatggagtcccatccaaactccttccagatatttgaaatccagataaacggacggaatgacgataacgacatcaacggagccacttgttcaaatcccattcgaacgagcaactggttgataatgccattagaggcaaacatgttgatgaggattccagaaagcaccacccaggagatgaaatgcgggaaagtaaatacagtctggaaaaactttttcactcgcggatgccggatttcattgagcaggattgcaacgataatcggtactgggaagtgaaacagcaatttcccgaaactgaaaatcagcgtgtttgaaaaagcgcgccagaactcggcatcttggaacattgtccgaaagtgctgcaaccctacccaaggactattccacaagcccatatcgtagcggtaattgcggaacgccagcgtaatgcctcccatgggcagatagcaaaaaatgatataccacagcaggattggcaacagtagcgcatacagcatccagtcgtttttcaactgttttcgtacttggtgccaccgcccgttgcatagctttgactgttgggtcataaggcgttctcctttctgctttcttctgatttgtatttttattataccgcttgaaatcagtttaccggtatggagaaagcgcatgagattttcttttcaaaatggaaaaaggcccagatgattatggaaaaaacatagtttatacataaaatatggaatttttttagaattttttacatgtgcgcttatgatgttggcttttttccatatcaatctctttacatcaatgctatactgaagatgtattaatcggtaaggagcaacagccatgtcacagttctttacaaagaaaattatgaaacagtttcgctttatatcttgctgtttactggtcatgggactcgtgctgtcactgctgtattacataatgattgaacggttgatgacaaaaaattctttggaatatgccgagagtattgcgcaaaagttcaatctggagatagaatatctatttgaatatgcggacacgctgttcaataatctgttattcgatgaaaatattgaacagatcatgcacactcctttttcttctcaaacaccagctcaacttaattccttgcatgcctcgttttcatcttaccgtctcatgaatccagatcttgcagaaattgctctcgtaaccccggagatgtcttggtcaagctacttcgatacgacaactctaagaaagcttagcgaggaaatgagcgatgctcacggcaccatatgctttgggctgaagaaatcacctcttatagcacgcgcagacagtaaggagcagaggcttgtatttggacacaatgtttatggtatgcatggcagcgacttgtacggccagtatctggggagcattattttatcgctggatctctccaagtcctcaatccaactgcccttatccgaacgagccgcaaccagttttatcctgctggatcaaaatggtgcggcgtttccgttcaattgcagcgatgagcaatatcagcagattcgggaacaggggctggccgcaggtcacggaagctggcttataggcacttgtcaaactgaggactacttaatttataacgctccgctcaatgataccgggctttttatagtcagtgctatggaccggcacgcgctcagcgaggaagggattcctacatttgccgctcttattattataacaactgctactctgctcgtactcatactgatgatgaatttgatgctgcaaagtgtggtaaagcctttggggcaattatcagcgtatattgaccgtattcggctcacgcctccgggaaccagtgctgcgctgccccatctgcagggatgtgaagaaatcacccgcttaaacaattcctttaatgctatgcttagtgagcaggctcatctaacccgtgaattgcagcaggctacagtcaatttgtacgaaactcagttgggccgtaagcaggcggagctggagtatttgcgcagccaaattaatccacattttctttataacacgctggaggcaatctcgggaattgcattggaacatgatgttcctgaaatcgctgatgcagcgggcgcgctgggtaagctattcagacacaatatccagggcggtgatatgattccattgggcaaagaattggaaatcacccaggcttacctcacgattcaaaagctgcgctttgctgataaactgaacgtgctgatcagtattcgagaaaatacccgcgccattcctgtgataaaattgttgcttcagccattggtggaaaacgccgtctatcatggtctggaacccaaaactggacccggtaccctgtttatcggcgcacggttggaaaacagtgatctgctcatcagcatttatgacgatggtgtggggatgccgcctgcccgcctggaagctttacaggcagaattggaacgtcccaccgcaaacagtaggacagaaaatgcgcatatcgggctgttgaatgtccaacgccgtatccggttgcgctacggtgcgccatacggcctaacactgcacagtgcaatgggtacaggcacccgtgtgacagtccgtgtgcctgcgcaggcacgagaaagagaggaagagttatgctgaaggttttgctcgcggacgatgaagcgggcacgctgcatcacctgatgaccagcgtaccttggtctcagttgggcatggtggtctccggcactgcctctaacggcgccgaagcgcttgcattcattgaatcaaatccggtggatcttttgatcacagatatccgtatgcctggtatggacggactggagttgtgccagcgcgtgcgcgaacagcattgtgatatacccattatcctgttgacgggttatacagattttgaatacgcacgtcgcggtattgaacttcaagtaaccggatattgcctaaaaccgattgacacagaacagctgaccgcaacgctgcggcgtgctgtacgccaaggctacagccggacttcttctcattcggatgcactgttggatcttatcgaggagggcgaccctcaggaaatcggacgttccttttccgagctcgggctgagaggaaaccgcatctatgttgccggttcctttggcgttcataatgtcgaagaggcaatcggtggccaattttcctgcaaagtgggaagacacaaatacctatacttttcctgccggccatttcatgtgcaggaggctgcacatatcatcgcgtttgctaaaaagcgcagcggcatcggtctgtttccgaccccagtaacccatggggagatcgctcgcgccatcagcgatgtactcgtgttgacatttcagtattttgtcaatggccagtcaaccttatgcgatcatctggtagatgggcccctaacccacgagttgttccgccaacttcccgtaaaaggaaaggatcctgtgcagctcaaggcctggctgcacgaacttgcccaagcaaactgttcgttgctttttaatattcgcacggcattccgctttttgaatcaggttcttctttcgcctgcgatgcaagatagcagggaaggctgccttgacagttttgaacagatggcagccgattatccgtgcctcgcggacctgttagaagatctcagcaccgccgtgaatttacaggaaacacagcctgctgccgcctttgaaggccctgacagctttttatccattatgaattatctcaacacacactatgagcagactgtctctctaaaacgtgtctcagaggaacttcaccttaacgcatcttacatcagtcaattgataaaaaatgaaaccggtttaaactatacgcaatatatcactgaactgcgtatcggaaaagctaaagagttgttggtgaatacaaagctctctctggccgagatcagcgaagcggtaggcttcaatgactatttttatttcatcaaaaagtttaaacgagaggtcggcgtgacgcccggcaaatttttgcaacatgaaaagggaacgggtgatatgcccgctctgaaaagggggtgattcgcatgaccgcagaagaattagccgcccggctctctctgccgaaagcggtgcagcagcaggtctttgcagtatcgatttcccccgcgcaggaacaagaatgggccgagatatttcttagcgatcaagaagcttttgagttggatttgcgccgtcatcccacaccggaacttctggcgctggcgctttatctgcgttgggccgttgcgacctatcatcgctatctcactcttgggattccagaagctgttttctgggatacttttcaagactttgtgctgtggagtgaagaatgtacgcgcgtcactggtcgaccaggattgattgaatgggggtggaatgcattattgttgcgcatggaggttttccggcttgggcgtttggagtatcagccccgcatacttgaacaagagatcgtgtccgggaaaatcgccctggccgcaggtacaccaatattagaagtacatattcccgcaggcacgccgttagatcggcataaattgtcagcgtcgctatgttcggccgggcctttttttgaacggcactttcaacgcagctttttctggttccactgtcattcctggctgttgtcacctgctctgcgagatttgcttcctccttcatcgggaatccttcaatttcaagatttttttaccatttacaacgaagatttttcattcccgcaggcagaacaacgtgtcttcgggaacgtacaggcagatccacagcagtatactgagtataccagtctgcaacgtgccttgaagaagtatctccttgccggaaagcgtataggaatgggaatggggattgcatatagagccctcgttgaggatacaggtggaccagatgagtaaacttatcgtgtcttacagtaatggtaggatgagtttactgcactcattttactgccggggtgcggtaggtgtgatcttaggtagtattctaaaaattgctatcctcatttttcacctctacttgatattcataaatgaaaaaggtcatatcaccttttttaccttttatatcaataagctgtttcttctcacaacgtcttgttagtcctaaatattcgtaaaaaggatagttacaactggtatctgtaaacaagtaaaattgagcgattcctgttgatttcatgtaatcaacaactgtctggaataattttcgccctaatccctttccgcggcacttttcacttatagcgaagaacgccaattctcctctatactccttatcgcaagaggaaagcaattctttatcaatcccttgcacacactcaaatattttagagatttctcgtccctctttggatatgtagagagaaacgattgattgtatccattggatacgcagggaaagggggcatttatggttccgaatatcttttcccatgataatgccgacaggttcaccgtttatctctgcaactcttgtaaatgtctgattgataaggcaactgttcaaatatacttttgccattttcgctgccgttttaggggaacagaagaggtcatacttccatgcttcccgcaccacattttccagtactttatggtctgctttctgatattctcttaaaataatttgttcactcattttcagcgtgttcctttctttccaaaattgttttgggtatttcctgatacctttttagcaaatagtcttttccttttgtgcgccatctaaaggtcgtgattgccagcccacctataaaaatcaatgcagctattcctaagctgtgtttatatccggttaattcgagaataaagtaactgataatggacgaaatcattgtggctgcaagataaattcctataacatattgttgtacttttgcttccggaagggatagaaaaaaattatcccattcatcagagttaaattgaagctgcctgccttttatccaaaatgccaatagaaaaataccgattgctaaccctttgcacaatagtgtttttaaccctattattgcgattagcagtaataaatacattgtaaaattcccctttctgcttgctttactgtatttcttaatctataataaaccgtacagcaacagtacagtcaagggggatttttgtgttttatgataccaacaaattatttacaatcgggcaattcgcaaagctgcacgaaatcaacaaaaagaccttaatgtggtatgatgaaatcggcatattgaaaccagcagtaattaaagaaaatggctaccggtattacagcttcgggcagagttccatattggaaaccattcttatgctgcgcgaattaaacgtttcaatttctaaaatacaaaactttttgaaaaatcgctcggcttcttctttagaaaccctattggcagataaagttagagaattggacgataccatatctcatcttaaagcactaagggcaattatgaatgaaaaacgctggaatatgtccatgctccgcaacttagatatatctgaatgttcaatcgtggaaaaaccggaaacacactatcttgtaactgtatctacctcgcacaacactccttttgaacaggaagtggaaatggtggtggcagaaacaaaaaaataccagttaaggcgtttgcatgacgcttcttatggagctataatgccggtagaaaatctgtatcgcggcaatctcaacggttattcggctctttacattgagctaccatttccagcacaccgaaaagggcttcatgttcaaccaaaaggaaaatatctaagggctttttgcaagggagattggggtaatttgcccggccgctatatggaaattctcgcttatgcaaaagaaaaccatctgcaattttacggttatgcgtatgaaaaagctatcaacgaacttatcattgataccttagacgattacatcactcaaattgagatacccattaaaacggaataatgtggggtgctgtctatctaaatttttatgtgttactttatggcacatgagcatatgtggccgggaactatccgcctttcttccccaaagtgtccgaaaggcggcaccgctatgtttgcttttttggcgctagcaggggatttcggtgctacagtcagtccagctatgatgggaaatttctcggaaatggctggtgggaatctgaaaatagggctgctggccgccacaatcttcccgatccttttagtggtaggtttggttgtattgaaccgaagaatgacatgttccatcccaaagtgattggatagtaaaagacaaaaaagataactaggcttcttgccctcgttctcgatacgatatagaaatctctcggctactccaattctgtttgccagagattcaaccgtaatatacgccttgctgcgagtgttcttgaggatctcgccaagtgcttcatattgattctgcactttgggctcatctctctttctattgtacggatttataccagctttataatggcataacagttcaatttttatattatcacattacgcagaaagccgtccaagtgctatcttgggcggcttttttacgtgaatagaccggaaggaggctaaaaataattacagaaattctttatgaagcataaaaacgaagagccgcagctgtttttggctgcggctcttcgtgttatctgtggtgaacagtttcatagaggtgccctttttgtgcgcagagagacgctgccctcatccggcctgggcgcgacttctccgtacgggcccggcggataaatgccgttcaaagagtgcgctacacgttcggtccgctcaacgcgcctgtcgcgagctctgccacggtgtccatcgctgtccgggtcgggaatgtctccactagtatggtaggaacggcagcctccgggcagtatatcggcgaggaggccgccaagcaggccgcgctcacccacgcgggcaaaacacccgacgctgtgagctttgtgcgctgccatctggattttgacgacggccgctggaagtatgaagtggagttctatgagggcaacaccgagtacgactacgacatcgacgccgccacgggcgatatcatctcatacgactatgacgccgagtactacaacccttcctccaatgggcagacggcggtgcccggcgcggccatcaccgccgagcaggccaagcagattgccctgcagcacgccggcgtggaggaagccagcacccgccgcatggagatggatgtcgactacgaccacggccgcacggtgtatgaattcagctggaaggtggactggacggaatacgagtatgaaatcgacgcctccaccgacgacattgtcagcttcagccaggaacaggattgacagagaaccggttcgggcgcgcttgacaagcccagcgggcggttgatatgataaacctgcagcgcctgcaccgatgcggaaaacgcggcaggcaatttcgataaagccgctgttctgcgggcgcacccgttggaaaagccggatgcggccccacctttttgccgtgtacctgcgtacaggcgggcgaaaaggaagggcgttgtttcatccggctttttcttgtcatacatcggaagagccgcattgataagaaattgcccggcacacaatcatacggagggccattatgggggaacaaattaaaatccggaacgaaaaaaggtctgattacgagacggtggaagctataacaagaaagaccttttataatctttatattccgggatgtgtggagcactatttggtgcatattatgcgggagcatgaagattttatcccggagctggattttgtcttggagcggaatggaactgtcattggaaacatcatgtacacgaaagcatggctgactgatgaagccggctgggaaaaagaaattttaacattcggcccggtaagtattgttccagaataccagaggatgggctacgggaaagcgcttatggagcattcctttgcagccgcggcagcattgggatatgaggcgatcgtgatcttcggcagccctgtgaattatgtcagccgcggattcaaaagctgcaagaaatacagcgtatgcgctgaaaatggaaggtatcccgcggccatgctggtaaaggaactggtcccccaagcccttgccgggcactgctggagataccgggaaagcagcgttatggccgtcagtgaggagcaggcgcaaaagtatgacgacgctcttgaacggctggaaaagcggtaccagcccagccaggacgaattctatattatgagtcgctcttttgtggaagatgattaactggtgaaagcatcggctgcaaatgacagaaccgggcaggtacagtttgtttgcaccgggccggagatcatacagggagagaatatggaactgcattttgagagagtgaaccgcaagaaccgagctgaaatagaagggctggagctgtttcctgcacaggccgggtttatcgaaagcgtgagcgagtgcctgcgggaagcggatgaactggagctgtggcggcccgtcggcatttatgacggccccgttctggtggggtttgcaatgtacggctttttcccaaagcccgctccagggcagctgtggctggaccggctgctgatcgataaaaaataccagggcaggggctatggcaggcaggctgtactggggctgctggagcgggtacatcgggaatatccgtgcgggcaggcctatctcagcgtgtacagggacaacgttcgcgcgatccgcctttattcagagcttggattccgctttaacggagaatatgacaccaagggcgagagcataatggtgtatgagtttgaataacaagctttaggaaataaagcaaccagaaaaaaggagcacctcagctatttttgctgcggcgctccttttctctttgtggaagctgtaaacattttgatgccaatcgcacaggggggtcataattttctgagaacagggaattcaaggataaaacggcatccatgagggactgcgtcctctacacgcacatctccgccatgctgtcgtgcgatccgccttacaaccgcaaggccgagtccattgccgcccatctgacggctgcgggacttatccacccggtagaaggcctcaaatatcctcgctttttctgcatcggaaagtccagggcctgtatcagaaatacaaatctgcacatggcgttcccgggtattcagttcaacatgcaccacactgttctcagctccatatttgactgcgttttccatcagattgaacaacgcacggtacagcaggcactggttcccctccataatggcctcgccgcagatgtcaaaggaaatatcccgggctgccgccgccagcttcagttctgcggcggcgtcggacgcaagcgcgtccagagatacagcctggaattcgtccagccactgcggtgaagagaggagaaacagttgttctgtaagctctgacaggcgggccacatttccctgaacttgcgcaagcagagcttcatattcctgagatgtccttcgtttcatgcggaacacctctattcggctttggatggcggccagaggtgttcggagctcatgagctgcgcttgcggcgaactctttctgcgcgcgataggcatctcccacgcggcgtgtcatatccgagatggcctgcgacagccgttctgtttcgtcgccagtctgcgggacggcaatggcctccggctccagactgtccgcgtccatcctgtccacagctgcggccagtgcctccagcggccgcagctgacggagtaccagccaataggccgccccgcttcccgccaggatcaccacagccatggcaattaagttctgaatgcgaaatgatccctgcgcggcagagaccagctctgccgcagcggcaggtgtcgtgagtacggcgttttcgctgtccgactgttctgggaggcctccggcgataccaatcggctgcatggggacagcatccacgatctgttgtgaagaagagagcgcaacggaagtgagcagtatacagccggcggcca

SEQ ID NO: 4104 - DNA, 32759 bp, Unknown
  16S sequences of unknown bacteria
aactttctttgctatgcagttgtgaatcttcggttcaacccccgactaaagtcgggacgctgtataaaagaggttgcctctttcggtgacagcttatacataatagcacttagaaaaaattatgtcaagtgttttttttatcttttttaagatttttgaaatttttttgaaacattcgacaaaaaacaccatgaacgcatgatctattgcagttctatataattatggtcgcgcgaagtcaagaaacaaaaagaattacagtaaaatcgctcgacattagttgaaaccgcacaaagaaatttattgtttccaagagacaatcaatgacagccgctgcaagtggaacagtgtcccgtacaggacgagggctttttccccgtcgaggaatatacggctcccgaataatcccgaaccgtttctcctccgcaatcgggacaaaccactttttcggtatgagattttaccaactcttcaaacttttttccgcatttgctgcatttatactgtaaaataggcatcagccgcgcctccttttcttttttacttgtttaggggtacgaattttcaccgaatcggtcatttttacgagcagtaccgaacagaccgccgtaaggacgacagaaatggcgagaatcaaccaaaactcccacgcagcgccgtctccatgtacgcccataccgaaaggaagatcgacattcatgccgagcaggcctgcgatgagcgtcggaattgccaccaaaatcgtgatgacggtcaaacgcttgacgacattatttacattattggaaataacggaactgaacgcatccatggtcgttttcaaaatatctcgatagatgctacacatctctacggcctgacgagtctcaatgagcacatcgtcgtacaaatcctgataatcgggattggactgaacgggttccatgcgggaaagccgaccgtatacggaagaattcgcgctcagggaagtggagaaatacacaagggagtcttgcaggcccaaaagctcgatgagttcctgatttcgcatggatttatgaagttctgcctgcaaacgcagggattttttatcgatttgcttcaacgaataggaaaaacgcttgacgttttccagcatgaaattgagaataaatcccacgggtttgagcgtggaaatccgactccggttagagctgaaatttgcaaggacgggattcggattcaaagataccgtcacgatacatttattattgtaaataatggcgacgggaatggtcgtataggaatccccttcctccgtatctaccatcatcgggctatccaccacgtacatggtagcgccctcatcggtatctacccgtgcggattcctcttcgtccaatgcggctttgagcatttcttcgggaattccgctcagttcacagatatcgtccacttcgtcgtccgtgggattgaccatttccacccaacagcgcctttcaaaggcgtccgcaggcacaatgcgcaggttttcatcagttttgtaaaattttatcataatcgtaccgcctcaaaaaataagtgttcaaaggcgtctttacggcaattttccgaaggaaaatgcgtaaaaaaacgcacgggaaaaaccgcccgtgcgtcgtactcttttcaatatcgaaggtcagtcaataaacaaatcttctgtaaaatcgtacatatcgaggcacagcggatctcctgaaattgtggtcttgctacttcggttgtcagggacagcgtccataattgctccttgtttggaaatattccgtcggaaaatcagaaaatatccgattatgcttccgacttacttctatatctattatacgccccaaaacctattttggcaagtatttttccacaaaaatttttcagatatttttccgcccgattatataaccgcctttccgctcaaaaacgaatcgaaaaagcctgccacatctacccccgatttttcaaaacagcctatcatatcctccggttcggctgtcttgaacttatagccggaatagtatctcttaagtcccgcaaaaaagcgtttgtctccgatggacgtgcgcagagtatcgaataaaatcgcgcctttatcgtaagctatgctgcgatattcatattcgctcagatagtctttgagcgaacgagtcatacgcgtatccgcgtctccgaatacttggctgtaaacgttataataggaacgatattccgccaaagcgtccgcaatgagctgttcgcgcgtaaatccgtagtcgggatgattttcaaagaacagcgcggcggaatattccgtcagcccctcgtcctgccatgcgttttccacctgattgctgcctacggcgacacaccaccattggtgggcggtctcatgtacgatcgtatacaagcagttttcttccgtcagagcgtcgctgataagcaccaatcccggaaattccattccgccgtagcagaaccccgtctgaaccacagaatacgtttcataagggtacttgccgaatgtcgaggaataataggcgagagcctcctgcgccgccgcgaggtgcgccgcaggtttttcgtcgttgtagtaataatagcgaatgtctatcccctcccatttgctttcggccacctcaaagcaatcggagagcacgatagcgaaatcgcggacgttcgtcgcagacatgacatattcttttttgctttccaaggtccgttcggaagtgatttttcccgtcgcggcgacggtataatccttgggaacggtcaacgtcactttatacgaagcgcattcggaaaagaagggatcgccgtcggaatagtaaacgcactcataaaaaccgtcgtcggtataagcgcagagaatggggaagaaatttccgagattgactgatttttgtcccacaccggtgcggtgattgatttttgcaagcttggtcagaaaacaaatattcaagtttactttatcgcccggaaacagagattcttcgagcgaaacactgagaatattttcgtcctcaccctttatttcccaattttttgctccgtcaacactggaaatctccatgctcccgtaactttttcccgcataataggcagaggaggaatagacggcggacaccggctgataagcggcgtcctcgcgataagcgttcggatacaggttgaacttcagttcgctgatttcgtttgccgtcgtatttttgtattccactttcatcatcgcggtcaatgtagcggtttcgggaacatattcggcggtaatctcatatacgcactcgccgctttcggaatctttacagccgaccgctccgatcatcagagcgacaaggctcacggcggaaagcaaaaaacaaagaatacgtttcataaaaaaataacccctaaaaagtattagcaggttattttatgcaaaaataattcgctttatgactgtataaaacgccggccgcacctcgcggaaacgaccggcttgttttttacttttcttcaaaggtgagatattttgcgggatcgaccgtcgcattgttttcaaacacttcgaaatgcaggtgcgggccgtccttatattccttgccgttcgcctccgctacggtcgcgatgacgtcgcccttctttacttcgtcgccggctttcagcccttctttcgcctctacatattcgtagactgtctttattccgtcgccgtgatcgatgataatctgcgtacctacaaggacgtcggaagtatagatactttcgatttttcccgaacgcgccgcaaagacttccgtacccgccgccgcggaaaaatcgacacctgtatgttcatagtagttgttcagcgtctggttataatagaaaccatattcgttgctgatactcaccacctccacgggcataccgaattcctccggtgtgttgatgacatcttgatcgtcatctgacgatccgccttgcgtcgtatcgctgtgattgagctgattatcgcggctggccaaagccaccgaagtaatgattatcgccgccgccagaagtaccgccgcacatccgagagcgatatacatatacaattttttgtttcttacgctcgtatgcgatttaccgctttcgttctgttccttcatttttgaaatcctccgaaaaatgtattttgtatgtaaattgttgcccccgattttgtattttatacttaaaaataaaaaatttttatcaggggagaattttttctctgttccatcgatttgaaggttctcttttctcaatatcctccgaagataatcggcgtccctaaaacgatgctttctgtccgtacggcaatatgcaaatttatttttttccctctaagcaccactccgcctttcaacatgggcgaataacaataataagagaccgttcccgaaatctcttcggcaaagcacagctttgcccgataacgattaataatcttttcggcaatttcttttccttccgcggataagccttttccttcttccgtcaaactgccctttgcgccgacatcgaggtagacgacgctctcgccgctcaaagccgccaaatcgcaaagttcgagagtctctgatatctccgcctgtgaagacggggaataaagataataggtgctccgtccccccgaaaaagcggaaacattcatgagacagacggtcagtccgataaacagggacgccagtagagccgccgcagctgaaaaaaactgttttatgccgaaggccataaaaaatccctcccgcaggaccttcaaggtcttgcgaaagggattattgacacctttttcggattttataacttattttttatttacttgcgattatccgcccgtttgcaagcaaatagtagtttggtccgaaataatgatattcgtatctgtatatgtactccacgccgttgaaaaccgccgaaatatccttgctcttatatcctccgaccttttcgcaggcatatactttcccgtcgatgatgattttcgcttttccccagacgaatggagaggctttgacttttatcagcgaattgttatatcttgcctccaaaatagcacggcctttcgatgtatcttcttcgataacgggagaatccgatttattgttcatcggcgcggcggaaccgtttccgttctcggcgaccgaagaattgtccccgccgcagttttccccgtcggaagagacagttgttccgacggagtttcccgcgcctgagggaacggcggctccgttcaaaggagcccccgtatgcgggtcgatactgttttccaagcggtacgcctcatctaattgagccgccgtcaaatttactccctgcgggaaatgcttttggagctctcccgatgatttcacacccaaaaccagatagtacatcatgagtgcgtgaaagacgatatccaccaataacgaaagtcccccgtcctttatcgttaaaatacaactgacaataagccaaatcgaatccaaagaaaacaataccaaaaggataattatcgcccagcggtgttttttggaaagcagccaaaagacgaaaaacacggcaagaatgagaagtcctatcgcaaagcctaaagtcaagaagctattcccgtatacttccttccagacgatgcccgcggcaaagaacgaagtgctgctgtaaatgctgaaaaggaaatacacgtccgcaaacagcatgaacatattgacgatcgtaaaaattatgaacaccataatgttcgttcttgcaatcttataatttttgatctcttttgaaaccttgatatactctttattatccattattttccctcatctttccttaaaatcccgtcaagggctctccgccgagcaaatgaatatgcaaatgctgaacggtctgtcctccgttttcgccttgattgataataattcggtagccgtcctgtaagcccaacgtatcccgaagttcggcgattttcaaaaaacagcgttttaagagctccgcacgattctcatcgagctgcgaaagatacgcgaaatgttctttcggaatgcagagataatgaagttttgccttaggttcgatgtccttgatgacgatgagatcctcgtcctcgtacactttcgcagatggaatttccccgcgaatgattttgcaaaagatacagttttccatttcgttactccttgttatttttattattttccgcacccgccatagatacggtcaaattcttttgcgaaaagcggaacgccgcctgttcggccatccaactctccctccctggaaataaatcgcaatgagtcgggcaaaatatcgtttcttatatgtatgccgcgatttctgttttgaatgttcctccacggttttactctcttttttcgtaaacgttgtcgaactcttccgtcgtctccggaatttttccatacgggtttcttttcaatataatcgcaaaaatcatatcgagaaagagcattataagcatcaatcctcgaaaaatcgccccgaaaatctccaccccgccggcgtcgatgaagcccgaaagcgctcctgtaatccaatccaatacaataaaggcaatcaaagccccgacggcagaaggttcccttcccgaaagcaggcaaagcacgacaacgatgaaaaagaccgacaccgcccctaaaaatcctattcccgacggatcggacaaaaagcacgcagtcgataaaaagaaggtaaagggaataagtcctcctatttcaaaaccattttcaaaaatcctgaacagaaaaacaagtaaaatcgttattcccgtcagcgtaagaaacgcaacgaccgtaccgaatgagatccatctgataaccgtataagcgtccgtcagcttcctgagtttatcccactcgttctcattcagcttcgttcttctctcttcgacattttgttttctcattgtttttcctcaccgcaggccgccttcaagccgtctcggaaaagttcttcgacgcatacacgggtaagccgtttttccaatttttcgggaatataaagacgaatgtaattttccgaatatccttccgtatatccgtccgaaaaacattcgggaacgatttccagcgtcctgccgataaatttttccatatattttcgtttttcttccgcgccttttttgagcagcctttgcagtcgctccttttttaccgccgcgggaatatcctcatatttcttccacgcgttcgttccctcgcgcggagaatagggaaaggcgtgaatctgtgcaaaccccgcttcctccacgatgcgcagggaatcgagaaaatcctcctccgtttcggtgggaaagcccacgataatatccgtcgtgattgcggcatcgggaaaataccgataaatcagagcgcatttttcgagatattcgcccctcgtatagtgacggttcatacttttcagcaccttatccgaaccgctctgcaacgacaaatgaaactgcggcgcaaatttttttaccgcttttgccgccaccaaaaagcgctccgtaatcagactcacctcgatagaccccaatcttatgcgcgtatccgcgtccttcacggcgaaaatcaaatcggcgaggtcgcgccctttttcgtcaaggtaggaagaaatatctattcccgtgactaccgtctcctgtgccgtgctgtccgaaatttctttcgcggcgctctctaaaagcctcgaacggctccgcccccgcagatacggaatgacgcaataggagcaaaagcgattgcacccgtcttgaattttcacaaaagcgcgcgttttcaaacattcgggcaagggcatttcgtcatagattttatcttctttgtcaatgtttaccccgagcaattcccgcgaaaaacccgacgccgcaatttcgagaatttttcccttccgtttcgctcccgtcacggaaatcacctgttcccgccttgcaaacggggcgggattcttctccgacgcacagccgcagaccaatacttttgcctgcggattgaatttcagcgctttggaaatggcctgccgactcttatgttccgcctccgcggtcaccgcgcaggtattgacgatatacagatccgcaggctccaattctcgcgaaacggtatatccgagcttctccaagcctcggattaaagacccgctttccacgtcgttgactttacatccgagcgtaaaaacgaccgccttcattcctttcctccccgacggccgcccaattctccgagcgaaaacatcacgaccgccgtcaaggccacggcggcggtctccgctctgagaatccgcttgccgagcgtaatggaggaaaatccgttttcctttgccaaagccgcctctttctccgaaaatcctccctcgctgcccacgatcagagcgcagccccctttaagagtcgaaagctccgcctcactgtcttttgcaaactcgcaggcaaacagcttattttcatacccgtccgcttcttttaaggcgctttgaaaatccccgcaatagataacgcggggtgccacggagcgcagacattgtttcgccgcttccctggataccttattcaggcgttccaacttattttcgttcatgtaagcggaagaatattccgacgaaaaagcgacgattttctttacgcccagttccaccgctttctgtacgataaattcatttttatccgcgtttttcaggtacccgaacaggagagcgacgtccgcagtcgcttccctgtccccttcgttctctccgataacgtgcaatttcatgcagcgtttttccgccgccgcgattacggcggaatactcctttccgctgttgtccaaaagtacgacctcgtcgcccacggacaggcggagcacgtttttcgcatgctcgaattcctctcccgaaaggagtgtctctttctctattttttccacaaaaaatcttttgggtccggacatattaagcctctttatgtttgaggacgagcgcgaaccattcgccctttcgccgttcgcgcacgacttccatgccgacggcggcataagcgtctttgaccatggcgagacgactttcgatgataccgcttaaaatgagcacgccctctcgtttaagatttttgggaatagagggtgcgaggagcttcaaaatctcccccgtgatgttcgccatcatgacgtcgccctgaatttccgtatcgtcgagcaggttggaatgtgcgacgaccgtcttatccgcggtaccgttgagctcgctgttatgtgtggcgctggttacggccacgtaatctatatcggtgagatacgctttttttgcgcccaatttaattgcggaaatcccgagaatgccgctcccgcatcccacgtcgatacagacggaatcgggggtgatgtagtcctgcatgagctccacgcacatggaagtcgtctcgtgctctcccgttccgaaagccatattcgaatcgagcaaaacgactttttccccttccgcaggagtataagctatccattcgggcacgactacgatttttccgagatgaatggggcggaagtgctttttccatacgtctatccagtcgtctccgtccacttcgcgtttggtgtcctccaacgttccgaagggaatacacccgccgctgcgttccttggcggcaaaaatatcccgcatgacgtccgaacagattttttccgcgatatcgacggcgatataacattttaccaatacgtcgcgcggctgcttttccgtcagttcgtcgtccatataatcccaatacatggtatctttgctcttttgaagggaaataatgtcgttgacgtcacagatcgtcacgccgtaatttgtataattccacatgacgtcggccacgatttcgctggcttccgtcgtcgtatgtacggtcaattctataaacttcatgaaaaacctctttacgttagtatttatattatatcattaacgttcgtatttttcaacccttccgaagaaaaataatcataaaaaatagcttccgtctttttgacgaaagctattttgctttttcatttctgtattttttccgtcgcaatttatcatctttctcattcaatacggtttcttcccgtaaaaactttcgacattgtcagaaaatttcttcattttatcgtattgtttcaaatcgatatccgaatccatagcttcgatttcccgtttctgttcccttgtaaggcgggtgggaacttctatcaaaatacggatgatgagatttcccgtgccgccgcgcgccgaacggataccttttccccgaacggtgaataactgtccgttctgagttccttcgggaattgtaaaatcaaaggtatcgtcgatcgcgggaacctttaccgtcccgcccaaagccgccgtcttgaaggaaacgggcaaatccacttgaaggtcaaatccgttgcggacaaaaatcttatgcggttctatcttgaagatgatgatgagatcgcccggctgaccgccgcccgcggcggcctgaccgtagcccttctttttcatgtaactgttattgtctacgcccgcgggaatagtgaacgtgaccgtagtttcctttctcacgaagcccttgcccttacaatcgggacatttatccgtgatcacgcgccctgtccctccgcaatcggggcagacgctctgacgaatcgtgcgtccgaacatggtattctgaacggtctgaacgacgcccttgccgccgcaacgcgaacaggtgctgtatgccgtccccccgcgcgctcccgtgcctttacaggaagagcagggctcgttgcgcatataggaaaaagtcttgacgcaaccctttgcggcatccataaagctgagcgtcatttcgcgctgaatatcttctccgacgctcgactgtgccgtacgggttcctccgccgaagccgccgaaaccgcccccgaaaattgagctgaaaatatccgagaaatctccgaatccgccttcaaagccgcccattcctcccatgccgcccataccgggatgctctaattcataatcgtaggcggcgcgcttctgcgcgtcggagagaatttcgttcgcttcgttgatttccttgaatttttcagccgccgcggcatcgccgggatgcaggtcgggatgatactgctttgccagccttctgtatgccgattttatctcatccgagctcgcctttttgctcacgcccaaaatgtcgtaatagttcttttttgactctgccataatgtcaaacgtcctttaaagtgtctctcttaaatacgtcatacgggtttggctgtccgccaaacccgatctgcgctttttcttccgacagacttccgccgaaaattttccggtcggaatccgtacttcttcgcttactggtggaattcggtgtctccgttgtcgggattgggatttgcacccgctccgggagccgcgccgccgttcgcctgatacagctttgcaaataccggctgcaccgcgttcatcagcgtgtcgtaagccgccttgatgcgatcgtcgtcgtccgattccagctccttcttcgccgcatccacagccgcctgcaaggtcgatttgtcgctttcgtccagcttgtcgcccgcttccttcatcgtctgctcgacggagaaaatcatgccgtccaatttattcttgttgtccaccttctcctttctcttcttgtcctcttcggcgaacttttcggcgtctttcacagccttgtcgatttcttcctcggacagattggtggaagaagtgatggttatatccgtagatttgcccgtgcccttatcctgcgcagtgacgtgcacgataccgttcgcgtcaatatcgaaagtaacctcgatctgcggaattcctctcggcgcgggagcgatgcccgacagcatgaagttgcccagcgtcttgttgtctttgcagaactcacgttcgccctgcaagacgtgaatatccacgctcgtctgattgtccgccgcagtagagaacacctggctctttttgacgggaatagtcgtatttctgtcgatgattctcgtgaacacgccgcccaaggtctcgataccgagggaaagcggagtgacgtcgagaagaagcacgtccttgacctcgcctgtcagaacgccgccctgcacggccgcgccgatcgcgacacattcatcgggattgattcctttgaaaggctctttgcccgtgatttcgcgcactttttcgacgaccgccggcatacgggtggaaccgccgacgagaatgactttatcgatatccttataggtaaggcctgcgtccttcatggcgagacgcatgggttctaccgtacggttgagaagctccgccgtcatcgcctcgaatttctgtttggtcaggttgacgtcgaggtgctgaggaccgtccgcactcatggaaatgaagggaagattgatgttcgtggagctcatgccggaaagctctatcttcgccttttcggcagcctccttcaatctctgcatggccattttgtctttggagaggtcgatgccgtgcgatttcttgaattccgctaccagatagtcgataattttattatcccagtcgtcgccgccgagcttggtgtcgccgttcgtcgcaagcacttcgaacacaccgtccgaaatttcgagaatggagacgtcgaacgtaccaccgccgaggtcgtaaatcatgaccttgccgcccttatccttgtcgagcccgtaagcgagcgccgccgccgtgggttcgttgatgatacggagcacgttgagtcccgcgattttgcctgcgtctttggttgcctgacgctggctgtcggagaagtaagcggggcaggtgatgaccgcctccgtcactttcgtgccgagatatgcctccgcgtccgctttgagtttagaaagaatcattgcggaaatctcctgcggagaataggatttatcgtcgatttttactttatagtctgaacccatatgtctcttgatagagataaccgtcttatcggggttggcgactgcctgacgcttcgccgcctgccccaccacgcgggagccgtccttttggaaagatacgacggaaggggtcgttctggaaccttccgcattggtaatgacgacgggttcgccgccttccataaccgccacacatgaatttgttgtaccgaggtcgataccgataacttttcctgccataataatctgtttcactccttgccgcttcttgcggataaccgaaggaattattccgttcggcgcggcccattgtaactttctgccgctgtttttatttacattctatatttaacccgcattcgccccaattaaacaaaaacaacaaaatttttccggcttttttcctctttttttccaaagcgatttttcccgaaaaaatccgtccgactttcgccggacggactctttgaaattgtcagccttctatgctgtacaaagccgcgattacggcctgttcggcaaatccgatctgatgaatgccccagatttcgttcttatcccaagtgaccgtccaggtcgcctgatagggacagagatttgtttcggggtcgcggttctgatacgcggtctttacgttggtgttaaaggattccaaatattcgtccgcaagctccggttcataatttctcaattcgtaatacgcctcgtgcagaatcgccgcaaaccacggatctccctgataatagaacttcatggcacccgggtcgacgagattgaaggtcttctttgcagccgccgcggttccgagtgcgtcgtccatatattcggctttcttgtccgcgtcgtccgtgcggtcgtacataatcaggtcggcgagaatcatgctgcccgaattataggcataatgcacgcggttgatatccccgtccgaacgggttccgtctccgttgataatcgtgtggataccgttccaataatcgtaggtatcgggtttattctgcatcttcttgcagaagttgtagaatttctccgcccaatccatatagaactctttttcttcctccgtctccgcataatcggacagcatcgcgttgaccataattccgcaggcgttcgcgctgagccccctttcgaggtgctgttcggtcgcgttgtcggaaagtcccgcttcgctccaaaccaatccgccgagctcgttattccagcccgagagcacccaattatttacgcgaatcgcttcttcgagataccactcctctccgaaaatttcgtacgcgcggagataattgcgcgccacccagatattgtcgtcgaagaaacagtccccgtatccgctgtacggcgtattaccgcgcgcggaatgatatttcacggaattttccgccgcgttgctttcgggattgctctgacggaaatatttgaaattattcagcattttgcgataggtatccttctgctccgcgtcgtcgggatagagtttgcacatgtagtactgcatgcccacgccgctgaaattcgtccaaagaaatcccgatacgtcgctgccgtaattctctttcagattgatatacgcatcgtctccctctccgccttccacgccgtactgctcgaaaatcgtggcgaccatcgctttcgcgcgggtctcctcctcggtgggccgctcgactgtcggttcggacgaggaagagttttccgaaccgccgttcgacgagctctctcctccattcccgccgcaggcggcaaacgccgtcgcggccaatatcgccgaaagacaacacacgatcatttttttccaacctttcatacgtcttcctccgattatccgttaatcttacgctttttcgcaatcactaaaacaactcccgcgacaaggagcgccgagctcgcagccaccaaagacatcgtgctgccgcagccgccgtcgctttcgttttcggacgagccgctcccgcccgaagaggaatcgccgtcatcgtccttttcgccgggatattccacgccgggaatcttgctgccgtcgagattgaccgcaccgccgagctcgaaatcccaattcctgtccgcgaccatgctggcggcatcgcccatgaccgtcagataaccgagctggaagttctgaatctgaatttcgatttcctgtccgtccaccgtaatcgtcgtctcggtgagatttccgcggggagcgccgtaaacgctgtaataggtagccatattgctcattaccgcgtcggacataagataaacgtttccgtcctcggggttgtacgcgagcatcgccgtaacgccgtaatagcagatagcgttgctgtccgtcgcgtgcagcccgagcttgatcatgccctgcccgtccttgaattcgttggttccttcctcctgtccgccttcggtggcaggccatgcgccgatcccctctttattgggcatgccgagattgggcatgccgagcgcaattccctgttccgtaaattccttataggcagccttgaatttcgcaaggagatccgcggcaccgatattatagctttcgggaatacggattgtagaagcgtctatcgtaatgaaatcggaaaggtcgagaacggtacggtttccggaagcgtcatagtttacgccggggagaaccatatcctcttcttttgcagcggaaagctcgatcgcgccgtacaggaaattctgatatttcttgccgttcgcctcgaaaaccgcgctcgttgcgggaccgagaaccatttctcccgttacatcgtattttttgttgccttcgttgaagcggacgggcagtttataaatctcataggtatcgctgtcgagcactaccgccgttaaaggcgttttggaaacgtccacataaattttgctcgtcttgttgacgtcctttccgtctaccgtttcctttgcgacaaaggtttgagaaagaatggtttccgtttcaaaattcatataatcggcaggattgcccatttccgtcgtccagacagctttcgcggcctccgccacggcgtccgccgtcactcccgagggaagagaagccgcaacgtcgtccgtcatgtttccgacggcgtcctcgttaaaatcgctgacgatttcgcctgtgtcggggtctacgtgggaagcgacgtagaattttacttcctcgccctccaaaacggctacgcccttcgtaaagagctgattgacgactccttttgtcgtcgtttcttcaccgacggggttaccccattccgtcgtcgcattataagcgctcaaaaatgttttaattgtaaacatttctttgcggagagaattatatacaacctcgccgccgtctgccgtcttttgtctccactggctgttattcaagttgttgatattccgcatcggattataattgacttccttatccgtataatattccttatacgcattgacgaaatcctcgatggaaagcccctcgatgacctcggcggaagccgtatcctgatagacgggaacgaccatattttccgctatatcctctgccgtcaaagcaatctctttgcccgtctcgtccacatttttacccgcgataaactgactgcccatggaatatccgagtgtaaagttctgataggtagtctctccgaccgtaaaatcatttcccttgggatagcccgcgatagtaacttggtctgtccatccgttattcatattcacataagcggccgccgcttctccgcggacggtgaatgcctcgttcatgtgcggattatagacgataaacgcatatccggtttttccccaattattccagccgctgtatgtgccgagatccatgtgtgccgccacaaagtaggtgtcattggcagagggccagccgtttccaagaggcgcgtttacaacgacaaattggtcggcaattccctgctcggtcatttcgtcctttacccgcttcgcttctttttcaaaagcattttcgatgttttcctgcgtgacgcccgtgatataggtacgtccgttcaaaaagctgtaatcgaaaatcttctcctcgccttcggcaagagagactaccgaggaaacgccgagcgccgacgctccgacgaatccagccaccgcaagagtcaataagcctcttttcatagttcttttcatcaaaaaatcctccgtttattgtttttatgagacgggagctcctcccgtattcatttgttttttccgtcagcctttcaggccgccgatcgccaccccgctgatgaagtatttctgcatgatacagaagaatacgatgatgggaatactcatgagcacgctcatcgccatcatggggccgtattggaattttgtttccagcgaatagttgcgaagcgccatggtaaggacgctcttttcctcgtgtccctgcaaaatgagatttggccacatatacgaattccacacgccttggaagcagaagattccgagcgtcaaaagcgcgggcacgatcatgggaatgtagatattgaagaatatcctcaattcccccgccccgtccagccgagccgcctccgcgtattcgccgctgacgggaatgagaaactgccgcatgaagaagataccgtacacgcccaccgttccgggcaggagcacgccgagataggtgccgataaagcccgttccgccctgtcccagaatgttatttccgcccacgagcgggaaggaacgaaggagcaggaaggtggggaccgtcgtcgctattccgggaagcatcatggaaagcatcatgattttgaaaatcgcgttgcttcccttgaagcggagcttttcgaagccgtatgccgccatggacgcaaaaatcaagttagtcgccacgttgactacggtaagcccgaccgtattgataaaatatcgaccgatatccacattttggaaaacatttttgaaatgctcgatcgtgacgtgcgagggcagccaggaacggtcggtgtaaataaattccgactcgcggaaagcgatgagaatagaccaatagaaaggagcgagcgccacgattgccaaaatcgccattacgatgaaaatgacggttttgcccgcgatttttttctgtctgggggtaagtgtgagttccattttccacctccgtcaataagcgcggtccttgacgaatcgctgtgtcaataccgtaatagcggcaatgacgaggaacaggagtaccgcctgcgccgacgcataacccatattcgaattggtgccgaaggcgcggttataaattacaaacacgggcgtcacggttgaatttgccggtccgccgtccgtcatcatcagcacttggtcatagagctggaatgcgccgatgatgctcatggtcacgataaagaaggtagtcgggagcagcagaggcagcgttatcctgaaaaacatgcgcaccttgctcgcaccgtctatggtcgcggcctcgtacaattcgggagaaatgccgttgagggccgcggcataaataatcatatttccgccgattccctgccacatggcgagaatgacaatcgtgagcatcgccgtctttgaagattccagccactgcgggccctctatgccgaacacgcgcagaaaggaattgacaatgccgatgtcggggttaaataccaaacggaacacggtcgccgcagctaccgcactggtgagaccgggcagataataaatcgcgcggaaaaccttatttccctttacctttgtattgatgagaagcgcgtataaaaggggcagaatcaccgacagaggaatagcgaacagcgcataccacgccacattcaaaaaggatttcccgaaaatactgtcgagcgtgaaaatattgataaaattctgtacgccgacgaaggtgatttccccgattccgtcatagctcgtgaatgccaaaaccatcgccatcagaatgggcacgagtacaaagacggtgaagaacaggagcgcgggcagtacgaagaaaaagcccttcaaagccagcttcccctgcatggtcagcttcttttttgccgtaacgtttgtcatggacggcctccttttataacatggcttccagctggaactgcgaatcgcccttctccttgatttgtttcaacgccgcgtccgcatctttaatggagccggagcccgtgcggatatattcgcgcaaggaatctatcgtaccgaatatccaggtcgtctctacgttggaatatccctttgcgatcggtctgacgtcgcaggcgggaagcatttccttcatcgtggaaagcacttgactttcctgcacaaatttcgctgactgtaatgaggtctttgccggcagcaggctataaagctcgcaatatttttcgaggttctcgtcggagagccaccactccatgaccgaaaatcccttgtcgatgtccttggacttgggaatcgccagcgagtagccgcccagcatgccgctcaccgcgccttccgtctcgctcttggcgggatagccgacgaaattcaaattcatcttcttgccgctcagcgtctccaccgtcctgtcgtaattgctgggaccgaatttcatcgctaccttgccctcgataaatttatcgtcggtatgataatcggtcgggcagcccgtaatcgtcatcagctcgataaacagattcatcacggattccgcatccgtgtaggattttgaggatttatccgaaatatcgatgttgattttcggaatcgtcccgctggtatcgaccagctgtccgcccgcggaaagcataaagccataaaactgaccgcgaagattgtatgcgtccagtccgacaatggtatcatttccgctgccgctcgtaagcgccgtggtcgaagcaatcagctcgtcccaggtagagggaatctgttcctctgaaacgaggtccatattactccacaagccccacgcatcgaggtcggtagggactccgtagacgccgcccgaaatttccagctcgcgacgcgcggcttcgttgtagtcggaaagctcaatcgtctcgctcgcctctatcttgtcagacaaatcgtgtaacagatttttcttggaaatcgtctcccagcgaggccaaatcacgaggtcgggagccgttccgcccaaagaagcggacgcgagggactcggatacgctgtcctgcatcttataggtcatcgtatagccaaggtcgttgttttcgttgaaatatttcacgaattcgtccatgaccgctttatccgaccccgtcgcttcgcaccatacgacaatttcgttgcccttgtttccgccgcaggccgaaagcccgaaaagagctccggccgataccgtcagcgcaagtgccgttgcaaataattttttcatttcatccttcctccaattaagttttatttctttacgcagttgtaagcaactgcgtaaaaaggacgtcctttttacaaaattttcagttttcaatctttattcagccgcgcacgttggccttgacgataacgacttcttcgtcgagaggccgcacggtatattcctttacgctttcgggaatgataaacgtttccgcataatgtacttcaaacggctcaaacgcgcccgtcggactttcgataatcgctcctctgccgtccacgacgttcgcctgaacgacggaaccgtccgtcttcatgcgttccgttctacggatatggcagcggcgggtctcgataaattcccgctcgtgcaggccggtatgctcttcgaggtagtcgtcccgcttttccaccgtttcaaagcggttgacgagattttccattacccaaggcgtatcgcggtaccattgaatgacgtgccgtccgtgattgatatgcacggggcggggcaagccgtccaatccgagacgggaccaatcccacagcttaaaggtaaaaatatacggcgtcgcactgatttcgagaaccatggtgtccgcccccgaacagtgtaccgtacccgcgggaataaggaaatggtcgtgctttttcgcgggaagtttattcacatacttttcggcgggaaaaatcatttcgcccctttgcgccgcttccagatcggccagcatggcatctttgtccactccctctttgagccccagatatacataggcatcgtccgcacagtcgagtatgtaatagctctcgtcctgcgtgtaatgcatgccgaaggtattctgaatatattccgtcagggggtgaacttgcagagagagattttgtccgcccatcgtatcgaggaaatcgaaacgaatgggatattcgtccccgaaccgcgcatgtaccttttctcccaaaagaagtcgcgggcgataaaacaccacgtctatggagggaacctctattctcacgttcccgaaacgcatataaatactgttttcttcgggaactccgtcaaacgcccaggcatagtttgtctccgaacggtccaagtcacacacttccttcatccactgaccgccccagacctcgggcgcaaaatagggaaccagacggaacggacggctcgcaaacgtttcgagccccttgcgccagccgtcgccgctcaccattttcgggcaccccgccgcatttgtatcgagcaggtagtccgccttttccagcatgtcgcgcttgtggcggtcggccatgcgccattctacgaaaaaaccctgtttgaacttagcgagtttattggcggaagcgttgtccgtcttccagttgggagtgccctttttgaatcggcactgaatctcccagcgagccaaatcgagatagacgtataaatccccctccgcgacgagcgaagcgcccacgccgatgacgcagacgagcccctttgccgtctctatctcgcctttgagcgccgccgccttgttttcgtccaaaatgtcggcaagtttcagggtattcatgattccgaaaactctgtcgtccgtgacgaaggggcggatttttgcgttataagcctcgtcgctcatcatcgccttatccgaatcgaaccattttgcgttcaggaaggaaagcccctctttgacctcgttttgctccacttcggtgtagcagtcaaagacgatgacgaaacgcttttttcctgcggcgcggcggagcaattcctctccgaccgcccgatagccctcccatgcctcgtagccccgtatattgagttcggggtatttatcgtaatttccgtagcctttcatgtttactcctccgaatagctctttgattttcctatatgtctctttaatttttccgcttttaacggagcgaagccgctccgataattcccgccgagttgccgagctgtgcggcgaacgctttgaccggcgcataattttccccgtatacctctctccgcaaagtttcgttgaccgcgggcaggaataaatccgccgaagcggaaaccccaccgccgatgacgaaacattcgggtcgcaggatattcgccagactgacgagcgccgtgccgaggtcgtcggcgaattcgtccacgatttcccgcgccttggggtgattcgcccgcgcggcgtcgaacacgtcctttgccgtcgtttcctcgccgagcgcgagctgcgcccgctttgcgatcgccgtcgccgagcaatacgcttccaaacagccctttcgaccgcagttgcacggcctgccgtcgggatggagcgtcatgtgtccgaaaatccccgccgcgtccgcgtgtacggagccgctttccagcctgccgtcgacgacgaaacagcctcccactcccgtgccgagggtgagcatcgccactctcttacagccctttccgacgccgtacagcgcttctcccagcgccgcgcacttcgcgtcgttggcaatcagggcgggaacgcccagatttctgccgatatcgtcgcgaagaggggcgtcgctccaacggatattattggaaaaacagacttttcccgtcaccgaatccaccagccccggcgaaccgattcctatttttctgatacggtgtcccgcgaccagctttttcgcagtttccgtaaggtcgcgcacgattccttcgtaatcgctgtccgcgcgcgtgaccaccgaagccgaggccagaatgattccgtcctccactacgccgagctttgccgacgtaccgcctaaatcgatacccaacgatttcactctttctctccttcaaaggcgtaaaacgtcagaacgccttcgtttattccttccgcttcgcggaatatctgttcggggttcgtcgtccccgtcgtctgcaatgtatagcggaactgatagaagcccgcaagactggctttgaaattggtttcccagaaattgttcattacccaggaatacaactcgtctgcattgggactcccctctcccatcaatttgatggaatgcgcttccagcgttcccatcgtcatcaaaggcgcatcctgcgccgcaagaataaccgctccgtcctttcccgcaaacgccgctccgttttgcaccgcgtaaaaatccacgcaggtaccgggcagctggtcgattctcggacggaataccgcgcccgccttatccatgtagaccgtatccccgtccttcgcaaacggcagggacagatacagattttccggttcccaaacgctgtccttatgcaggcgcaaatccacggtgattcgcggcatcagcttatgcgcggtgagaataacgctgcattcctgcgttccctccaaacggtatttgagctctacacggccgtacagcgttccgttttccaaaaccttgatgtcgataagctccccgaaatcccgccgagtgcgtaccgctttgcggttgcgtcccatattcctgcgtacccagagatagtcctccgtcaaatcgcggggagtcacttcgtaaacgggacggaaagcggtttctccttcgcggaggagctccttcctcttctttttgtcataaatgcgcgtcacgccgcagggacggctcatttctatgcggaaatattcgttctcgattgcgtccgtatagatatactcgcccggcgtttcatggagcacgtgtgaaagatccgcgattccctctattccgcaacgggcgcagagtcccgcgctcccgattgcgggcgcgggcttctctttcaggcagaaggtacgcacctgcttcggagcgagttttacgaaaatgcacatttcgggccccctcgaatagcggctgatttggaagggaacgctctctcccgtagcttcgtctacgacgtcgaaatgctcgtgcccgtaaaaatgttcgagatcctgcaccagcatgtcgcatacctcaaaatcatgcggatttgcggcgcggaatttaagctcccgatgcagggaaacgggcgtttcgcccagatgacggcggattttctcgcaggcaatcgtcgcggattcgttcgctttcagggcgaacagccgcttccattggtcaagattgttcacctgcggatgatacggctccgtaatcgacgaagagtagccccacgtatgttccgcataaaacatcagattatacagcgcggaacgatagttgtctttcccgccgattgttccgtcggagtccatctttctcgctacgtcgtacatgcgcgacgccgctcgatagtgcatggtatccgcgggcgtggagcccactccgtccgcccaccaatccgtccagtcccccgcgtattcgggcagattttctatcttctccacccgcgcgaaaaattcgtccagcgtcgcaagttttaattctatttcctcgtgctccgcgttatatttatcaataaattccaatactttcagggacgcgggtgaattgtccgtcatgttcccgctgaccgaaacgggaatgaaatcgtattcgtagccctgcgctaaatccgtatccacaaacgcctgaatccgcttgcacgccttttcgtaaggcgtgagccccgcaaacgtcagtccgtcctgcaaggtgtactcaaattccgacgcctgcgcgattccgagttcgtttccgaaaaggtaatgttccccattccagaccaaaagggaatttcccttgggcgtgcgccagcggaaaggcacctgcttgcggaataagggatggtacccgtgatgcgtatggatacaggaaagaagtcccctgacgccgtgattatacagcgcatccgcaaatccccagccgtagccgttgatatccgccgtcatcgcataatgataggcaagaccgtattccttcaactccgccacgcatgcatccatcgtttcattgagcactcgttcgctcgcaaggtcggtcaagttgagataatttcccgaaaggccgatatttcccgactttacgaatttcacgaagtccttcttctcctccgcggcagcttccgccaaaaattgctgaacgcaccaatagctttcgcaattccatttgaaccgcggctgcttcttgatgagctcgattacctcccgaataaagcccacgtgatgcgccttcatcttttcctgcgtatcggtataccctacgtccgtatgagaatggtgaattacgtaaatggtcatcttcttcataaatcaaaacctctttccttataaaaagatatgcttttttcggaattttcttccgtttaagacaatttttctattaaatgacagataattttcattttttatatactttaatgactaatttcatgacaagtatagcacatcttttttctcttgtcaatacctgattgcaaattttcacaattattttttcgatttgaaaaaagactgtcatttatctgacaaatttcaagagatgtcttgacaaaaaaccgaaaatgtggtatatttgataaggaaaatatcataaaatttattttcggacggggtatttatggcagaaagcgtctttgacagaatcgcgttgctccgacagcgcaccaccaaacaggaacgcgcgatcatcgactgtctcagcaataacaacattaccaatttaagctatctttccattacggagtttgcgagccttgccaacgtggcggaatccacgctgttgagattttgccgcaagctcgggttgagaggatattccgaattccgcatgctgttggcgcagagcaacagcaacgaatatacgggcgatgcggaagattttgcattcacgattatgaacagcatgacgacggcgctccattcgacttatgagcttttagaccatgcagacgtagaaaaggctgtggatatcctcttaaaggcgaagcgcgtgtattgcttcgggagcggaaattcgggcgttgccgcggaagaaatgagaaataaattcctccgcttcggaatccacgtctaccatttgagcgacagtcattttcagacgattgcaacctccacgctcacggaagaagacgctttggtactcttttccgtcagcggaagcacaaaggatatgataggaatcgcacagtccgcgcggagaaacgggacaaagctcgtcatcattaccaattacctccgttctcccttgggctcttatgcggatattcctttatatgtcgtggcgaaaaatactcctttggacggcggctccctcgtcgccaaaatcagtcagttatacgtcatcgacgtcttggccgccgccgtattcaaacgcacggagaaagaatctcagcgaaatatcgaacgcaccgcgattgccgtcctcgacaaagaaatctgagcgcaccgcgattgccgccccgataaaaaaatttgaatacgccgaaacgagcagaatccccccgaaccccctttcgtaagaaaaatcatggagcggaaccttcaaaagctcccctctcgaaagcccccctaataaattcttccgcctaaattcaaaaagatttgctcttcgccgctcgttgacaaatctttttatttttgttataatggttgcgaccgcaacaatttctaaaaaaggagaacacgatgccgacattcatgagacaaatcaatgttatcagccgatgcggagcactgtaccgaacggaaaaattaaaagaagtacagctcggcgccccccaccatagttatattataaatgtatgtaattatccgggaacctcacaggaacagttggcaaagcatatttgcgtagacaagagcaacgtggcgagacagctcgcctatctagaaaaggagggctttgtagagcgcaggcaaagcccgtccgacgggagagtaatcctcgtctatcccacgcaaaaggcgtttgacgtgttaccggaagtaaaaagagtaaccgccttttggaacgaatacattacgcaggatctcacgaaagaggaaaaagagagtctgtcgggcgttctggaaaaaatcgtctgccgcgcccgcagctatttcgaggaaagcggggaggaaaaatgaaatttctttttcggtacataaaaccctttaccaaaatcatgttggtgggctttctcataaaatgcacagggacgctgatcgagctggctctcccctacattctcagtcatattctcgacgacgtggtgccgaacgacggacgcttgtccatgatcattctgtggggcgggggtatgattgcctgttcgttaattgcgctcgtctgcaacgtcaaagcaaaccgaatggcctccaaggttgcgcgcgactgcacagagcaaatccgtcacgacctcttttaccgtaccatgactctttcggggagacaaatagatgcttttaccgttccgtcgctggaatcgcgcattacgacggacacctataacgttcaggattttatcggaaaaatccaacgcctgggcgtaagggcgcccctgcttttgctcggcggaattatcgtgacgctggtcatggacccttttctctccctcgtcatgctggcggtgcttcccgtcatttttgcggtggtgtatttcgtttccctttggggagtgcggctttataaaaacgttcagaaatcggtggacggcatgatccgcgtcgtgagagaggattcccaagggattcgggtcatcaaagccctgtcccgcgtggaacgcgaacatcagcgctacgacaaggtgaataaaaagctcgtttcggacgaaaaaaaggcgaatctcacgctcggattcgtcaatcccgtcatgaaccttttaatgaatctcggaattacgttcgttgtactgctcggcgcctatcgcgtgatgggaagaaagaccgaccccggagtaattatcgcctttacgcagtatttcaccatgatttccacggctacgctctctatcacccgcatttttatgatgtatacgagaagcacggcctccgcggcgagaatccaacaggttgtggacgcgccgagggaattgacggcgctatccgaagcggattatccgattaaagaagaaaacgggtatatcgtattcgaaaacgtatctttttcctacggaggaaagggcaatcacctcaaaaacatctctttttctctgccgcggggtcagacgctgggcattatcggaggaacgggaagcggaaaaacgacgctcatcaaccttttgatgcggatttacgatataaattccggctcgatacgaatcgggggacgagatattcgtacctttgaaggcggggaactgcatcgaaaattcggcatcgccatgcagaatgattttctgtattcggacaccatagaggaaaatatccgtttcggcagggaattatctcacgaagacatcgtccgcgcggcaaaaatcgcgcaggcggacgaatttatttccgcctcctccgacggatattcccgcattctctctcccaaagcgacaaatctttcgggcgggcagaagcagaggcttctgattgcaagagctttggcgtcaaggccgcagatcctcattttggacgactcttcctccgccctcgattaccgcaccgattccaaccttcgcgctgccatcgcgcaaaatctcgaaaataccacgctcatcgtcgtggcgcagagagtcagctccgtcatgaactgcgacctcattttggtgttggacgaaggcgaaatcatcggcatgggaaaacatgcacagcttttggagaattgtcccgtatatcgggaaatcagcaattcgcagatgggagggagcttcgttgaataaaatcattcgttcgcacaaaggagaaacttcattgaagaaagccattcgttcccaaaaaccgaaaaacggccgtgtatttctccgccttctcggatatatgttcaaattctggcccttaaccttgacgggaattgtcttttctctcctctccaactatctcgctctgctcggcccccgttatctcggcgcggcaatcgacgccatctcggataagaacggcgtacagatggacgtcgtaatgttcaatttttggcgcatgctgctctgctacgtcatctcggctgtcctcgcctatctcctcaccgtggtcatggttcatctcagtcagaaaatcacctatcgaatgaggaaacagctctttgaaaatctcaccgtcctgcccgtctcctatttcgatacgcacaccacgggagacatcatcagtcgtatttcctacgacatcgatacggtcaatgccacgctgtccaccgacctcgttcaagtgctcaccagcatctattccgtcctcggttcgctgtatttcatgttcgtcatttcaaagccccttattctcatctttgcagtcaccgtacccatttccgtcattttcaccaaaatcaaggcgaaaaaaatccagccgctcttccggaaacggtcgagaaagctgggagaaatgaacggttttgccgaagaaatgctgtcgggagcaaagacgatcaacgcctacgatcaagcggaaaacgtcaccgagaaattcgacgaacgaaacagagccgccgtggattcctactatgacgcggaatattacggagccatgataggcccttccgtcaacttcattaataacctttctctctccctcatcatgattttcggcggagttctctacctgctttcccaaaacggcaccgtggccgcgggaacgatatggttcatcacattgggcggagttacgcagttcgtcatgtattcgcgaaaattttcgggccctatcaatgagtttgccaatatcgtcagcgaatttcaatccgcctttaccgccgccgagcgaattttccgtatcatcgacgaaaaacccgaacccgccgacaaaaaaaacgccgtaaaaatttccgatgccgcgggagatgtggaactcaaagacgtcgaattcggatacctgcccgaaaaaatcgtcctgcacgatctttcccttcacgcaaagcccggacagacggtcgccatcgtcgggccgacaggtgcgggaaagacgaccattatcaaccttttgatgcgcttttacgacgtaaattcgggagaaattttcgtggataaaaacgaaatccgagatattgtgcgggacagtctccgaaacaattataccatggttctccaagacacctggctattttacggaacgatccgcgaaaacatcacttacggcagggacgacgctacctttgaagacgtcgtcgccgccgcaaaggccgcaaaaattcattcctacatcgaacggcttccagacggttacgataccttgctctccgatgacggcgtcaatatctccaaagggcaaaaacaactcatcaccatcgcgagagcaatgctccccaaaagcaaaatgctcattctcgacgaggcgacctccaacgtcgattcccgcacggaaattcagatccaggacgccatgtccgaactgatgaagggcagaacctgtttcgtcatcgcacaccgcttatctacgattcaaaacgccgacgttattctcgtcgtaaaggacggcaatgtaatagaacagggaaaccacgaagagctccttcggcaaaacggattttattccgctctctataattcgcaattctcctgacaaccactaaattttataaaacttacttctatgaaggagccgaatgtaaagcattcggctcctcctatttttccaaaaaaaagaacgacgcacgagaaattgctttcccgtgtatcgttccttaaaccaatgatttttttgtgtgcgccgctcaaattgtttcggggagtccttctcttactcccgaaaaaatgtttctgactgtattatatcaggtcttttgacttatgtcaagccaaaaaagccaaaatttggtaaaatggtaaatgggtaagtataaacttgtgcttttgagcagaaaaaagtttttatccgtttgcgaatgatgacatacagtgaaattatcaaacaactgatgatcgagcgggatttgagccaagaaaaattagcgcggattctcagtgtcaatcaaaccacggtaggacaatggctaaacgggaagaaaaagccatcctacgacaatattctggcgttttatacgcatttcggcattacgccaaacgaatttttcggaattgacgaaggctgaaagcgcgaaacacgccggaattttcgcatgcaatcacgttttcgacaaacaaaaaccctgtcctttatttcatagggtaaaagcaaggataatcaaacagtccttgcttttttattttgtttatgatataatacaactataataagcagtaatttaacggagattcttaatgatatttcattcattcaaaaatcaaaatgcaagaaggacgtttggcggttctgcatttatagaaatacagtattgtactcaaaaatcgggaactgaacttaaaaaaattgttaatacgtctagacactggatagacaattctctttatatttattttgatgatattgactctttctttgctaattataaaaagatattttacgagggaacttatcaaaatttacatagcggagaagttgatatttttggaataaattattattcatctgagcaattaaaaaatattttatttaaaatcgaagagcaaaaaccattagattatatggtaattttggaatggttaaagaatggggaaaattttaacggtttttacattttaggaatataaacttcaatttatcgttttaactgttaacaaaatataacccactacactacgcttcgctcacgaagtgcagtgtagtgggttattactccctatggcaccccttttcagaacggggttttagtctgtctataaaaatctcaaaaggcttccctacggcgttattgcgttacgacgacttgggcataacgcaaaactttatctccgcgtttatagcccttgacataaacctgtttgacgataccgctctcttcgccctcttcgggaggaacggccataatcgcttccgcaacggaggcgtcaaagagttgccccgcgggatcgagctcctctacattttcgctttccaagacctttttatagcttttcagcaccatttcgatcccctcttttgtcttttcgtcctgacaggcggaaagcgcgcgctctaaattatctccgatcgcaaacagggaagagactacatcatttcgtccctccgtatatttccttgcagattcctcgcgggtacggcggcgataattttcatactccgccgatacggaataccatttacgcttcaagtcttccgcctccgctttgagtttttcgatctcctctttggctttttgaagttcctttcggcaatggcccttctcgtgaccgcccttgcactccttttcttcgccttccttttcgcactgctccgcgggtgcgttgcagccctcctgtttcttttcagactcgttttcgcaattttcttccgccttttcttcggcgggagcggctgacatgtttttttccgcttttccttcgcaattacatttcttttcgttttcgctgttatccatgatactcacccgatgttttcttactttccgccgcaccgcttcgacgatacgacgctattttatttataaagcaattttccctttttcaaacgcaaagggaacaaaagtcgttcataattcgagatgcgcaaaattttcgcgcgaagaacggcgataaaaaatcgctttccgaccgatgaccgccacgggaatcgcctccaagagttccgcaacgttttccgcaaggttgcgcgcgtcgtcgtccgccgtgga

SEQ ID NO: 4105 - DNA, 10990 bp, Unknown
  16S sequences of unknown bacteria
tgattctttttaaagtgcaagattttttcgcaaaattgcgcaaaaaccttgcacctgaacaattcaaaagtttacaccaacatgcttggttaaggtacttttgaattgttcagcaggcatcaaatagaatctgtaaacaaaaaacgccctccgagcagccgtaacggctgcccggagggggattattttgtgattacattaagcttctgtaaagctctgcaatttcttcaacgcttgtgtctctcgggttgcccgggcggcaagcgtcggcatatgctgattcggcaagagccggaatatcctcttccttaacaatgcccttaagcgtggtggggatacctacatcctctgcaagctgacgaaccgcgtcaaccgctgccttgcggtattcctcaaccgacatattatcaacgcccttaacgcccattgcctttgcaatgtccttatatttctcgccggtgtactctgcattatatgccattacggtaggcagaagaattgcgcaggctttgccgtgcggcgtgtcataataagccgaaagcgtgtgcgccattgagtggtcaacgccgagtccgacattggagaagcccataccggcaacatactgaccgagcgccatgccctctctgccttccttgccgttcttaacggcgtcgcgcagcgaacgggcgatgatttcaatagccttgatatggaacatatccgaaagctcccaggcgcccttggttatgtagccctcgattgcgtgggtaagcgcgtccataccggtcgcagcggtgagcgacgccggcattgtagacatcatatccgggtcaacaacggctactaccggaatatcgtgagcgtcaacacaaacgaacttgcgctttctctcaacatcggttacaacatagtttatggtaacctctgctgcggtgcctgcggttgtgggaaccgcgattatcggaacacacttattctttgtgggagcaacgccctctaaagagcgaacatcctcaaactcggggttgtttataataataccgatcgccttagaggtatccattgaagagccgccgcctattgctactatgcagtcggcgccgtatgccttgaactcggcaacaccgtgctgtacattttcaattgtggggttgggctttatatcggaatagagcttgtactctatgcctgcactttcaagaatatcggtaaccttttttgaaacgccgaatttaacaagatccgggtcggaagcaacaaagacctttttaaagcctctgcttttaatttcttccggtatagcggcaatggcgcccgcgccatggtatgaggtttcattcaacataaatttgttcataaaaattcaccttttccgtaaatttaataaatcagagtagtttttcaaccctctgatttatattatacataaagatttagatttttcaatgacaaaatagtgaattttttttaaaccgttaaatcagcaaaatccgccccgataaaattggctaacttttcgggtgagacctttacctgaaatccgactttgcctgcgcttacatagaaaaattcacgcccttcggcactttcgtcaataactgttttgaattttttcttcatacccacaggcgagcagccgccgtgaatatagcccgtaagcggcaaaagctccttttgtttgagcattgaaactgattttgcacccaccgcgcgcgccgcggcctttaaatcaagcgtttcggcaacgggtattacaaacacaaagtgttccctatcgcccgattcggtaacaagggttttaaaaacgcaagcggggtcttcgcccaaaacctcggctatctttaccccctcggtaagctcgggagagtaagaaaacggctcatatgcgattttttccttatcgagcacccgcataacatttgttttaaccattatttaaacacttctccgtttacaataaccgttttaatgttgatatccttatccactataagcatatccgcgtcaaagcccgcctttatctgccccttgctcacgccgagcatttcggcaggcgtacgggaagccattcttaccgcgtcgtcaaacggtattccgaatttcacagcggttttaacgcaatcaagcagcgttgcgctgctgccagctattgtgccatcggcaaggcgcgccgcgccgtcctttaaaaataccttaagcccgcctgattcatactcgccgtcaggaagccccgcgctccttatactgtcgcttataagggtcatacggtcggcgccgaacatcttataggtagcaagcaccacgggctttgaaatgtgaaagccgtcgcatattatctgcgcgtaaatatgattaagaaaccccgcgccgataggtcccggattgcggtgatgaaacggcggcattgcattataaatgtgggtaaggcagttcgcgccgtttttaattgcctcgttagcggtatcaaaatcacagtcggtatgacctattgatacaatgcaatccggagttacggcttttataaattccatgctgccgggtctttcgggggcaacggttatcatcttaacatttttaaactgcgcgaattcctctgcggaggagttctttatatatttctcattctgcgcgcccttatgcttttcggaaatatacggcccttcaaaatgaaagcccaaaatattagcacccgcaaaatcggttttggctgatgtcacctttaaaaggctgtcatatcccattgtcatggtggtgggcagaaaggaggttgtgccgtgctccgcataaaagcggcacatcggctcaaaatccgcgtccattgtgtccatacctatgcagccatgggtgtgtacgtcaataagccccggtataaggcggttgccctcggcgttaatatcgccgttttttcggttttcttcaaccgccgcgattttgtcaccttcagtcacaacggtttttaattcgccgtttatttcggcattatatatgatcattctgtcacccgccttaattctcgctgtaaattaccgtaatatcggggtgcagctgcaaaatagaagcaggaatttcaggggtgataggcccgtaaaatgccttttctagtatgtcacgctttgccttgccgttggctataagcaaaattttctttgcctgcataatggataccatgcccattgttatagcctttttcggcacctcgtcctcgcttgtgaagaagcgggagttagcctttatggtgctttcgtgcaggtctacaacatgggtgcttttaacaaagtatttatcaggctcgttaaagcctatgtgaccgtcaagaccgatacccaaaagctgaagatcgatgccgcccaattccgcaatatgctcgtcatagcgctgaccctcgcccgccaaatcgaccgcgcagccgttgggaacaaaggtattgttaatgctgatattaatgtgatcaaagaaattatgattcatgaaatagcggtagctctgatcgtttttgccgtcaagccctacatattcgtcaagatttactgaggtcacgccgctgaaatcaatatcgcccttattgtaccagtcaataagctgcttataggtgccaaggggcgaagaaccagtggcaagccccaaaacgcagtcgggctttataattacctgcgccgaaataatattggcggcgtggcggctcatcttttcatatgtatcaacggttataaatttcattattttccctctcctttaaattcaaaaacctgcgtaagcaacggctgtgcgcctgttatggggtctttttccataataagtatatccttcatatactcatcccactttttaaccacggggctttcgttctgaacccttgcggcgaaatcaagcccctttgcgcactcataatacccgaaaagctcattgccgacattccaaatggaataattcactattcccgcgtcggataaaaccttcttcatttcatcccaaatattatcgtgccgttttttatattcctcaaggcagccgtccttaattgcagccttccaagcatatttttccatagcttaaataccctcataaagaccctcatccgccattttgttgagagcggcggaaacggtatctttatcctccttataggtaacgccgtaccatttatcctcggcaaccattaccttaacgcgcttttcgccgctttcaataagctttgaaaccacgcttggcaggaaatattcggatttgggaacatttattttttcctttaaaaaatcaacaaagccgtcggcagcgtaatcgaacagatcaggcataaagccccaaagattcatcgaaaccaccgtatccggagacattgcggtccaggtcttgccgtcgtcctcagtatatttgcagtcgactattttagtgcgctcggtaactgacttcaattcaccgttttcaatttcgcacactccgcgcgaaacagaaccgttatcggtcagcgtattcgcaaggcggaagccaaccatgcagtagtccttatcgttattgcggaggaaatcagccatatgcgtaaaggcggttttgccgtaataatcatcggcgtttataaccgcaaacggctcgtgaaccacatccctgcagcaaagcaccgcgtgagcggtaccccacggctttgtgcggtcggcaggacaggtaaagccctcgggcaattcatctgtttcctgaaaaacatattcggttttaaccattttttcaatatgctttgcggtaaccgctttaaaatcctcttcaatagcccgcttaataacaaaaacgactttattgaagcccgcctttaccgcgtcataaaccgagtaatcaagcagtatttcaccgtttttgcctatcggcgctatctgctttaagccaccgaaacggctgcccattccggctgccataaccacaagcgtaatatccttattcatatacaacactcctttaagcaatataataacatatttccccgaaaaatacaatcgtcaatcagtttacaatcggctttttttatttaaaaatcggctatgtattgaattttataaaatttcattgtataatcagtttataaattttacggagattaaaaatgaaggttactttttatacactcggctgcaaggttaatcaatacgagacagaggcaatgcgcgaggcgttcgccgcagcggggcatacacctgtgccgaacagtgccccgtttgacgcggcggtaataaactcctgcacagtaacggcagagagcgaccgcaaaacgcggcagctgctgcataaggtacgccgcgaaaaccccgaggcaataataattcttaccggctgcatggtgcaggcgttttccgaagaggcaaaagcgctcaccgacgcggatattgtctgcggcaataccgatgtaaaaaaaacggtcgaatacgccgagcgctttttaaaggacggcgagcgtatttttgaagtaagcgagcataaaaaaaccgagcgcttcaatacgcccgtgctttcaagctttgcggagcgcacgcgggcatatatgaaaatagaggacggctgcgaccgctactgtacatactgcattatacccacagcccgcggcagcgtgcgttcaaagccgcttgcggaaattgcgtcggaggcggagaccttaagccgtgcgggtttttcggaaatcgtgctcgttggaataaaccttacctcctacggcaagggtgaggatatggatatttgcgacgcggtggaggctgcggcaagacccgacggcattaaaagagtgcgtttgggttcgcttgagcccgatcacatgagcgatagtgtgctcaaaaggcttaaagcgcagaaaaaattctgcccgcagttccatttatcgcttcaatcggggtgcgatgagaccctcaagcgaatgaacaggcattacgatacggtgttttaccgtgaccttgtaagccgcatacgcacggtttttgaggacgcgtctgtcacgaccgacgtaatggtgggattcgccggagaaaccgaggaggaattttcacaaagccttgcctttgtgaaggaaataggctttgccaagacccatgtttttgcttattcaaggcggcgcggcacggtagcctacggtctgccggggcaaataacccgcgcggagaaagccgagcgcagccgcagaatgatagagaccgcccttttctgtgaggaggaattcctgaaaaatcttgtcggtaaaaccgaatgcgtgcttttcgaaacagcggaaaacggctttgcggagggctacaccgcaaattattcgagagttcgcgttaaaagcgatgaaagcctcggcggaaaaattctgccggttaaaataaccgcgtcagaaaaggaatactgcataggtcaaataaaataataattaatatcccatgcgggaagccccggaaaatgccgcatataaatgcggtaatcgtttctgattttgcaaaccgcgcgcggtatgtccgtaaggtcgcctgttctgtggtaacaggcgatctgcattttcggacggcagcgcagtattgtgctttcggcgcccttaagcatcgcagtctcactgccctcaacatccgcttttataaaggaaaaaccgccgttcaacgaatcgaccgaaatcattttacagtcttcgcctatgccgatgcccgagcctcttcccttgcgtgaggaaaagcccgcagtgccgccggcttcccctacgcaggcgtttataagcgttaaattttcaagaccgcctgtattggcggtcagctttttaaagctcctattatccggctcgaccgcagtaatgcttttgtatttacccgttttctgtatgaattcaagcactgtatcgccgttatatgctccgaggtctaaatagctctcatcatcgcaaagcatcaaaaagctttggaacggctcatcatgtgacacctcgcagcggtaaaggtattcgggttttccgctcagcttgaaattcacggtattttcaagtgtctcgcgcgatttttcatcagcaaggcgggaatatacccataaaagctcttcggtgtgtgctgcggcgtattcggaatcgaaaagcccgtcgccgtacaccgggacatcgggcaccaaaagctcctgctctgctgctatccggtttatattttcaagcacctcgggtcttgatgaaccgaagcacaaaagcaccgtcatatccccgaagcgttctttaagcgcggaatatgttgtaagtgacattccgtgaaagcgtttatcacgcacaaagccgtcggttgcaaacacccccgacggcttaaccgaaacgcgttcaagcgcctttatgatcttatccgcgccgttgcccataccgtaaagaacgatcggctttttgtctgttttaagatgctgccatatatcctgctttacaatattcattttctgccctgcatttttctgcgttttgcggctttataccttgccgcagcatttatcgcaataataaatattacaaatagagctatcggagaaagcacggcggcaattaccgctttgcgttttcttgctctttgcgctttttttgccgcttccgcctttgatttctcctcggcttctttctccttcgcaagacgctgcttttccgcctcttcctccgcttttattcgctcctgctcggaataaagagttatattttcaagcatatcgtttttattaacatccgcaccgaccgaggaaaaataaagcccgtattcgcagggcgaatatttttttatttgcgaggccttggttatttcgccgtttttgccgagcatccagcttttaaaccaggttccctgctgggatttatgctccgcaaagccgagctttgacatttcaaagggtgttttaccgccgaaaaattcgcttggtgtatcgtaatccactactattttattctcaccgtacaaatgcacataaagctttttcggtgtataaacgccgtatttttcggcagtttcgggaaaaaaggacttgtcccccgaaatttcaaccgcccttttcatcatggcggcgtttaatttgtgcattccgtgaccgtattcgccgttaaaatcgtggctgaccgcgatctgcggcttgaatctgcgcagcatttcaacctgaaagcccagcgcgtcattctcagtataaccctcggtcgcaatcgttttaagtgcgccctcaatcgtctcggaataataatcggggaagttgcttataaccgggtaatattttatacccaccgtccacagtccgtttaaaagctcgtgacggcggcgcgtctcatttttatgatcggtataataaaccacctgaatgtcgcagccgcgggaggcgtaatacggcagaagccccgcaaagaaaagctggtcgtcatcggaatgtgaggaattaaggagtatatccgcccgttggagcggcttttcccatttttgaacgaaatcgggtaagctccccgccgcaaaggcatatatatcgctgatttttgcaccgccgaagtccacggtcaattcactgcttttaaaagctgaaacatccgtaagcatatgaagaaactcagaggtaaccgtttcggtcttctcccctgatttgattgtaaattcctgcgccttgctgtgaaatatgatatagagcgaggaaatttcgccgtcagcggttatttttaattcgccgcattcggcggctgttaaatgattaccgtcggtcagctttttatcaagtcccgaaagcttcagctgcgaagcggaagcaccttccgccgctacgggcatagcgcagactataaacaatattgcaaaaaatacagataatttcttcacaaagcagctccctttaaggccttgatttttttatctttatgccgcattacggtaataaacgaaatgaaaagtgccgcaaatgtaagcagccaagaaatcgggtaagaaataaacagtcccgcaaaggtatgatactgcggcagcgcaaaaacggtgtatatccacacaatacgcataacgcacacccctaccaccgtaataatcataggtattacagatgagcctataccgcgcatagcgccggtggtggtatccattattccgcaaagaaaatatggaataagcataaatttaagccgctccataccgtaatttatagcctcgggcgaatcggttatatatattccgagcagctctctgccgaaaatgtatgaaagatttcccacaataaaacccgccgccgccacagtcataagacagacccaggttatgcgttttacacgcttaaagtcgcccgcgccgtaattctgcccgcagaaattaagcgccgtctggtggaatgagttcattgtaacgtagcaaaagccctcaatgcttgaagccgcagcgctgcccgacatatgcgccgcaccgaacgagtttacagaggactgtataagtacattggatattgagaaaagcgagccttgcagccctgcgggaactccgatctttgccattctgagcagtgcgcttttgtgaatatacatctttttaaactcaaaacggcactcgtcctgccgttttataagcgcccgcaaaaccaaaaccgccgaaaccgcctgcgaaatagatgttgcaagcgcaacacccgcaacatcaagcttgaaaagcgccacaaaaacaatattaagtataacattaagcacgcccgctatcgtcaggaaaataagcggcgagcgcgtatcgcccgcggcacggagaattgccgagccgaagttgtaaagcatgctgaaggtcatacccgcaaaataaatctgcatataaaccgatgcaagccttaaaagcttaccctcgggcgttcccataagctcaagaaaatttcttgaaaaaagtacgcctataaccgttaaaaatattccgcttataaccgccacgggcacggcggtgtgcaccgcctctgaagtctgtttgccgttgctcgcgcccaagccctgagccacggcaacgcccgcaccgacagacagtcctatgaacaaattgataatcaggttagtaagcgcgccggtggcaccaacagccgccaccgaatcgctgccgctgaaccaacctacgaccatcagatccgctgcattgaaaatcagctgcaaaagcccggttaaaattatcgggacagtataaacaattacgcttttgagtatgggcccctcgcgcatactgtttgaatcaaatttcattttttaaaattccttttatttcagtgcgtcaagtattaaatcaacgcatttatctataccgagcctgcccgaatcaaggcaaatatcataatttattgcatcgccccactcacggtcggtataatgcttataatacatttttcttttcttatccttatccgcaagacgctgctcgggcttcttctcgctttcaccgtaaagcttaactatgcgctcggcgcggctgttaatatccgaatggataaatgtgtgaaagcagtcctcgcggtctttgagtataaaatcggcgcatctgccgacaattacgcagggctgctcggcaagctttaggataacctgccgctgcgcgcagtatatgaaatcggaaagggaaagaccgttcggcatgcactgtacaccctgcgacatagcaaaggtgaaaaagctttttgagggtgaaaattcgcccttttcttcaacaaacgctgcgtcaagcccggtttcctccgcaacctttttaacaagatccttatcataaaacggcacgccgagcttttccgccacgcgtctgccgacggttctgccgccgctgccgaactgacggctcaccgttataattcttttttccatagaaaaacctccccgtttttttcagtcggtatattattaatttgattatacactgcccactgcaaaaaaacaagcggtttcggcaaaaaaatcatataattaatgtctactgaataattgcattggcaaatgcaattatataaaatcgagttaaaatctcgtttttttgggtcaaaacctttgttttgaccgtcagtatccattgattgtcgcctgatttta

SEQ ID NO: 4106 - DNA, 1738 bp, Unknown
  16S sequences of unknown bacteria
tgctggtattcctcgggcgggaaaatgttcgagttgcagtaatccagcgcaaactcgacgccctcttcggtaaagatgcgtgtcggctcgagggagcacggcccgcaacaggcatgaagcatcaatcgcatttcgtcacgtcacctgccgtatcgtcgctactcgaggacgagaatgttcttgagctgggcgaccgcctggtcgccggtgatgttgcccacctgcagctcgttgaggatgtcttgcgcctggcccacgttgccggcgttctttgccgcgatcttcttgagctgggcggagttcgtgatgtcgacgccttcggaagcggcggcggacttgagcgtgtcgtacgccttgtcggtgagcgcaaggtcgctcttgatttcctcgtcggtcaggttctggccggacgagaccttgccgacgaggtcgccgagcttggtgctaccggtaatcgcggtcgtcgcggtgcccacggcactgccggaggtgaagtggttccaaatggccatgccggcaaccgcgagcacgataacgatcgcaatggtgaggattcccttgagtgcagttttcgccatgtgcgtctccttcgatttgcaatgttagtatggttggcgatgattttaggagagtcaatgaagactgacgaatttgattacgatttacccgaaaagttcatagcccaggcgccggcggtcccgagggattcctgcaagctcatggtagtcaacaaagacggctcgctcgagcaccggatcttccgcgacgtcatcgactacctcaaccccggcgacctgctggtcgtcaacgacacgcgcgttctgcccgctcgcctgctcggccacaagaagggcacgggcggcgcggccgagtcgctgctcctcgacaaggtcgacggcgcgcctgacacgccgcaggagcagacctggaactgcatggtcaagcccggcaagcgcctcaagcccggcaatgtcatcgagtactgcgcgggcggtgccgacgagggcgagccgatcctcgagggcgagatcgtctcgatcgacgccgacaacggcagccgcgccgtgcgcttcacggctcttaccggcgaggatgtggacaccgtgttccacaaggtgggccacacgccgctcccgccctacatcacgcagtacgaaggcgacgaggagctgtaccagacggtgtactcgcgccccgacctcgagcgcagcgccgcggctcccactgccggcctgcacttcaccgaagagctgctcgaccgcatcaaggccaagggcgtgaacgtcgcgaccgtcgacctcgaggtcggtcttgacaccttcaggctcgtggaggaggaaaacgccgaggaccacaagatgcacacggagctctacacggtctcgcccgagacggtgcagatgatacgcgacacgaaagccacgggtggtcgcgtcatcgcggtgggcacgacctcggtgcgctcgctcgagagcgcggcgcgttccggcgagcttgcgccctgctcgcgcgcggctaccaacctctatatcatgccgggctacgagtacaaggtcgtggacgccatcatcacgaacttccacgtcccgcgctcgacgctcatgatgctggtcagcgcgttttcgacccgcgacatcatcatgaacgcctacgagcaggcaaaggagcacggttaccggttcttcagctttggcgacgcgatgatgctgctctaggcggcgaggcgcggctatctcgg

SEQ ID NO: 4107 - DNA, 32498 bp, Unknown
  16S sequences of unknown bacteria
tggatgcctcctacaaaattcagagaggcatccatgtgcacctaattcaattttttatgtgtccagaattctgggtacatatcatgcttctgcctccgctttcgtcttttattcttcttgcatttctaccaatgccgtttcttctaatccatataaagcgttttccaacgcagcagtcaccaattttttaaagcgggtggatgattgcgttgcaccggctactgtttccatctcgtccggcaggtaccgtgcatcaataaaggactgaataatcgccggataaaattgagctggatacgtaccggaaccggcctgttccatctgattttgatagtcggcatctttggatttgtaagcaccattttcgtctaccgcatcaaagctaatctgcgcaactgcgttattctgaatcgtcaggacaacaaattctgtccagccctgctccggttctttcatctgtgcccgatacgatccatcctcaaaaataggggcaacggcagctgttttgtcgcccttttgtgcgtttgccaatgcatgagcgattagctttttaaaattccgggaagaaatagtcgcaccagcgacaccatccatttcttcaacagaaccggcttgctgataattttccaccaacttttgagaatagtctgccggataggtctccggtaaaccatttgccacatttccggcaatcatactttgacggtattcttcgtcggcagactttaaatctccctgctcgtttttggcgtcaaacacaatagagtccacagtcccatctgcgatggtgacacgaacaaaatctttccacccgttatcgtattccggcatttcgacttcatacacgccatcttcataaaggggaagcgttatttctcctgtttgcccattctctacccgttccatcaaagctgccatgacctttttaaaattttccgaagaggtggtcgctcctgctactgcatctactttttgcagatcgtattccacagcacgaaaggccgtcaccagatcattgtatactttttccggataaacagcaggaaggccgtttgccgcattccccgccgccatgctatcccgatacgctgtatcttgactctttttttctcccgcttcatttcgggcatcgtactctacggctgtaatatatccgtcggacacagttatttttccatattcctgccatccgccctcatattgcggcatttttacttcataagaaccatttgcatacggtccctgcgccaggtctggtatactgcttgtttcctccgaggaacagcctgacaagcccaagcaaactgcaactgccagcatgacgtcaatccatctttttttcatctgcactctccgttcattcgttttcttgttattgttacctacagccgttttcttattccaatttttcaaacaagggcatgtaaagaaaaaccgcggaacacacaacggcattccgcggagtacagcatcttttagcggtcaaatatcttgcggatcacttcgaactcatcaatttcctgcttttcttcttcatcgctgattccgagactctccaaaatagcagaagccggatctttttccgcaggcttttcctcttgtgctttttcttgttgcgggaaagattcttccgactcaaaattcgtggcgataaccgtaacctgcatttcgtcgttaaaggacggatcaagcgccgcgccccagataatattcgcatccggatgcgctacatcccgtaccatgctggaagccaaatccacgtcttccaggctgatatccggagacgcaatgatgttgatgatcacgccttttgcaccgttgatggaagtctccaaaagtgggctggaaatcgcagcagcagcagcatccgcagccttatctttgccggaagcgcggcccactcccatgtgggcttgccccgcatccttcataacggctgttacatccgcaaagtccaggttgatcaagcccggaatattgatcagatcggaaatactctgcacaccgtggcgcagtacatcgtccgccacctcaaaggcgttgaccagtgtaattttggtatccgataagtacttgagcttttcattaggaaccacgactagagcgtctacatgttctcgcagcgccaaaattcccatttcggcctgttccatccgcctgcgtccttcaaaagcaaaaggcttggtcacaataccaacggtaagaatccccatttccttggcaatctgcgctacaatcggtgcggcgcccgtaccagtgccgccgcccataccagccgcaacaaacagcatatctgtccctttcagggcagaggcaatttcctctcggctttcctccgcagccttctgtccgatttccggatgcccgccggctcctttgccgcgggtagattttacaccgatctggattttttgtgttgcattcgaggaggaaagaacctggctgtccgtattcagcgaaatgaactctacgctttgcataccggaagcaatcatccggtttactgcgttgccgccgccaccgccaacaccgaccactttgatggcaacgcctttatcgacgtagttatcaatttcaaaattcatgagcattttcatttcctcctagttctctttttatccccaagcaggaacccctcttaaaaatgttagccctgcatcgcgctgtcaataaaaaatatgtcctgactttctcattttaatgtaccattttttcgcttccagttcaatagtgaatccccggatttcattggttttttcgtacttttttacgagaatttccaacaaaatccgttctattccgccgacggtacagatccgctatcttcgggctgactgccgttggtgccactatcgctggtggaattgtcatcgccggtaggatcctccgttgtttggctgctatcgtccggcaccattacaccgccggacggacgggtccaaacttctccttcgtatgaggcgtcaatggtcccccgaaagctagtgagcaaatcctgtgtttggatcacctgcaaaattaattccattttgtattccagattactgtcggtacctaatataatttcgaaaacatcctgatagtacagcttcagatcatacggatcggaaagatcgataacgttaaaataggaaaagccggttttttttgcggcttccataaccagccgcattcgtctgacgttttcagagtcttcttcaaccagatagctgccctgttctggtgtctcttcagaaaatcccattacgattggcatttcttccggtaaaaccggtgtattgcattccagcacccgaccttcttcgctaatcaacgtataccccgctcccgcgtcaatggcaccgatcggggtggcttcggtgatttccaaaacaatcgtatccggcaactttctgcggattttcactttggaaatgtagctgtattcttctattaatttctccttaatttgctgatctttgaggcgaaacatattttcctccagcaaaataccggaagaaatgattagcgatcgatcgtcataatgttcacttccagccacagcaatatttttgattttaaaaaagacggtagttgtcaaaacaattgtcgttgtgaccataaaaactaaaatcagcaggtaccagagaatgttatttcctttgcggcggcgctttcgctgtaccaaagctgatccttcagccttacctccgcgcggatgagaacgtacgcgcccgtgcgtttccccccgttttttctttcctctgctcatttttattcccgccttttattttttccaaatttcagcgcccaacgctgtcagattttcgcagaaatgttcgtatccccgttcaatccattcaattccttcaatacggctggttccctgggctgccaacgccgccaataccagacccgcaccgccgcgcagatcctctgcacagacatctgccccatgtaataggccgcagccctctaccacagcgatctttccctcctgccgaatgaaagcgcccattctctgcaaacacgggacactactataccgattttcaaaaatattctccacaaaaatactggttcctctggccactgcagccagcgataaaaagagcggcagaccatccgtcggaaaacccggatatggcatcgttctcacctgaggcaatgctttgaggcgggatggcgcctttagccggcagcgctttttctcccaagaaacctcgccgcctgttttttgcagtgcagccagcatagacatcaaattttccggttctattccggaaacaacgacttctccgccagtcattgctgcggcaaccagataggtggcggcagcaattcggtcgccgataacgacgtgctcgcatccatgcaatctgctaaccccttcgatctcaacggtattttcccctgcaccacgaattttcgcaccgcaacggatcagaaaatccgccagatctacaatttccggctcacacgcacagttaatcagcgttgtttttccttttgcaagcactgccgccatcatcaaattctcagtagcgcctacgctgggaaaagataaaacaatccgagccccctgcagtccccctggtgcacagcaccgaagatactgctcttcctcctgcacagtggctcccatctgccttaatccgtccaaatgcaaatcaatcggccgcgatcccagccgacatcctccaggatatgcaataatcgcctgaccgcaacgggccagcaatgggcctaaaaaaacaatagaggatctcatttttcctgtcaatgaaccggaaatttccagatgcgacaggtcgctggaatccacaaaaatatttccctgccgccaatcggcacggcaacctaatgtccgaagaatccgtatcgtcagcgccgtatcggaaagagccggacaattatgtatcacacagcggtctgcggtaagcaccgttgctgccaggattggtaaaacactgttttttgcgccttgaacatgaatttcccctgtcaagcgccgaccgcccgaaatctcgtatctatccatgaacgcccttcctttctgataaaatgtccaatggaacggttcatttcatcatatgcacccaggcattttcggtgaaaggagggataggacagccctatttttccgaataaagttttataatctgccggtaaatccggtcatttgcgtcattgatggcaaggctagctgcattttcgcccaaacggcgcagcctttccggttcagcacacagctgatcaaattcgctgcacaaccgtgctcctgtcaagtctttttcctcaatgacaaccgcggcattttttcgcaccaatgtcattgcattatgatattgatgattctccgctacgttgggagaaggaatcagaatcgacgcttttcccgccgcttccaactcgcttagggtactggcaccagaccgtccgatgatcaaatctgccgctgcaaaacattctggcatatcataaatatattcccttatgtctaaatttttatttgttttactatttgtaatccccttttgccgcaagagctgcggaaaaagttccacaccatatgcgcctgtggcatggatatgaaaaatatcagggttgttctgattgtgggcaatcaattccgccattgcttcgttgactcgccgcgcgcctaaacttccaccgaaagacagcacacagatttttccttccaaccccattttttttcgcaccgcttttcggtcagccgtaaaaaaagcttccctcaccgggtttccggttacaacataactggcgttttggttgagatatttcttcgcctccggcaccgccagcatcacacagtctacatatttgctcagcagcttggtagttacaccgggaaacgcattctgctcgtgggttagagtagggatacccattttcgctgcctgtcgcaccagggggccgctgacataaccgccggtacccattaccacatccgggagaaactcccgcagaatctggcgggaacgccgccccgatgtggtgagataaaccaacgccatcatattgtttttgaaattatgccagctgaactgccgctgaaagccttttactttaatgggagcaaaatcaaatccggctttgggtaccagtccggcttccattcccaagggacttccggcaaacaagatctgtgtgtctggctgctgctttttcaaatagccagccacagccaaagccgggttaatatgcccccctgttccgccgcagacaaacaaaacccgcatacaaaatcatccttcctattgtttttccagcgccgcacgcctggaaacagataaaataacccccatctgcgctaacagcatcatcagcgcggtaccaccatatgagaaaaacggcaaactgataccggtgtttgggatggtatttgtgacaacggcgatattcaaaagtgcctgcagaccaacctgggttgtcaatcctactgacaacatcgcaccaaatttatcctgcgcccgaatggcaatcacatatccgcgccacaccaaaagcgcgaataaaatcacaataatagacgcccctaccagccccaattcttcacagacaatggaaaagacaaagtcgttctgcggctcagggatatagaggtatttttgtctggagttgccaagtcccagccccattacgccgccggatccaatggccaatagcgattgaatggtttgaaaccccaggccctgtggatcggcgaaaggatccagccaatactccaaacgggactgggcatactgaatcacgccaggtatcatgaccactaccacaacgcccgcggctaatgcggccactcccaaaacaaaccacttcagatcaacgccgcccacaaacatcatgacaatgccgatggtcaggatcaggatggtaccggacagatgaggttctaataccatcaatccggaaatcacacccagaacgatcaaaaaaggaagtattccgtaacggaaagtcttcattttttctccgtatatggtaatcattttggcgaataggataacgactgcgaatttggcgatttccgatggctggaatgtggttaaatttccaatgggaatccatcggtgcacacctgcaatcttgggcataaacagtaccacgatcaacaacacaatcgcaacgcccattacaggggtggccagtttctgccaatagcgatagtcaaaattagatgctacaatcatagcgacaactccggccacagcaaaaatcatctgttttttgatgtaataaaagctgtcattatcatggtaataagcataagcgtagctggcggagaaaagcataatcaggccaaacgtcagcagaagaagaaccagcaccaaaaaggtaacatccatgtttcctctgcccgtcggatgcggcttttttctttgcgcgttctgtttttgcaccatccaagcttccctctttccagataaaaattcccttataaagacacaacccaccaaatagccaatgcgcatccggcggcagtaaccaaagaaaatacacttacaattttcacttcgccccatccgctcatctcaaaatgatggtgaatcgggctcattttaaaaatccgtttgccagtcaatttgaaagaagcgacctgcaacatcaccgaaagagtttcgatcagataaataattccgatcatggcaatcaaaaacggcagccccaggccaaatcccatagcaactaccaatccgcctaaaaacatagatcccgtatcgcccataaacacctttgccggatggaaattccaaaccagaaaacccagcatcgcaccggcgacagccaccgcaagaagctgcatttcatagacggataacaatgccgcaatgatcataaatcccaaagaggcaataaaagtcactgatccggccaatccatcaatgccatcagtcaaattcactgcgttgaccgttccaacaatcaggataaacaatgcaaccggataatagaacaagcccaaatccaaactgccgataaacggaattctcagtacagtggaagtatcccccgccagataaagaataatcagataaatcgctgcaatcaaaatctgcatcaccattttttggccggcagtaagccctaaattacgctttttgactactttgatataatcgtctacaaatcccagaaaggcaaatgccagtgccataactactccagcgaacagccgagtgccaaaaaccggggaaatttcattttctcccccgccggcactcatatagacaagataccccacagtaactgccaccagcactcctgcaataaacaaaaatccgcccatggtgggagttccttgtttatttttatgccatatcggtccaatatccaagatggtttggccgtatttgactttccgcaatagtgggatcagccaaaatcccatcaaagcggtaacgccaaatgccaataatgctgtcattagaatgataaacgtcctcataatacgcccctatccgccgctccaccgcagcatgttgtcgttaacttcgggtacaagcttatcccctagggctgcttgtaaatcgcttctatcagggtttccagtgccattccgtggctgcccttcacccaaaggatatctcctttttgtatttgagaaatcacgtagtcggtcagcgcctgtttttctggaaaccaggctgtatccggcacacctgcattttttgcctcttctatcatcagctgcgccatttctccataagcgtaaaccgcatccaggtgcatgcgtcccgccagctgtccggtcatccggtgtgcttgctcagaaagataccccagttccagcatgtcggccaatacggcaattcgccgtccggcgcacggcattcctgccaatgtggtcaacgccgctttcatggattccggacctgcattgtaacagtcttctaccacagtaaacccatgaaaaggcgtgattttctgccgccatccagttacctggtatttatccagtgccgcggcagcctctttgggttccattcccaagcagacgcccactccaaaggccgccagtgcgttgagcacattatgctgccccatacagggaatatgcgccggatatttctctccctgatagcaaattgtaaaggtcgtgcttcccatcaggacaatcagatcttttgctgtaatttgacagtccttattttcgatgccgtaaaatattactttgagagccagattttcgtatccccacaacaaaggatcatccccgttgagcagcagcggcgcaccttcccgcaagccctgaacaatctccaacttggcgcggcggatattctgctgactacctagtcgttccatatgagagacgccaatattggtgataacgccaatctgaggcagcagcgtagtagccagttcttcaatttctcccaatgcggtcatacccatctcgatcaccgccgcctggtgcgccggcgtcagctccagcagggtttgaggcatgccgatattgttgttgagattgtcttttgtagtcaaggtcgtatatctttgccgaaccaccgccgcaatcatttcccgtgtagtggtttttcccacactgccagtaatgccaactgtcactgggtcaattttaattcggtgcagcctggccagtgcccgcaacgcccgctcggtattgcccacatacagtgttttctcctcaggctccgcaccttttttgtgtgccaccgccgctacggcacctttttccagcgcctctgtgataaaacaatgtccgtcaaaaaattccccttccaatgcgataaacaaacaacccggcgtaatttttctggaatcggtcacaatttcgcttacggtgccaaacaattttttatccgcgcagacccattcactgatctcgctcaaggaataaccgctcaaccaaactccctcatttcctgttttcttgcagctcagttaaaagccgcgccacaacttccttttcatcgaaatgaatagtgccgtaaccaagcacctggtaatcctcatgtcctttgcctgccagcaccagcacatctccaggctgcgcgtgggacagcccccattcgatggccgtataacggtctgggatcacctcataaggcacagacgctcctgctaaaccgggcaatgcctgcttaataatctgaatggggtcttcccggcgaggattatctgaagtcaggatgatataatccgcatactttgccactgcttcggccatgtgaatgcgcttggacggatccctctctccgggacatccaaacaacaccatcaatcggtttttgacaaatggctttaaagcgggcagcaccttttccaacccgtccggtgtatgggcataatcccgaatcaccgtgaaatccgtgtcggtgtggagcacttctgtccggcccggtatcccaggacaactggataacccatcgcagacctgctgcatatccaatcccagcatcagtgttgttaccccagccgccattgcattggccactgaaaattcgcctggcatggaaaagctcacccggccgatttgcgcgttacccacaatggtaaaacggtttcggtccaccgtagggcgtatgtcttttgcggtaaaatcagctgtatccgtatgaatggaaaaggttattgcagggcatgggatttcctgtgttaatctgcgtccatattcgtcatctatgttgattactgcggcatctgaaagatcaaacagctttttcttcgcctgataataattctccatggttccgtgataatccagatggtcctgcgtcaagttagtgaatacgccaactgcaaaccggcagccggccagccgcttttgatccagcgcatgggatgaagtttccattaccacatactcgcatccggcctgggccatgcgcatgaacagcacatgcagctccccgggatccggcgttgtgtttttcgctggcagaaccatatctccaatctcattgtgaatggttccgatcagtcccactttttttccggccgattccagtatatgcttaatcaaataagtacaggtcgtttttccattggtaccggtaatcccgatcagcttcattttttgggcaggattcccataaaaattgctgcacaaaataccatatgcttcccggctgtcctctaccaaaagttgctgatccagccctagatccctttcgcataccaccgcagcggcgccttcttttaatacctgctcggccgccgaatgcccatcaaaacgggctccggcgatacaaacaaacaggcagcctggcgtaatttgcctcgaatcgctggtcacccggctaatttccaaattttctgttatgcccgtaaacgggacatttttcatcaggtcaaaaagcttcaaactgtttaccccctttatgtgatggggaatgcttctttttctatccgcattctgccgcacatgctattgtatcatatctgctctccgaagtatggcagaaccggtcgcattttaagagctttcgctggcggccgtatctcctacctgctgaacggttaccgtgaccaccgttcctggctgcaccttttcatccggcaggggcgactggctcaccacctgagtctgcacattatccgggaattctccttcaatcttgatattcagccctgcatttaaaatggccgtgtttgcttgttttcccgtcttgcccaacacattgggaaccgatacattttccgccagttccgtttcgtctgtgtataaaatcactgtgccgccgtagggaatttcgtatccgtactgaggcacctgtttcagcacagaatcgccatcgcctacaatacgggctttgagtcccaaatcaatcagctgcgactgagcctctcccaacatgacatcggtcaggtaaggaacctccacactggtatccttatccacatccacctgtggttccattcccagatagggcagaatatccgccaacatattttttacaatcggcgcggcgatggtggagccatacgggtcatccagcttcggttcatccaacatgaccagaaccgcaatctgcggatcatctgccggcgcaaaccctacaaaggacaagattttccagtcactgtcattcgcacccagcttttcagacgttccggttttgccgccgatacggaatcccggcagttgggctttgcgtccggacccttcggatacaacactctcgcagagtgccgccactgtggcgctggtctcattggagataacctggcgctttaccaccggtgttgtttcggacacaacgttcttttcttcatccactacctgcttcaccacataaggctgcatcaattccccaccgttgacagccgcggaaaccgcagtgatcagctgcagagttgtaaccttgaatgtttggccgaaagagctactggataactccgtaatgccgaaatcctcctcggtatggtagatactgcccgcttcaccaggcaaatctataccagtcgtctgagtcagcccaaacgcctggaaatattctcggaatttttctttacctaacgcctggccataagaaatgaatgccgggttgcaggaattttgcagggtctgggcaaagttctgagtaccgtgccctgccagtttccagcaatgataggttacgccgccagattcatacgtaccagtacaagtaaaagaatgatttaaactgatcactttttcctccagcacagaggatgcagtaatgattttaaacaccgatcccggctcatatggatcagaaattgccttgttccgccactgttcatactgagcctccagcagagccttctgccgggcatcttcatccgtgatggcgtccagctgtgcctgcacgtttttgtcataaatggtattgggcgagttgggatcaaagtccggcttggtactcatagccagaatttctccggtttttacatccatcacaacagcacaggccttgttttgcacctcgtgttcaatcaccgcctgctccaaatgcttgtcgacaaagtgttggatgttgacgtcaatggtcagtaccaaatcgtttccattttgcgcctcatacattttttcatatttaaaaggcatatcggttccccaggcattttttgcggatacgatctggccattggtcccacttaaaacgctgtcatagtaagcctcaatcccgtaagcgccctgattttcgcttccggtaaagcccaggacagttgacgccagcgttccatagggataatatcgtttatagtcctcttccaaccccacacaggtaatgccgttttccattacaaactgggttacttcatccgctaaggggcgttcgattttctttttgataatctcgtaatatgtattgcgtttggatttttccagtacaaactcctcggaaacatccaaaatctccgacagtcctttggcaataagcgaacgctcctcctccgagtcgatatctaccggagaaagatagactgtccagactgttccgctcctggcgagaatttctccattgcggtcatagattgtgccgcgctgggcactgagactcgttacccgcatttgctggcgcgctgcccgtttttgcaagtcttccgcctgcaccacctgaagctgaaacagcctgccgatgatgatggaagaccctaataccgatattgccagaatcaaagcaatgatccgttttttcatttgtaccgttgtgcttggaaaagccattgcatatcctccatttcggccgacagcattcgatctctgaccccatttttagaaacaaaaggagtcaagaaatttcttctcaactcccccgctgtcacactaggagccgacggcgcaccttggtgtttttccgccaaggtaacgcatatcccccctactgtcttcctctttatatatgatattgcttaaaatttcagatattcctgaatttttgtgataacctgtccaatgatggcgaagatacccgtcccaccgctgtttctggcagtaacaacatcttgcgaagacaagtttacgtacgcaacctgataattttccagcttactaagccctaactcattgactgccgtttccgcaatggcttcatttgacatttttgcatccagttcccggttcaaccgcgcattttcattctccagctgttccagttctgcagtcgccgaagtaatttcagcgctgacctcggcaatcattgcgttgttatacaaaagcagagccgtaaccgaaaccacaatcatggccaccattacaagagtgattggccgcacgccatacacggattttactggttgcgctcgtttgacaactcgtactttcggctgttcaacaaccttcggttcataacgagacaggtcataggcctggctacctgaggccatttttctcaccctttctgcttcctttgattatttttcctgatttttctcgacgatgcgcagctttgcgctgcggcttctgcgattttccgccaattctttttctgtcggcgtaatcggttttcgactgaccagtgttcccctgggctttttcccgcaaatacatactggaaaatccggcggacaagtacaaccctttgcaaaatccgcaaatttttgtttgaccatccggtcctccagagaatggaaggtaatgatggcaaatctgcctcccggattcaaaaaatcaaacgcctgatctaaaacctgagacaaggcatctaactcgccattgacggcaatacgaatggcctgaaaggtttttttcgcgggatttttttcccgcctagcagaatagggcatcgattcccgtatgatttctgccaattgtccggtggtcgttatgggcgctttggctctcgctttttctatatttttcgcgatgctccaagcatacttttcctcaccgaattcccgaatgatgcgggataaatcctcggtcgaataagtattgaccagatcttgggcactcggcccggtcttactcatacgcatatccaacggcgcgtcctgatgataggagaatccccgttctgccgtatccagctgataagaggaaacgccaagatccagtaaaatgccgtctacaccggtaatcccccgctcctttagcgtacagcacagatctctgaaatctgcctgtattaccgtagcctgcgcataaggcgccagcctttgttctgcaatgttcactgcgtccgggtccttgtccagcgcaaacaactttccatcggtcaatcgttttgcgatttgacaggaatgtccagcccctcctgctgtcccgtccacataaataccgtccggccgaatggcaagtcccgcaatgcattcttccagcatcacggaataatgggaaaactccatcgctccgctcctttcggcatatctgtgactaaaatcccagttcttccatcgcttgttcgatggtctcggcggtcagttcctgacaattctggttccatctctccttatcccagatttctgcccggctggatgcgccgatgatcatgatttctttttccaggcccgcatgctcccgcaattttgccggaatgacaatacgcccttgtttgtccacttccacgtccgctgctccggcaaagaaataccgctgcaatgtccgcgatttggaaagaggaagctcttttatttttctctccaggtttccccattcttccatagagtatacaaacaaacagccgtccaggcctttcgacaggataaagtggtcacccaagtcggttaaaagcttggcaggaaaattgacgcgtcctttttgatcgagcgtatgcgcatactcaccaatcagcattttcccaccgccctctctttttatcacttttcaaccacttcacaccactttacaccactgtggttccattataaccagttcttttgaaaaaagcaatgttaccattcaaaaaaaataggatttttttcgttttttttcgccgaatcttctattatctcttctttttctctgatttcttttctttacgggaaaagattggaaaatacttcatccatttttcccggcatccttgactttttctgtatttcagcataaaatggcaccagcagacgtaaaccaaggggggcatctcattgaaacagcaagcacaagaaatttttaaacatcttgcgcctatgatcggcaatactcctttactggagatctgttgtacctaccaaggtcgatgtctgcgcatctttgccaaagcagaagcttataatctcaccggcagcataaaagaccgggttgcttattatattttgaaaaaagcttatgaaaccggcgctatcgagccggggatgaccattgccgaagcaaccagcggcaacaccggcatttcctttgccgcggtaggtgccgcgctggggcatccggtagtcatctatatgcccgattggatgagccgcgagcggattgccatgatgaaaggttatggcgctacggttcgcctggtttccaaagaggaaggcggcttcctcggatcaatccgcatgaccgaggagttagcccaaaaaggcggtgttttcctgccgcgtcagttttccaatccggataacagcgccgcccattacgaaaccaccggcgcagagattcttcgccaactgaatgatttgggacttcgtccggacggattggtagctggtgttggtaccggcggtaccgtcatgggcattgcccggcgactaaaagaagccgttcctgcttgccgcgcctttgcaatggaaccgctcaattctccaaccctttccacagggtataaggtcggcaaacatcgaatccaagggatttctgatgacttcattcctgatttgctgcaattatccgagttagacggcgttatttcggtagatgacggtgacgccattattgcggcacaaatgctgtcccgccagttggggatcggcgtgggtatttcctccggcgctaacctgatcggcgccataatggctgcggaacggttggacggttcccctgttgtcgtgaccgttttttccgatgacaacaaaaaatacctgtctacggactacgctgaaaatgaaccgatgaaggacagctattataccaaagatttggttcttaacagtgtaatcgcccatcgataaatcaaaaacacatctgcgtctgctataaacttcaaaaaataaaagggaaggcttacgggatattgtaagccttccctttttcattacatcatacctgcacttcatttcattttcggtttttatgatcctccagcgcccaccgaaactgggtttcatacagctcccggtatacgccgttttcttccactagttcctgatgggttccccgctgcacaatttgtccttggtcaaccaccagaatctcatccgccgccatgatagtggacaaacgatgggcgataaccaggctggtacggcctttgagcagagggtcaatggcatcctgaatgacactttccgaaatggagtccagcgcagaagtcgcttcatccaggatcagcaagcgtgggtttttcaaaattacccgcgcaatcgaaaccctctgcttttcgccgccagaaagcttaataccccgattgcccaccatcgtatcatacccctgcggtagccccgcaataaaatgatggatattggcctgacggcacgcttcgatcagctgttcttcactggcctgtgcgttggcgtacaataggttttcccggatggtaccgttaaacaggtaggtatcttgtgtcaccacaccaatatttttgcgcagcgtctccagattaatgttgcgtatatcctgtccatccagtgtgatgcttccttccgtcacatcatatagccgcggaatcaaatggatcatcgtcgattttcccgcaccagaaggtccgacaatcgccaccgaatggcctgcttcgatgcaaaaattcaagtcccgcagaactggctgctccggatcatagaaaaatcccacgtgacagaattccaaatcccctctgaccgattccggtattattgcatgaggccggttttccacttccaccggcatatcaaaataatcgaaaatacgagtaaaaagagccatggaacgaatgacatctacctggatattcaaaagagagttgactggctggtacattcgactgagcaaagataccataaccgtaatatcgccaacagtcaagctggtatttcccatccgaatgatgagcagacctcccaccaaataaattaacatcggtcccatgctggtaaaagtattcatcgccactcggaaccagcggcccgccatgctctctctgatgttaagacgagtcatctccccattgattttttgatatttttcatactccatcttttcattggtaaataattttaccaacatctgtccgctaacgctcagcgtctcgttcagaacctgattgatctcatcgtttttttcctgcgatttcagtgcaaggctccaacgggtttttcctactctctttgtcggcagtacgaacaacgggacgataataatccccaccgttgccagaatccagtttttttggtacattgccactaccgaagtagccagcactgcaatattgcttaaaatgctggtaagggtattggaaattacgctttgcacgccggaaatatcactggtcatacgggtgataacatccccctgcctactgctggtaaaaaaacggtgggacattttctgcaaatgagcatacatttgattgcgcatgtcataggtaatgtgctgtgccacccaagtattcagatagctttccaatacgccaatcagattagaaattaccagcacagcaaacgaaaggccaatcaagcgcagcaacatgctgaaatttttaccaatcagcccctcatcaataatctttccagtgagaatggacggcaaaagcccaaaaactgacgacaggataatcgccgccaaaaccagcagcaattggggccagtaaggcaacagataagagaaaatccgtttaagcaaggcttttgtaatccgcggacggtttttcttttcttcttccgttaaaaatcggtttggtcctcgcattcctcccggacctcctggcggcatacgcatccctccttttcctgttcttcttccagacagtcaattaacttctgacaaatccgattcaattcccgtgtctcctgcggtgtcagacactgcaaaagagcattttgatatggcaaacgggtttgattgtgccgctgaatctgctggcgcccctgttctgtcagccaaatatgggaaatccgggcatctttttcatcgcgccttctgagaatatctccctgagattccagccgggaaagcatttcgctcagagacgatggacgaatatccagcaattcggtcaacttccgagcactggtcccttcataccgggcaattgcttccatcagtcgtccatatccgtgaaaatggcgcggtccatgatggtgtgaacgaccccggcgtaaggctcgcatcaaccgaaacagacattccagtggttgctcttgtaaatccatttttgcacccctttcaaataattcggtacctaatcatttgcgtcacttatataatactttggtaccgaactattgtcaagtgttttggctgcacatataaaaaagtgcagactgcggtacacgcagtctgcactgtctgctcatttaagcataaagggggaattttataaaaagccaacccttttcctctatttttgcaggtttctgccagatgacttaagcgcctggcgagtagaacgtacatctcccaaagctttggacagagtctcttccgtacttttgagcattgtttctgcaaactcttgagaagcctgtctcatttcacgggacttcatctgtgcctgggtcaagatttccgtcgcacgggcctgagcctgcttggtgattttctcttgctccaccagtgctttggcatgttcctctgccttgcggacaatatcctctgcctcttttttcgccacactgatgatatctgtccggtcagcaacaatttgtttggcctgcttaatttccgcaggcatgttcaaacgaatatcgtcaatcaagtctcgcaccttttctgcatcgacaacacagcgaccgccagtcaacggcagattccacgcgcgatccaacatttcgtccattgcatccaaaatatcatcgatattcatcgtataagccctccctgaaactacgattttttacaacaaagccagcttgtaccagccaaaacaatgtgaattattcttttttacacagccggctggcgactcgatccacaatttgcggtggaagaaaatcggaaatgtccccgccaaactgggcaatctgcttgaccaagctggaactcaaatacatattttgcgaggccgtagtcagaaacaccgtatccgacgtgggattgagttttttattggctaacgccatctgaaattcatattcaaagtctgataccgcccgcaggcctttgacaatcgctactgctcctacgtcccggacataatcggccaacaagccggaaaaggtatccacttccacgttgggcaaactgttcccaataacctcccgaatcatctgtgcccgttcttccggcgtaaaactcggttttttcgcggcgttgattaccaccaaaacaattactctgtcaaacaattttgaagcccgtgtcacgatatccagatgtcccttggtcactggatcaaaactgccaggacaaaccgcaatcctcatctgctgctactcctcttctgggatccgataggtatggatcatcgctttgccataccggcgggtcttaattaaccgaaaatttcccacttcctgcggcatttcttcatgccggtcagtctcgcacaggatcactccgccaggagccatctgctgggctaccaatgggagcgcagcctgagccaatccttgattataaggcgggtcaataaaagcaacgtcatattctccgccgccgatttttaaaaaacgaagggcatccatagcgaacaccttgcattgttctgtaaaaccgcatgccgcaatgttggcacgcagtgcttccagcgaaggccgaccactttccacaaaggttaccgatttggcgccgcggctgatcgcctccagccccatctgaccggtaccggcaaacaaatccaacattcgtgcgccttccacctcgaaatgaatggcggaaaatacggcctctttggtcacttccgctgtggggcggacatctgtcccttccggagctgtcagcctgcgtccgcgggcggaaccggtaatgatcctcatttttctcctccattatgcgccgtttcgatcagaatcttcctgtttctccatgatctacatacggttattatggggcaaaatccatcggatgtcaatatccaaagccctgttattcttcatcggcgtgcagccaatcatacaggcgctgagcacaggcagatgtcattcccttaaccgctgccaattcctccaccgttgcctcccgcatcgctttttgcgttttaaacgccgtaaacaacgctttcgctctcgccggtccgatcccttccactgaggtcatagccaattccatcccactttttcgatgacttttgcgggaaaaatcaatggtgtagcgatgtacttcatcctgaattcgggtaatcagcgaaaacgcgtttttattggcgttgatcgcgatttcaccgccgtctttggcaatggcacgggtccggtgccggtcatcctttaccattccgaacaccggtacggtgatgcccaattcctccagcagcggctgaatcgccgctacatggcccttgccgccatccagaagaatcagatccggcagacggccaaatccttcgccggaagatttttcctctttatatcgggcaaatcgtcgggaaagcatttcccgcatactggcataatcgtctggagtcagctgggttttcatcttgaatttgcggtaatattttttttgagggcgtccgccttcaaacaccaccataccgccaacaatggtgccggcgccaatattggaaatatcgtacgcttcaatgtatgccggtggcgctccaaggcctaataaccgggccagttcatccaatgcggaaagttcccgtccagtgcgggatacttcgtgggaaaggcgttgggaagcattattgcgggccatctccaccagttttgcctgctcgccccgctgcggcactgtaatggtaattttgtgccccattttttgtgaaaaatacgcctcggtcagttcccgatcttcaaaatccccgtctacctctatcacacgcgggatatcctcacgatagtaccccagtaaaaactcccggcgaaaagcagatagatcgccactttcataaaatacaaaatcttttttatctaccaaccggtggttccggaacagcaaaacggccgctgcagtggcggaatcgctctgggtaaaagccacaatgtccgcgtccgccgctttggagctgaccaccttctgccgatctgtaatgcgctcaatcgcttgaatcctgtcccgatactgcgctgccttttcaaagtccaaattttcactggtacgcagcatctgttctttcagtctttccagcgcacgagctgagccacctcggatgaaatccaatgcttcttccaggcgggcagcatattccgcctcatcaatcctgcctcgacaaaggccgacacattgtttgatatggaaattcaggcagggccgccctttgcggaattcctgaggaaatttgcgactgcaggtgggcagcataaacaccttattggtctcatccaccgtctgtttgaccacgtaagaggacatataaggccccagatagatacatccgtcattctcctgcttttgcaaaaccgcctgaatacggctgaatggaggaggtgttactttgatataagaatatcccttatcgtcttttagcaggatattatatttcggagtgtactgtttaataaggctgcattccagtaccaatgcttcgaattcactgtcagtgacaatcgtctcaaaatcatagacattttctaccattttatagactttttccagatgtttttccacactgcggaaatagctggatacccggttgcgcagtgctttggcctttccaatataaataatcttgccgcttttatcccgcatcaagtaaacgcctggttcttttggcaaccggcgcaccttttcccgcaggtattccaacctcggattgttcatttgagcccctcctttcagtaaaacaggaaaaagccccgccgtgcagttgctcgggaggcttttcatgatgctgtgtaattactcggcgaaaccggactcaaccagttttaccaatccgctgaccgcctgttcttcatcagcaccgtcggcaataatgcggatggtagttccacctacaattcccagagaaagaacgccaagcagactttttgcatttacgcggcgctcatccttctccacccaaatggaggacttaaactcatttgctttctggataaagaacgtcgcggggcgggcgtgcaaacctacctgattctgaacctgaacatcttttacaaacattactacaactctcctgcttcttcatcttgaattctactttgcttcttctaaacaattctttatgggacaaccaaactgtctattattataacacagcaacacggttcgtcaacgcatcccggtggaagtttgcagttttttctgcaaatttctgcttgttggataaacaagagcaaagcaaaaaccatcttgtttgtgtggattaaacaaaatattttccccaagctatgcgatttcaacgatgaaaagcaacacttttagtggaaaaacaagctttatcctacgaatcaggcggtccttcctttttgctgccgccgtaggattgtccctttggcaatcattttttcacacggaattctcagcaactgcatcggatggcgcgccgcatccagtgattgtcctttctcgtcaaaaattgcggaaaccgtcaaattttccggcggcagaccaggagaaagcacctccagaatatcgcccgggaaaaaccggtttctctgggtacaaaacagcatgttgtccgaccatccttgtaccacagctgcaacatcataatcgcggatatagccgccgctttcataatactggccattttcggggcggccaaaataaaaccccgtgcaatactgccgatggctgactttcttcgtctcttccagcagccaaccaggtaagcggtaatgggctggatcttttttcagtaagtctacagcacagcggtaagcgttggtaatcgtagccacataataaaaggattttgcccgtccctcaattttaaaactgcttacgcccgcttcaaccagctgatccagatactcaatcatgcaaaggtcctttgcattcagaatataggttccgtcttcttcttctaaaaccgggaaaaactctcccggccgtttttcttccaccaaatgatagctccagcggcagggttgggcacattcgccgcggttagcatcccgcccggccagatagttggacaacacgcaccggcccgaaaaggacatgcacatagccccgtggacaaaagtttctatctctagttccggcggcgtattttgccggatctgccgaatctcatccaagcccaattcccgggccagcacaacccgtttgacccccatctggtaaagctccatcgccgtcaggtgattcactacacccgtctgggtggacatgtgcaattccattttcgggatttccctgcggcaaagcaacattacgccaatatccgctacgatgagagcatccacacctgcatcgtcgagaaaatggaggtaggcgggcagaccggcaagatcctcttcacgcggcaggatattacaggtgacatacactttcactccccgccggtggcaaaaatcaacagcgcacaccagttcttcctccgtaaaattcatcggcgatgcacgcataccaaagtccttgccgcctaaataaactgcatccgcaccatactgaaccgctgcagacagccgctcaaaatcccccgcaggtgccaagacctccggctgtttccaatttgccataacggccacctttctttttggaaccttataccctcacacaaacagtcaccggaaaaccggtgactgtttggttcttcttatcttagccggccgcagaagaagaattcttctttaattctgcattgactcggtctgcctgtgcaatattggcgtcatgctgctctaacgtttcagcataatagtaggtgccggcattatcggtgacaaagtaataataggtctgttcatgctgtgccggatacagcgctgcttcaatcgcatccaaaccgggattacaaatcggccccactggcaggccgttgcagacgtaggtgttatatgcgtcatacatagcctgattggtcatgccgatattctttttaatgacccgctccacataaaagatcgttggatctgactgtaggttcggataatgatccgaattgcgcagacggttgtggaacacttccgaaacatttttcatttcatcgggatcgctggcctctttctggatgatagaagctaaaatcagtgtttgatccagcgtgagattcagttcattcatgcgagtgcgcatcccatcggtaatctgtaaattaaaatcctttaagaaacggttgataaccgaatccacgctctcacctacaaagaactgatgtgtgtttgggaacagatatccctccagcttataaaatcgaaggtcgttctgcggaatattgtccacaaacgtataattgtatccgtcaccattgagtgccgccaaaaactcactggcggaacagacgccctgctcctccaattttttggcgatgtctaccgaagtagatccttcagggaacatgatttccactacatctgtccgttcggttccggcctgtaacgcataaataattgaatcataatccattttatcagtcatgatatattcgccgctttgaaacccatcttcctgtttgaacatcacatataaacggaaagcaaagggttccgtaatcacaccgctttttttcaaaatccgcgcaatttcactggtggaagcaccttccggaatgtctactgtcatctgctgttccgttgtattgtcgccgccaaacaaagttaccgcagtaagatcctcaaacgcatggatcgcaaaaaacgcaaggcatacgctcagtgccaaaaacaacagtgtcaacaaaagcgcgcggcccacgcggtattgtttttttatcttctttttggctttctttttgccagaaactggtgccggctgcggcggccgtttttgctcatccttttccggcaacgaagcagagggacgttcataatcctgctgagaaatatttacctgaaccccctcgcttgacgggtcttgcgcttctccataagaaacgtccgtacgatctgcaggaatttgtctctctccaatcgcggccgctgtttttttcgcggcatttgtccgatcccgatcatccggtgctaatgacattccattggaaacacgcgcaccgccggatacggcaggatggggtaatccagcatcctgcgccggacgtcttttctccgtcagccatcggggtagttcctcttcgtccacactatcagtacgccgcaccggaactttttggggatctggcacatttttcaaaggatcggaaggcgcatccttctggacttgattcgctgcttcgggcgggttggagcgctgtattggaacccgcaccggttcctgcctttcaaggtcggcattatcctccacatggatgctatcgatcaaatccttaaaaatatcctgttcgttcttttcgttcattggttcctccctttggccttaccttactgaaaaatccacatcttttgctcggcagggctttcatcctgccaaaggccatattttctgcaaaccgggcaattttacttgctttaccgtttaggcggcaaaaacaggggtttttttcttctcttttccgtaatcaacaaatccaccggtaggtcataataaccatgcggcaaacgctggcaaagacatccttcatatacaataccgattttaaatccggtgtagccggataaaaaacggtcataatatccctttccataaccgaggcgaaacccatgccgatcaaaagcaagtcctggcacaaggcagatgctgttttgatcatctgaccacttttgacatctctccaccaacggctctaacacaccaaaagtgcggggagcaaggtctttcattgattggatataataaaaatccatctgtcgtgttccatccacgcaataaggaaccgccacccttttgccgtcacgcaatgcttggccaatcaagccccgcgtgtccacctcaatgtcggtagatacaaaggtcaaaagtgtttgacaggcttgatactgcttaagagactgcacgcctcggcggattgccatatcctttttctgtttgaccaagggcggcatttctcggcggaatcgcttcattttatcgcgcagctcatttttctgcacccggatatctttctttagcattgcattgactctctcagcgctttggcgcgggcgggcgataccatcacttccaccaatttcagcgcaaaatctactgcgacgccggcccctttacccataatgatgttatccgaaaccaccacccgctcaccggtatagtaagctttgggcatttgagattcgaatcccggataacaggtaatttcccgctcatccaaataccccatatgtcccaaaatcgatggggcggcgcaaatggcaccgatataacggttatcctccatggcgctgcggatcgcctcttttactacggcagacttttctaagtttaaggttccggggattccgccaggcagcacaatcagttccgccgcagaaggatcaataaccccttctacggtatcacaggctacaacaattccgtgggaaccgccgacgatctcaccggtaactcccactgttttcacttccaattctgcacggcgcagaatatccactaccgccagtgcctcaatttcttcaaagccctgtgccaaaaacacatagaccatcttcaatcccccatttctaatcatttgtttatcttgttattttaccttatctaatcccgttttgtccagtcaaaacgacaaagttctgagtaaatcagacaatgcagcttctacctgatgagaaacttcttcccgcgacaacagattcttcccatcacagcattccactacacgccagccgcattgatctgccacataacccgcagcttcatggcagcgaagcagatattggagatttttttcatggatatctcttttttcctcgtctccgccataacgctgagacaacaggtttttcgaggtattggggtgcatttttaaatataccgttgccgaaggctgtggcagtcccagctttttatattcaaaatcgaacagccagtctagaaacccgctccattcttcccgcggaagcttcactgactgatgaatggcattagaccccacataccggtcacagagaattacggttcctgcttcatagtccttttgccatccagtccggtaactggcaaaacggtccatggcaaaaaaactggatgccgcataagcgcttacgtcctccgggcggctgccaaactccccgtccaggtacatccgtaccagacaggaccacggcttttcataatcgggaaacgacaccgtttttaccgggattccccgtttttgcagctgttgggccaaaatcgccgtttgcgttgcttttccgcttccgtccagcccctcgatgacaatcagtttcatctggtagctttcccctttctcatggcgtcatacgcccgtacctcatccggatgaccacagctcattttcccttccgggcaatttcctcggatgcagggcgcaccggcattttggaacagcgttggcgctacctcatataccaaagacagcatctgataggctacctctcggatttcccactgagcccggttgcagcagcgatgccgaaaaaagttaagcaggctgcgggcgttcatggttactaccatttgggtgtcgcaagcattgggcagaacaaaacgggcatcctcaatcgccattttttcggctttacgggcagcagccttttcatccagcccctcagccataagcgttccggtatgcttttgtttgagcatagcagccaagcgatcataactttcgccaatttgcgccatggtctgctcatataattccagtgcttcgggaatggcagcgatctctggaggagtgacatattgaaaatctttctcacggacatagcgctgactttgcacgctgtaagaagcaatgcggtgtcgggtaatctgcgccagcagcgaacgggaaacgccctcaatgccaaaggtaaaagatacgtgttcaaccgggctttcatgcccgatggtctggagcatttccaaaaaactttccgttttctccggcgtcaaaccgtccatcagggtttgggggctgctggaactgtaacacagctttgccgctgcagcaaccagcttttccggttctggcgtataggccagcagggttactttcgccatttttcattcccacctttcttattctactaccttctttaatttcgcaaagttggccatgagctttttggtacctactttatcaaaagacacttcgaccaacaaatcgttcgccatgggcgaagcggaaatcaccaggccctttccaaaaatcttatgactgaccatatctcccggacacagcggcactgcggatggagaggacataccactggaaacagcggacaatccgccggcccgcacagtacctttgggtatttcctgttcatgggtcccaccggaccagcgtttctgctgaacggtggtatcaatcaaatccaccaattctcccggaatctcccgaacaaatcgggacgctttattccaagtggtctgcccaaacaacatccgctgggcagcggtggtcaggtacagctttttctttgccctggtaatcgccacataggccagccgccgttcctcctcaatttcatccggagagttcatactcatgcggccggggaaaatcccctcttcacatcctgccacaaatacataagggaactccagccccttggctgagtgcatcgtcatcagcgtgaccgaatcatcctgcaaatcggtccggtccaaatcggtatacagcgccacttcctccaaaaagtcagagagggttccctgcggcgcttcctgctggaatttgatgatcgacgaacgcagttcatcaatattttcaattcgggtctgcccctcaaatccctgcagctgcagcatggaaagatacccggtatcatccagcactgcgtccagtaaaatttccagcggttcctccagcgctttttcgatcaacccctgcatcatatccgcaaaggcgcgcagcggcgtactgcggcgctgcagcttttgatactggtcagcgtcggccataatttgcaaaggcggtacgcccagctgcgccgatagttccatcacagctgccaccgttgcgtcgccaataccccgtttgggttcgttgatgatccgggtcaggcggactgtatcgttggggttattgagaacgcttaaataggcaatcaagtctttgatttccttgcgatcgtaaaagcgaagtccaccgacaatcttgtaagggattcccgctttcaccagcgccttttcaatctcgccggattgggcattcatacgatacagcactgcatgatcgctgtacgcatcccccgccgccacatgggagataatctcttccgtgataaactgtgcctctgatcgttcatctcctgcccggtacagacaaattttctccccttctccatttccggtccacaagctttttcctttgcgggcggtattattggcgataacctcgttggccgcatccaaaatccgcttggtactgcggtaattttgctccagacggatcactcttgccttttcaaactgctcttcaaagcttaagatattttcgatagtcgcaccgcggaatttataaatactctggtcatcgtctcccactacacacagattgccgtgtcctgccgccaaaaggctcaccagtcggtactgcgcatggtttgtatcctgatactcgtctaccataatataacggtaccggttttgataatacgacagcacctctgggaactgttccaacagccgcaccgtcagcacgatgatatcgtcaaaatccaccgcgtcggcggccttcaacgctgcctgatatttttcatacactttggcaatactgctcatccggtaatcggttcccgcctggcgcatcatttccgccggtccttgcagcgcatcctttgcccggccgatggcactgagcaccgccttgggcgcgaaaagcttctcctccatgttcaaagctttcatggtttctttgatcaccttgagcgaatcatccgtatcataaatagtaaagctgcgagaatagcccaggcgctcaatttcccggcgcaaaatacgtacacaggccgaatgaaaagtggctgcagtgatatcctgcgctaccgggcccagacttttttccaaacggtccttgagctcgttggcggctttattggtaaaagtaattgccagtacattccaaggcttcggcggctgatccgccaaaagttcggccaaccgttccggagctgcctgccctccctgcgctgcttggcgcagaaaaatcatatcctcgtccgtcaagtcccgtggcataaatccgctgtgataggcatttccgaaacgcaccagataagaaacccgattgaccaaaacagtcgtttttccgctgcctgcgcctgccaaaatcaacaatgggccttttacctgaaagactgcttccagctgctctcggttcatgcgcgaaaattgtttttctaaaatccggcgtttcagagcgatatattcttcgtaaaaccgattttccattcccggcacctctctttttgcttgccatgctgcaccaattgagaatctgccggcaagccagcatttcaatcatttgcaattttcttctccggttattttaccacaaagctgttgtgctgtccatgatatcatttctcttcgctcttggaacaaatgaaaaagggattcggtagaaataccgaatccctttggactactttggtctccactttacagtcaactgactatttcattggactcacctttaaaatatttaattattctgttgtgaatgcctgatccaatactttttcttaaaagaacttgctcgtaacagctttttgctatcggaactgattttttacattttagatataaagaaaatcgtcttttgcatttagaaaatctattggttaggacatgcagtttctaatttatatcggacagcctccgattggtttggagtatcattccatttgatggactctctttattggaaaaacgaaactgctttccggtcggccgcgtattctccacgaaccccgcggccaaggttctgaaccggttcatctgagtacatggg

SEQ ID NO: 4108 - DNA, 2609 bp, Unknown
  16S sequences of unknown bacteria
tttccccgccccgccgctctttacaggccaaaggcccactgttataatagggaacacattgggaaagaaggcgtttttatgtatgatgaactgacccaggtggacatcgacaaaatgaacgaagagattgcctaccgtaaaacggtgctgcgcccgaagctgattgaggatgtgcagaccgcccggggctttggcgatctgagtgaaaactttgagtacaaatgcgccaaacgggacaaaaaccgcaacgacagccgcatccgctacctggagcggatggtcgccacggccaaagtgatcgacagctgcggcgcagataacggcgcggtagccctgttcagcaaagtgacactgctgaatgaaaagctgcagaaagagcagaccatccgcatcgtaaccaccctgcggcagaacgcgctcaaaggccttatcagcaaagagtcccccgtgggccgggcgctgctgggccaccgggccggcgaccgggtggagatcaccgttaaccccgaaatgaaatataccgttgtgatccgctccgtggagccaggcgaagacgacgcctctctggacatcagcgcgtattgagggtaccgccatgtctacaacgtatcttcgcgccttcacactggccagccaggaggcggaagagggattctggaatcctctgagttccaatcccaaaacccggcgcacctgctacaccacccactatccgttcggtgtgtttcgccgccggcagcccggcgccttttcctttgaccccatcaccattttttacggtggaaacggcagcgggaaatccaccctgctgaacgtcatggccgaagcgctgggcctgctccggggtgcagtgtacaaccgcagcgattttttcagcgattatattgccctgtgccgctgggatgcaggcgctcttccgccgcacagccgcattctcaccagcgacgacgtgttcgaccacctgctgggcatccgggagctgaacgaagggatccatcaaaagcgcgcagagctgtttcaggaatacaccagcgcgcgaaaccgttccattcagcttcagtccctggaggaatacgaagccttttcccgcgtggtggacgcccagcgcaaaagcgcgtcaaaatacgtcaaagaccagctgatgaataacataccggagcgctccaacggtgagagcgcactggaatttttcacgcacgccatcggggaaaacgcactgtatctgctggacgagccggaaaacagcctgtccgccgcgcggcagttggaactgaagcagtttttagaagattccgcccggttttaccgctgccagctgatcatcgccacccattcccccttcctgctgtccatggccggggccaagatatatgacctggacgaaagtcccgccgccgtaaagaggtggacggatttggagagcgtacgcacttattatgattttttcagcgcccatgcgcgggaattcgaccgcgccccctgaattccccggccccgccgggaaaggagattgccatgagccgaacctttaccccctgccaaacggcagagcggagcattcaaaaaaaataccgccgggaactgtgggggcctttcgtagccgcctgcaagcgctatgagctgatccagagcggcgaccgcatcgccgtatgcatttccggcggcaaggactccatgctcctggccaagctgatgcagatgctccggcgcatcagcgacgtgccttttgagctgcacttcctggtgatggatccgggctacgctcctgccaaccgccagcgcattcaagacaacgccgccctgctgggaattcccattgagatcctggaaagcaatatttttgcggtatctgagcggatggatgaacgcaaaccctgctacctgtgcgcaaaaatgcgccgtggctggctctatcatcacgctcaggccatgggctgcaataaaatcgctctgggccaccacttctccgacgtgatcgaaaccaccctgatgggcatgctctacggcggccagattcaggccatgcgccccaaactccacagcaaccatctccccggaatggagttgatccgcccgctgtattgcgtccacgaagaagatatcatttcctggaagcgttacaaccatctggaattcctgcaatgtgcctgctcctttacagaacactgcgcctccggcgaaagcgactccaagcgcgccgagatgaaacagctgatccgaacactgaaggcaggctgtccccagctggaaaagaacattttcaatgccatccacgatgtaaatgtggataccctggtgggcttttcctaccacgggacggaaaaaaatttcctctccatgttcgcagaggaagctgtgcgccaggaacaagagcgcgcacagcccgttgcttttctttgattttgcaccaaaacgcgccgccggaaaacagaccggcggcgcgttttcctgtgcgcagcagttcagcgattccgttcggcagactttacgcaacgtccccttttaatgggtgaaagtcctctcattcaaatattcttttgcagaaataatttattgtaattcaataaatttatattgactatcagcattcaccgtgatatagtagagcc

SEQ ID NO: 4109 - DNA, 6481 bp, Unknown
  16S sequences of unknown bacteria
tttttcgtgtgacagatagaaaatgagagggaaaaagtaaaatgaagaaaaagggaagcatccatggatgcacaatcgcatttcataccgttcggccgctgtatcgaaaaacgggcggcacagatgcgtgcgctgatcccgtttttccggcagtacacgtgttgacacggttggaagagaggagcctgatacagccgcctgaaaaattgtgaatcaattcacaatttatagcttatatattatatctttgtgcagaaatgtcaatatctaaaatacaatttctattttttggataaaaataaaagacaaaattccagaagattcgccatatctacaaaaagcggagagcagggaaaacagggggcatgcccctgcccgctcagaagcggaagtcccgcgcaccctgttcaatttcgttcagatattggagcactcgatcatgcaccagcttgcgggggatgtttcctgtttcccgcgcgatgaggcgttcgccgatctcccgggtttccggggaggcatagtccaccaggtattctttcagcgtcattagagcgttgggatggcaacaattctggatttcaccgttcttacacagagacataaagcggtcgccggtgcggccggcacggtagcaggcggtgcagaaggatggaatgtaatccatctccatcagccagcgtaccacttcgtcgaggctgcgctgatccgatacgtcaaattgagcggtgtcctggggacgcaccggttcctgatagccgcccacgctggtgcgggagccgccggagatctgggagatgcccagatgcagcacccgctcgcgggatttctgactctcgcgggtggagacaatcatgccggtatatggcacggcaatccggatacaggccaccagtttggcaaaaatatcgtcgttaatggcattggaaaacgtaccgggatcgatatcatcggcggggcagatccggggaacgctgatggtgtgagggccgacgccgtggacagcttccagatgctcagcgtgcattaaaagcccgcagaattcatagcggtactgctccaggccgaacagcacacccagtcccacgtcatcaataccaccttgcatggcgcggtccatggcttcggtatggtaggcgtaatcgtgcttggggccggtgggatggagggcttcatagttttctttgttgtaggtttcctgaaacaggatataggtaccaatgccagcgtcgcggagtttggtgtaattttccacggtggtggcggcaatgtttacattaacgcggcggatggcgccgtttttatgtttgatggagtagatggtgcggatgcattcgagaatgtaatctatgggattgtgggtcggatcctcgccggcttcaatggccaggcgtttgtgacccatgtcctgcagagcaatgacttcccggcgcacctcttcctgggtcagctttttgcggggaatatgtttattttgcccatgataggggcagtacacacagccgttgatgcagtaattggagagatacagcggcgcgaaaaggacgatgcggttgccgtaaaagtcctttttgatctgttcggccagcgcaaagattttctcgttttcctcctccagttcgcaggccagcagcacggaagcttcccgatgactcaggccgcggcagcttttggctttttcaaggatattgtcgatcagcgttttgttttctttgtttttttcagcccaatccagggattggcggatctcctcgtcgctgatgaattcttcagcgcggagggatttcggatcgtacataacacataaactccttttctttcgttttctttcagtccggagaatgcacactgcagggcgggggttatccgctctgcgcagggacagcgccggcagaggtgcgcggtgtgccgagcaaagggctgtcgcctcgttctactgcccattcatagtcgatggaggagagccggtgctgcaggcaggaccggcattgcgccgattcgtcgccagtgcagattttgttgtcgtaaagcatgtattttttgcggacggaaaggggagacaggttcggcatcaccacgttggcgccggctaagatgccgcgttcccgcccatctgcggcggcggtgcccagggcggtggtggcgggcagcagcacctgagggagcatcagacgcacgcaggaaagcagcagcagcgtttgctccgtgctcccggcggcctcctgcgcgaaaggggtatccttgtggggcagaaacgggccgatgcccaccatatgaggctggagctgctgcagaaagatcagatcttcagccaaagtttctgcagtttgccccggcgcgccaaccataaagccggcacctacctggaagccgatttctttcagtgtccagaggcactccttgcggcgtgccagagacagtgcggcagggtgcaggcggtggtagtgggcttcattcgccgtttcatggcgcagcagataacggtccgcgccagcatcgaaaaaggattgatagacgccccggttgcgttcgcccacggagagggtaagtgcacagtcgctccagcgttttttgattgtttccactgttcggcagagcagatcgtcggaaaagccggcgtcctcgccgccttggagcacgaaagtgcgaaagcccagatcatacccttcggcgcagcaggcgaaaatatcttccggtgtgagccggtagcgctgcgcttttgcattgctgcggcggatgccgcagtaataacagtcattcctgcagtaattggtaaattcgatcaggccgcggacgtagatctttttgccgaaccgggcaaccgcttcggcctgagcagcctgggccagatgtttggcctcctgtgcgccggcaccgcgcagcaatgcggcccactgcgcttgatccagccaatgagtgcagcaaagctgttggatcagtgtatcaatgcacatatcgttctcctgtttttgcgtgatcggttggttctcagtataccgcagaacccggcgatttccgttgcctatgcaacgaaaagagaaaaggcgccgcacaaatcctgtgcgcgcgccgcaattggttcaggattctctggcatggtgcagaagaaaacggtttttgtggaacgaaagaatgccgtcccgctgcatacgggacaattcccgggacagggcagtacgctccacgcctaaataatccgccatcgtgctccgatccatattcagcgtgatctgcagggatttctgctgttgaacctgctgggaaaaaaaggtgatcagtttttcgcggatggattttttggacaacacctggatgcggtcgttgaagcgcaggctgcgctcggacaccgcgcgaagcagattgacgccgaagcgggcgcacaggggatcggtaaaaaaggcgccgtcgcgcagcggcgcgcagtgaaaccagagcacggcggtgtttgctgtggccacagcagtgatgggggactccgttatgccggcgcaggccatagcttctgcaaaaagagagccgggcgacacatcggccataacgatatggttgccgtccacatcgtccataaaaacctgtattgcaccggccagcagcaggccgaaaccgctgatgggatcaccggcggaaatgaggtggcgtccccgctggtaatgccgctcgaaagcgcacagcagcgtgcacagccgctcgatttccgatggcgtcatatcggcgaagagaaccgaattgtgtaatatgccttcttttgattgcggcataagtgattccgcctttcctcctgttttttccagtatagccgaaacccgctttcccgtcaatttgacaaattataagaaacactcatggaatcagcagcgggattctttgcaagtatgcataaaatagaaatctaaaattgtacaagctgtaaatatatagtgtttataaacaaaagattgtgaaataataaacaacttgcgtgacgaactgtacaaaaaaacgaaaaataaaaaaataattttgtcactgcgcgtatggacgtgtcaaagggatgcttttataataatagaagtattttgttcttttttatgggaggaaaagatcaaaaggaaacaggaggttgtaaaatggcagaaaaaaagtgcaccgttccttttcagggaacggcagagcaggaagctgagctgatgcaggtcatttctgaactgaaggaagagaaggggtccctgatgcccatcatgcagcgggcgcaggatatttatggttatcttcccatcgaagtgcagacgatgatctccgatgccaccggtcatccgctggaggaaatttacggaatttccacgttctattccatgtttaacctgaaccccaagggtaagtacaaggtgtcggtttgcttgggcactgcgtgctatgtcaagggctccggagatatctatgagcgcctcaagaaagaattggacattgacggcggcgaatgcaccgccgacggcaagttttcgctggacgcctgccgctgcgtgggcgcctgcggcctggctccggtgctgatgatcaacgacgaggtgttcggccgcctgacggcggacgaggtgcctgagattctcaagaagttcaactaaagccatgatgcctgaaattgcgctgaacattctggatatggcggagaattctgtgcgcgccggggcgaaggtcgttaccatcaccgtggagatcgatgaggcggcggatacactgggcgtgaccattgccgacgacggctgcgggatgagcgaagaacagaccgcccatgtgaccgatccctttttcactacccgcacgacccggacggtgggattgggcgtgccttttttcaaacaggctgctgagctgagcggcgggagtttttctatcgtttcccgcctcggtgagggaactgcggtgcatgccgtgttcggcctgcggagcatcgaccggatgccgctgggcgacgtgagcggcgtgattcacgacctggtgacctttcacccggaaatggatgtttgctacacctatcggttcaacggaagggcattcaccatggacacgcgccagttccgcgaggtgctgggcggcgtgcgcttggacacgccggaggtttcggattatatcgctgcatatctgcgtgagaatcagcaggaaaccgacggcggcgctgtgatttaagagattttaggagggtttgcaatatgaaatcgttggaagaactcaaagcgatccgtgaacggatgcagggagagatcggcgtgcgcaaagcggacgctaatgagacccgtgtggttgtcggtatggccacctgcggcattgccagcggcgcccggccggtactcaaccgcctggcggagctggtgcgggaaaagggactgaatgatgtaattgtcacacaggccggctgcatcggcctgtgccaatatgagccgattgtggaagtgtttgcgcccggcaaagagaaggtcacctacatcaagatgacgccggagaaagcggaagaagtggtagaacagcatctgatgaggggcttgatcctggccaagtacaccctgcagaatgtgaatctgtaagcgggggggggaaagaagagatgtatcgtgcacatgtattggtctgcggcggcacgggctgtacatccggcggctgcgagaaagtaattgaagcgctgacacaggagatccaggcggcagggctggatcaggaagtctgcgtggtgaaaaccggctgccatggcctgtgcgctcttggcccggtgatgatcgtctaccctgacgatatcctctatgctatggtcaagccggaggacgcccatgagatcgtgcaggaacacctgctcaaaggccgtccggtgacgcgcctgatctatgatgaatccgttactacggaaggcgtcaaaaatctgaacgacaccaatttttataaaaagcaggttcgcgtggccctgcgcaactgcggcgtcatcaacccagagaagattgacgagtacatcgctcgcgaaggctatatggctttgggcaaggtgctgaccgaaatgactcctgacgaggtcatccaggtgattctggactccggcctgcgcggccgcggcggcgcaggattccctacgggtctcaaatggaagtttgcttccggcaaccgcggcaatgtgcagaaatttgtctgctgcaacgccgatgagggcgaccccggcgcatttatggaccgcagcgtgctggaaggagatcctcatgtggtgctggaggccatggccattgccggttatgccatcggtgcaaaccagggctatatctatgtccgcgccgagtatccgattgctgtggagcgtctgcgtatcgccatcggtcaggcccgggaatacggcctgctgggcaaaaatattttcaataccgggttcgattttgacattgacatccgtttgggtgccggcgcattcgtgtgcggcgaagaaacggcgctgatgacgtctatcgagggcaaacgcggcgagccgcggccc

SEQ ID NO: 4110 - DNA, 9697 bp, Unknown
  16S sequences of unknown bacteria
ggccgcagatgcggatagaccactttccggctatgaaaatgacggaaatatggagctgtatgatgtttacacggcgaatgatgaacaaattacatttttgtatgtatacggaactgatggtggtgaaagtaaagtcggtcgtctcgttgaactggtaaaagaaaacggtgtgtggaaatttaactatatagaacacagcagtatatcagaggggaaaatcaatttttccagttagttaacaaggctttttaaaatattgactgtatataataataaaagggtcgacacgaaccggcttatgcgattattacaaaaccttaaactgcaacggagggttaaaatgaaaaaattatttaaactcataacaacactgtcccttgcttttgtcattaccggctgcgtatcttccggcggtgataaacatgtttgccctgtaagcacgagagatatattggactgctctcagtatgttgacggcgtgtgcatagcctccgaagaggtcttgtacaagtttgaatgggaaaccgacgaggaagacgactatgaagatcttccggatattccggctcctcaggttacttgcaattatattataactttacaagacgacttgggtaagatatataaattctacatacctaagaaaaacgaccgatatatgtttatcaccgagttctatcgttctaattatgtgggcgaaagtttaagaatattttattacggcaattatgatgaaaataatttgtattccgccaaggttaacggtcttgcaagtacgacgattgataatgaaatatatcaagaaaccattgataatcttaaccatgaaactcttgaaaagtacgattcttgtacagacattacaatttgttgcccggaaaaggcgattttaacggtagccgattatttgggtataaaagatttggagagagttgtaaccaaaaacgattatgtatattacaaaaaagataatatgggaatttattgcaataatatatccatcacaaacaaagatacgatagagtattatattgtcgtttatagtgccgaatccgggtacgaagattatatggttaatatggaaacaggagaagccaaaacataccaacaatggctctttggataacattaagtaaacaccgctattttaggcaactaaaaggaggcatttatgaaaaaaataaatcgaattatttccgactttgttattttaactttatctgttttgattttatccggttgcgctcaatcaacgacgcaacccggcggtgagaatataaatgcctcattttccgagaatatagatgccgacaaatacacttccgaatattttcggaaaaattaccggcactatgacattatacatgacgataatctcaaaaaattattgacaactcccctatatcaaaatcttgttgatatttggaataaaggtgaatttaaagataagacggaatataccgtagaacggcatttttgtccgccgacaggtgctgttttaccggaaaatattgacaataccgtcattgtatatgtactttctcctgatggaaacgacctcgttgtgtacactgagttagactttcaagatcttggcaagtggattacatcaagtgccgtttactttaatgacagcggtattactatcgaccatactattttttatccaaaagccaccgataaaccgttggaaaaagaactgactgataaatttgaagccataaaaagaatgtaaaacagcaacatgtaatgtgaatgatattatatttccttaatcaaaatccgagaatgtttactcaccctcgactttttgtttattaaattttagtcattgggtacaagataacattttatttagacggtagcatagaaaagactggttacgccccaaatggggataccacactgttttaattgtttaaatacaagcttatacttaaccatttccaaaaggagaatattatgaaaaagaacaaaaaacttttatttatagcccttgccgtaacccttatgctttccgcctgtgttaagacggagcaagacagcagttccggtgatagtatttcaagccaaaccggcgacatatcgtcaagccaaatagacgaaatatcatcttctcaatcggaaagcggcacttcaagcagtggcgcatcttctcaaaccgagtatgcccctgcgatttccgaaacctatgaaaaatacaacgacctttcctttatgccgccggaggcgaaaaaggtttatgaggaaaatgagaatttacttgggcacatgctcgcatcacccacagaggttgtattttccggcggatatgagtggttattggatgccaatggcgaacatgtacattatcagccggaaggttatatgggcagatacatagttgtagatgtcaagtatgaagatttcaaagaacagctttccgaattttgtaccgaaagaaaaatagctcgtgttctcagggggttcaggaattacaatggatatttggcggccgaagatgcggacagaccactttccggctgtgaaaatgacggaaatatggagctgtatgatgtttacacggcaaatgatgaacaaattacatttttgtatgtattcggaacctgtgacgagagtaaagtcggtcatcttattgaactggtaaaagaaaacggtgtgtggaaatttaactatatggaacaaagcagtataacagagggaaaactcgatcccctcggttagcaaacaaggctttttaccccgttgaatgtatataatataaaagggtcggcacagaaattgtgctgacccttaaaatattatttaattattattttgatgatgacgctctgtaacggtcaaagttatatgaagtgaaccttgaaaatgcctctttcaacggtaaaattctgccatttgttgaatttgcatccgggttatacgggtcggcgacaataaaatcatctattttgctgccggtgccgttataaccgattacggttacccaatgttctttatacggtgttgtataagcgtgcaacgccacagggtgtcctgcgtcaatttccgatttaattccgcttacagaaaaactgattttatccgtaaatttagcggtcggtgccaaccactgatagccgttcgaggcccaataattattgtaaaagtatgatacattattatttgccgaatatccgtaatattttgctatcattactccgcaacaaagggcgcaaccaattttttggacagttacatcatttccaatgtaccgctggttaaccgtctccttcaatgataaagtctttgatgtacattcttgagcaagccaaagctgatttacacctcctgtcggcgcaagccatcttacattgtatccgcctgcctttttcgcctcgtctgtcaccgtaagatacaagttttcgtgaacaagttttattttgcaataaccttgggttgcgttttctatggcaacaagttggtctttaaggtctgtggcgcttgtagccaaagtgtacacatccgcatcgttctttttgccggtggaatcgttaattctcagcctgtcaaggacaaaaccctcgtttgctcggcttttaagtattgtaccgctgaggccgtaggcggaatattcaacgcttttccaaatttggcagttatccgaactgttaagtttaaatgtggtaacggttgtgttgttttttaccgcaccgtctgtgtaaatgttaagatattcgcctgacgaataggcctgaaagcgataataagtgttgttttttgtaattgacataattaaatctcctttctgtcaataatgttatttgtttattttgcttgttttgtaatctgcagcttacggtttatattatagcgtaggccggggtaaatttcctcccgactttttcccggaaaattcccgggaaattcccggaaaattcccgcaaaattcccgcaaaattcccactttatattgatttgcgtatataaactgttatataatattctaaatgataaaaatgaaaggcggattttgtttgaaaaatcttataaaaaatgtcacggttttgacaatggatgaaaacaacaccgttattgaaaagggcgctgttctttttgaggatgataaaattttacaggtgggggaaaatataccggaaagctatgccgatacggtaattgacggcaaaaacggcattttaatgccgggaatgataaattgccacagccatatttctatgatacctttcagaagtatgggtgacgattgccgggacagactgcgccgttttctgtttcccctggaaaatgacgccatgaccccggagcttgtgtacgttcgggcaagatatgccgtgtgcgaactgcttttaagcggcgttaccacaataaccgatatgtactactttgaggatatggtggcaaaagcctgccgggaaacaggcataagggcatttttaggcgaaacggttataaatcagcctgtgtgcgacagcaaggattttcggcagacaatggaaaacaccgaaaattttctgaaaaaatatcaaaatcacccattggttcaccctatggttgcccctcacgccacaaacacaaacacggcggaacagcttgttcgggcaaaaaaattggcggataagtacggagcaaaatacactttgcatgtaagcgaaatggactatgaaatggcatatttcaaagatacatacaacaaaaccccggtggaatttttgcgggatttaggcgttatggacgaaaacaccatagctgcccactgcatacatctgaccgatgaggatattgatttgtttgcaaaaacaggggcaaaaattgcccactgtgtggtggcaaacacaaagtccggcaaaggggttgcccccatatacagcgctttaaacaaaggcgtaaccgtgggcataggcaccgacggcccttcctccggcaacacattggatttatttacccaaatgcgtatgatccctcttgcacagaaaacaaaatatcacaaccgcagtattatgagggcggctgaggttgtaaatatggcgacaatagggggcgcaaaggttttgggaattgaaaaagaggtgggaacccttgaacccggcaaaaaggcagatatggttttaatcgaaaccgacagcgtcaatatgttccctttatacaatcctttttctgccttggtttattccgcaagggcggaaaatgtatcttccgtttgggtaaacggtatgcagcttgtaagggataaacagcttgtaaatatggatttatctgccgaaaaggccgcacttctggcgcagatgggcgattttatcgcccatagtaaaaactacaaagagtacatttgatttaaacggctgtttgtaattttttacaaaacgacagttgtgtacttgacaaatacaatttttgggtgtaacattcagctatactaattttacggaggaagttactatgatgacagctactatgcgaatgtacatgtgcaaatgcgttcctgtggcttgtcgtgcaagtattttttctgtataaaaatatctggagaaatatttaatcgaaacttggcgggaacggcattgtgctgtttccgccttttgattatacggaggttttattatgagtaatgtaagagaaagaattgtaagctatgttgaccggcacaaggcagaatgggaagaagttgcccttgccatacacgcaaagccggaggtaagcaactacgagttttttgcatcggaaacactgtcaaacaaacttaaagaaaacggttttgaagttgaacttcctgccgcaggtcaccgcaccgggtttgccgcaagctataaatcccaaaagccgggcccggttatttgtttccttgcggaatacgatgccttggcaggccttggtcacggctgcggacacaatcttttcggcgcatcaagctgtcttgcaggcagtgctttaaaaagcgttatagacgaattgggcggcgaggtaagagtgtacggtacacctggtgaagaaggtggcgaaaacggcagtgcaaaaggctcctttgttcgtgagggctattttaaggatgttgactttgccctttgtgttcacccgggcacaggccctgactgtgatttgacaggtaaaaccttgggctgcgtgcctattgatgttgaattctggggcgtttcatctcatgctgcggctcagccggaaaaaggcattaacgctcttgacgctcttattatggtttataacgcatcaaatgctctccgtcagcagttgactgatgatgttcgcatccacggcattatcacaaacggcggtaaagcacctaactctatcccggattatgccgccgcaaagttctatctccgtgccgcatctaaggacacacttgacgaagtttacgaaaaatttgaaaatatcgtaaagggtgccgctttgcagacaggtgcaaagggcagaatggctccatatcagaacagagttgaaaaccaagttcctacaccgagctttgacgcagtgtttgaaaagaaccttaatctttttggcagagaggttaaaaatcatgatatcgtaagaagcatgggttcctccgacgtaggtaacgtaatgcaggttgttcctacaattcagccgatgatcggtatttcacctgtgccgattaaaggacacagcgaagatatggttcgggcttcctgttcaagaatgggtcttgacgaaatcgcccttgccgcaaaggttctttgctacacagccgccgatgttatcgaagaccctgcactggctcggaagattaaagaggatcacgcttaccaggtggctcaccagaaagaaaattgatttaaaataacgaaataaaattaaacgaggtcagctgacctcgtttttttatctgtgttattctgctttcggcggtatcattgtaagtgaaattctctttttgcccgggtcaaccgacagcacccaaacagttacaacatcacccacttttacaatttctcccgggtgttttataaattttttgcttatttggcttatgtgtacaagtccgtcttggtgtacgcctatgtccacaaatgcgccgaaatctataacatttcgcacggtgcctttaagctccattccctctttaaggtcggaaatatccaaaatatcgcttctcaaaagggggcttggcaaatcgtcacgcatatctctgcccgggcggataagctcacttataatatctttaagggtaggcaggccgactccaagctgccgagccaatttttcaaggccggctttttcggcttttatctgtaattcttttattttttccgtgcctatgtcgctgtctgtaaagccggttaatgacaaaagctcttttgcggctttgtagctttccgggtgaacagaagatgaatccagtttttccgccccaccgggtatgcgcaaaaatccggcggacatccgataggccttaggccccagcttagcaacttttaaaagttggtttctcttttcaaattcgccgtttgcctcacggtattccacaatgtttttggcgattgtcttattaaggccggaaacacgctccaaaaggggtgcgctggcggtgttaaggtcaacgcctacggtgtttacacagtcttcaacaacgccgtcaagcctttcttccagcttttttgccggcatatcgtgctgatattgcccaacgcctattgatttcgggtcaatttttacaagttccgccaatgggtcctgcaaacggcgtgctattgaaactgcacttcttatggttacatcgtactgtgggaactctgcctgtgcaagtttagacgctgagtaaaccgacgcacctgcctcgcttacaacccgatagctcaccttgcggtcaatctgttttaataagtccgcaacaaacatttcagtctcttttgtggcggtgccgttgcctatggaaattatatcaacggcgtatttgtttataaggcttttcagctttttggcggcaagttctttgtcgtggttgggcagggtcatgtagacaacgcctgtgtccaaaactttgcccgtccggtcaactaccgccattttacagcctgtgcggtagcccgggtcaagagccatacacaccttgccctttaccgggggaacaagcaaaagccggcggagattatccccaaacaaatttattgcgccgtcatttgcggattctgtcaggacggatctgatttcggtttcaaggcttgggtgaataagccttgtgtagctgtcggctatggtctcttttaaaagctccgtggccgggctgctgtttttgatatatatattttctatttctcttattgcaatatcgctgtcaacagatatggaaacctttaaaaatccctctttttcgcctctgttaagggcaagcaccctgtggccgggaattttatttaccggttgtgcaaaatcgtaatattgggtgtaaacgctttctttttcccggtcgcctttgctttgcacaatgccggtgcggttgtacagggattttaacaccgtgcgcacctttgcgtcatcggaaatatcctcggcgattatatcgcaggcgccttttaccgcatcttcggcggtttcaacccctttttcaccgtttacatactgctcggcaatggtgtaaatatccgtctttttgtcctgagacaaaataatttttgccaacggttcaagacccttttcccttgcaaccgaggctcttgtttttcttttcgggcggtatgggcggtacaaatcctcaaccgccgccaaagtggttgctttttcaatctgccggcaaagctcgtcggtcattttatcctgtgccaaaatcgagttgtaaacgtctgtctttttctcgtcaaggcctcttatgtattcccgcctttcgcttatactgcgtatttgggcgtcgtccagctcccctgttttttcttttctgtatctggcgataaaaggtattgtcgctccttcgtccaaaagggcaagggtgttttccgcctgccagggctttattttaaattccgccccgagaattgaaactaaatcacttttaaaaatatgttcttctgccatttttctctcctaatattgatagtctaaattttatcatattttaccgtgaatttccaccgaaacaggacaatagatacagttaaaacattaaaatttggttaataaatcaatatgaaacggaagagaaaaagaatataatataattataccgaaaaggagacagaaatttatgattaaaagacctttgattattgactgcgacccgggtacggacgatgcccagtgtataatgatgcttaatgcttgcggactttttgacataaggggcataaccccggtacacggcaatgtaccacttgaatttacatcgaaaaacgctttgtttttaagcaaatactacgggataaatcggcctgtttacaaaggagccgaagaacggcttatagtgcgccttccccgtgcggaatatgtacacggcagcaacggcttaggcggttttgagtacgatttaaacggcttgaactttgccgggggcaaagcctgggattttttgtatgaggaggccgtaaaacaaaaaggacaacttgaacttgtggccataggcccccttacaaacatcgcaataacaattatgaaacacccggattttccaaaacttataaagaaatttgtaatcatgggcggcgcaagaaccgccgcctgtcataataatttg

SEQ ID NO: 4111 - DNA, 4351 bp, Unknown
  16S sequences of unknown bacteria
acgcttaacgtcaagacccgcgatcttgcctgcgtccttggtagcctgacgctgagagtcggtgaagtaagccgggacggtgatgacagcctcagtgaccggagttccgagataagcctcggcgtcgctcttcagcttctgaaggatcatcgcggagatctcctgaggagtgtaggacttgccgtcgatgcttaccttgtaatcggagcccatgtgtctcttgatagaggagatggtgcggtccgggttggtgatggcctgacgcttagcgacctgaccgaccattctctcgccggtcttcgagaaagcgacgaccgaaggagtcgtgcgcgcgccttcggggttcggaatgacgacgggctcgccgccctcataaactgcaacgcaggagttagtagtaccaagatctatgccaatgatttttcccataatatatatatcctccgaaatgatttcgtgaaattaaatttatattcagcggtttcccgcggaaatagtatgttttttacgctccggagagcgatgtgtcgaagttttgttccggtttcggaaatcagacctgtctgatttccgaaatttgcggcggaagccgcaaaaggaataaaacttcctgactgaccgccctgcggtcagttcgcaacctttaccatcgcgtgtctgatgatcttatcgcctttcctgtatcccttctggaacacatcgacgatctcatcctcgccgtgctcgtcgtcctcgacgtgcatgacggcgttgtgcagctgcgggtcaaacttgtcgcccgccgcgccgaattcctcgaccccgagcttcgagagcatatcctttgtgctcttgaagatcagtccgagcccctccgcgagcttctcggtctcattgtactgagcggctctctcgaggttgtcgatcaccggaagcacttccttcagcgcgtccgagtaggcgtcggcgtagatgccttcgcgctccttctggctgcgctttctgaagttgtcgtactcggcgcagaccctcatgtacttgtctgtcgtctcattcaggtccttttccgccttgtcgagctttcctctgatttcggtgttctcgcgcgtgagcttcttgttttcttcctttaactgctttgtctgcttcttgtcgcatcccttgccctcgtcgatttcgtccatcactgattcggtgtccttgtcgattccggactcggtggtttcttctttagtatcttcttcaaccggcgctgtgcccggctgtgtgtccttttcattttccggcatttccgtctttttcctccttcttatcctcgatgaggtctccgcgttcgatcatcctgccgataccggctgacatatgatcgaccatcgcgaccgccttcgggtaattcatccgtctcggaccgatgacgcctatcgcgccgacgaccttgtcgtgcgacttgatcgtgcgccagatgagggacgaacccttcatcacttccaccgggctctccgagccgatgcacacggtggtcttgtccgccttctgcgaggtcatcatcccgagcagctcctccttgtcgtcgaagagctcgagcatatccctcaccgaggagatatccgaatactccgggtaatcgagcaggttgttgactccgtcgaacatgagctctccgtcgtccggctcgctgaccgtctcatagatcgccttgattataggatcgatgagccgcccgttggcgccgagcctcgactgcatcccgagtatcatcggaagcgttatgctgtccatctcgtgacccgcgaccgtgtcgttgagcacggcggcgagcgcctcgaggtcgtccctcgtgacgtccgacgtgagcctcagctgacgcgtcctgacgacgccgctgtcggtcagcatcacgagcacgaaatttctcggtccgaggtacatgacgtcgaaccgcgctacggttggctttgtctgggttctcctcagcgcgagcccggtgtagttcgtcagcatactcatgagctttgtcgccctgtcgagtatcctgtcgacctccgccgcttttgaccttgtgagccgttcgagctgcgagagctcttcgctcgtcagtctgtactgctgcataagctcgtcgacgtagaacctgtatccgagcccggtcggtatccgacctgccgacgtgtgcggctgttcgagataccccatatcctcaagctccgccatctcgttgcggatggtggcggatgagaaggcgatgtgctcgtatctcgtcaggtatttcgacccgaccggctcaccgagatttatgtgcgtctcgacgatagccttgaggatcgacttcttgcggtcggaaagagtccttgccgcgaccgccccggcgtccgtcttcttttctcctggctgcaaccttctcacctcccaagtgtcatgagggctgtaaccgttcaattcattgttatttcgtgataagccctttagcactctcgtgcctcaagtgctaatcactgtatatagtatacctcgtcaagccattgaattcaacagtattttattaatattttgtaaactaacagtaaacatcagaccgtcggtacggcagctgttagcactctgagccgccgcccgctttttcgtgcggtatttttcctgtcaatgtaatatacggtcgttccggtccgaccgccgcccaaaagtgtgagttttagctgtttttcacagttttccgtcgatatagccaaaatgagcatagcaaattctacccgcaaagggttgaaaaatgtttcgcggaggtgtataatatatgtagattaaagcacagcgtccgcgtcccatattacttatctgaaaggatacataacaatgaaaaagcaaagactccccgcgctgctgttagcactcctcctgacctccgtctcctgcggcgccgccccgtccggcggcacgccctcggacgagaccacgctcccgcccgaaacaacagcggagcccgagacctccgccgcgaaggaaccctccggcgtccccgagggcaccgaccttgaaggcgagaccatcaacatatggtacacgacaaaagcaacctcggtcgccgagaccttcgtcgacatagccggagagatgaccggcgacgtcatgagcgacacgatctacaacctcaacaaaggtgtggaggacaaactcaactgtacgctgaacttctacaactccgagtgcccgacctccgacaccggcaccgatgtacgcaaactcataatgtccgacgacacgacctacgacgtcttccacgccgtccagtggaacgccgcgaagctcgccgccgacggaatgtacctgaacgtctggggcaacaaatacctctcgctcgacaaaccgtggtggaacgaaagctacatggaagaaatgacgatcggcgaaggctcggtctacgccctcgtcggcgactacacggtagaccgcacaagatgcctcgcgaacgtctactacaacaagaacatgtacgacgacttctaccagaacgccgaaggtctctatgaggacgtaatggcaggcaaatggacatgggaccgcctgagagaaatctccgcgaccgtctggaacgacctcgatagtgacggcgtaccgtcctgggacgaccgcctcggcttcggaatcaacgactacaacaacatagacgccctcttctacggcaccggcacaagagttacgacccgcgacaaaaacaacctccccgtcctctcactcaacaccgaacgcaccgcgaacgtagtcaaaaaattgtaccaattctgcttcgacacccccggcggcttcatgtacggccccgaatacaccgacgacgtcaaaaaccgccagaaattcgaagacggcgaatcaatgttcctcttcggcttcttctacaccgccgaagcaatgcgcgaaatgaccgacgactacggcatcctcccctaccccaaattcgacgaatcccaacaaaactacgtcagcgtagtccacgacataatgcgcataatggtcctccccgcgaactgccagaaaaccgacgccgtctgcgccgtcctcgaacaactctcccacgacggctactacgacctcctcccggcatactacgacgtattaatgaaaaacaaatacgcccgcgactccctctccgccgaaatggtcgacataatcagagaaggctgcgtcaccgacatagcctacgtctacggcgaccccttcaaccagatgggctacctccagcgcaccttcatccaacagaaaaaagacgacttcgcctccgaatacgcgaaaaaggaaaccgccactataacggctatcgacaaattcgtcgggcaatttgagagtatcaaataaaccttagctttgcggggggaacctttttcgg

SEQ ID NO: 4112 - DNA, 3595 bp, Unknown
  16S sequences of unknown bacteria
cgtcctttgtcttattgaaaagcgcataaataacaggaaggatgccgccttttaaacttaaacgtttgcggcgatttcaaagagctgacgcgagaaaaagcacccgcaagattgcggatgcttttcaaggaagaataaatcagatagaagtgtaaacaaaataggggggatttcgggagcaattgcctccgacttccgtaggacaaaattttgaacttatagaggcgtataaggcttttttgttcggatcgccgaagcgcctttcgatatgcgttcggagcggataactccttaaaagatcatccgaatccttttgaatcctttgcaacgcggaaaaagcggaaattgctcttttgagaaaaaaggttatacgttgagtcttttatattttgagaaaagaaaaaaaggcggcgctatgaatcgtcgtaaagattttttttgtgcgatttatcgaaaaagagtttctaagttccgtttcgtcgcgggaaacgccgttcgcatcctaagcgggaggatttgcccgcgcgaggggattaaatcgaccgggacagaaagacaaagcgggcgcttagcattttcgcaaagttttcgggcggaaaaggcaagcggatttttaatcgtttaaaagcctttcgcctgagatctgacaactgccgcgaagggcgagtgcccgccgtccgcgggagaaaagatcaggtggtctaagccgtagccgctttcgcggcttcataggctttgaggacggcgtcctttataaattcgcgcgtctgggtattgaggggatgcacgatgtccttatattgtccgttcggcgctttgcgccccggcatcgcgatgaagagggattcctctccctctaaaatctttatatcgtgaatcacaaaacattcatcgatggtcagggaagcgactgctttgagctttcctccggaattgattagcctgattctgatatccgaaatattcatattaaatgcccccattatcgatatttttaattattttatcatatattgaggtggaattcaagtctttttcaataaatttttttgcgccagccataataatatgcaatagttgtcataaaaattctttatacttcatatagatacggtatgcaattgagtaatttcgacaacattcgtaagttttactttatcggaatcggcggaatcagcatgagcgctctggcgaaatatctcctcgcctgcggctgtgaggtttcgggcagcgatatggcgtcgggggagcagacggaagagcttatttcctccggcgtaaaagttcgttttagtatcgacgcggacaatgcggatttaaaaagcgccgaggcggtgatatataccagcgccattcccgaaaatcacgcggaattaaaggcggcgcgggaaagcggaaaacttattttgaagcgcgcggagcttctcaaactcgtctgcggcgcgttttctcatgtgaccgccgttgcgggaagccacgggaaaaccacttgcaccgcgatgtgcgcgcatattctcaaagaaacgaacgtgctttttgccgctcatatcggcggcgaggacagcgaattcggaaatttttatatgagcggtcacgatttcttcgtcacggaagcgtgcgagtataaaaaaaatttattggaaatagaggcggacaatgccgtccttttgaatatagacagagatcatatggaatgctatcgggacatggacgatctgacggatactttccgcgcctattgcgggaaggcaaagacggcgtttgtctgcgcggacgacgagcgctgccgcgcctggaccgaattttccacgttcggaatagaaaattcctccgcggattaccgcgctctcgatatccgtcaatcgggagaaaagtattcctttacggtatcggaatacggaaagacgctctgccgcgtacgattgaacgcggcgggaagatgcaacgtatacaacgctttggcggcgtttgccgctatgcggcgatacggcttcgacgaaaaggagatctgccgcggattggaaacgttcaccgccgtaaagaggcgctttgaaagcatcggttcctatgcggcggcctcgttcatctgcgactacgcccatcacccgcgggaaatagccgccaccgtcgcgacggcggaaaaaatgtgccggggcaagttatacgtggtctttcagccgcatacctattcgcggacgaagctcttgatggaggatttcgtcaaagcgctcagacccgtcgaaaatctgatggtctataaaacctatcccgcaagggaatatttcgacgcggaggggagcgcgaaaacgctggcgcagaacgtgggaaactgtctgtatgcggagagcataagggagctgaaaacctggctgaaaaccaccttgcagccgggcgacgtcgtgctctttctcggcgcgggcgacatctattacgcggcgcagtatctcttgaaggaactgaataaatagcgtttgacacctccgaccccgcaaggcgttcgggggttgttttttacttaaacgatttgacagtacgcggaaaatatgatataatcgtatcatcgggcggaagcagtgcctttggcggcggcgcggaaaaagcagagccgaccggaaaatggcggcaggggagcggaaaaaagaaaaaaactctttgcttccgccgtttttttgcgtcaatactattgataaatgtgaaaaaaaatgttataataaacgggtataaacgggaggtgaagaccttgaaagagaataacgaaaaagaaaaaaccgaaaaggataagaaaaaggagtcggggatcatcacccgcgaaagcgtgggcgcggtaggcgccctgttttcggcgctcgcattttttattctgtgcacgcggtctttgattttcggcggaatcggcattgcggtcaattccttccttctcggattgttcggttatctcgcttacccgattctcgccgcggcgatctatctgtccgtgacttcctttatcggcaaacgctttgtccgcaacagaaaagccgccgcgatgatcgttgccgcttttgtctgcgtgattctcatcgtgcatacggcgctcacatattcctggaatctgtcgggatatatttcccgttgtttcaaagaagccgccgcaggcaatcacggcatcgacagctgtacgcccgcgggctggacaggggcgctgctcgtctatcctctcgtaaaattgacgacgagggtcggcgcgttagtgattttatccgtatttttcctgctgtttgcctatcttgccgtctatttttgggcgggaaaggtattgccgcgcagagcgggaaaaaagcaaaaggcggcgaacgttcaggccgccgctccgcagccgcagaaaatcgagccgaccgttccccccgtttctccgaatatgccctatgagcctttgggcgaaaggaacgaaagccgcgctcctgctcccgtaggcgcggacgcccgctttgtatcttccgcggcttcgggacagcccgccgcgtatcctccctatgccgatccgtatctcgccgccgcgcccgccgtaaggcagcgcccgggcgtaacgctgcccaatgccgccgcggactggcgg

SEQ ID NO: 4113 - DNA, 32759 bp, Unknown
  16S sequences of unknown bacteria
cccgtttcgtggtctgcgtgtagttccttgtaaactgacctaagggtaaatacaagaaacattgttatcacagttaaaccgcagccggatgtagaaaaaaatcgtatctctttatatgatgtagcaaaaacaaagcactggtgcaaactgtactttaagagtgacacccgagatgtatatatagaaggatatatagaaagtgtggagggttctctttttgagatgagccaagaaatacaaatctctatattgtgccatcagccatactttgttgcaatggaaacaatcataacagaaatgtcaaaaacactggatttgtttgaatttccattcgcgatagaaaaagaaggtatcgaaatcagcagaattgaagatgatctggtaaaaaccattatcaataacggagatgttgaaaccggtattatcatagaaatgttagctagtggaagtgtcgtaaatccaactatttacaatgctgatactcggggtagtttcggattaaatatcactttgcagatgggtgataaagtaacgattaacacaacgccggggaataaatcggtgattctcacaaggtatggaatagaaagaaatatcgtaaacaacatcacgaaaaatccggagtggtttaaacttttaccgggtgaaaatacctttacatatagttgccaagacggagaagaattactatcagttagatacctatgtgaaagtaagtttgagggagtgtagaacatggacttatacataacaaatccaaaattcgaactagtaggggttatagatagctacacttcacttatctggacagagcggtataacgactgcggtgactttgaaataatgataagcgccaatgataaaaatgttgatattttacagaatggatattatatcaaaagaacagatacagacagagtagggattattgaaacaaaaaccactcaaaccaatgaagaaaccggagattatatcatagtatcgggaaggatgttggaaagtatccttgataggcgtattatttggcagcaaaccactttaaatggctcaattaacgaaagcgtgcacagactactgatagaaaacgcaatttcccccggtataaaggcaagaactattcctaatctgacctttatcacgcaagaagagtttgaaggtaaagtggaaatgcaagttacgggagatagtcttttaacagtaattttggatatatgcaagatgtttggattgggatttaaagtaactttaagtacaaccaacgtcataacagcctgtttatataaaggtgctgatcgctcgtatcaacaaaatgaaaatagttacgtagaatttagtccagattttgacaatctcatatcttccaactttatgacaagcagccaaaactacagaaatgttgctttagtagccggtgaaggtgaaggattagacagaaaaacaattcctgtcggagctgcggagggtatggagcggtatgagctgtacgtagatgccagagatgtttccagtaatgaaggtgaaatcacggaacaggaatatttaacgcttcttcgagaaagaggaaaagaaaagttgctggaatacttgacagaaacatattttgaagcggatatagagccgcgattcatgtttcaatatcggaaagactatatgcttggcgatataataatactaaaaaacgaatatggaattacggcatatccgagaattatcgaagtaatcgaaagcgaagatgaaacagggtataaagtagtgccaacttttgaaagtgaggagggaaaattttgataaaatgcggattttataacagcaaaaacggagatcgtaagtataacgcggaagatatgacacagccatataaacggcttgtaagcgatggtgtatatgctatgcctgccggacaactaaaagttacagccgcaggaggtatgaaaatccaagtcagcgcaggggctgcaaaagtcggttctcgctggctggaaagtgatgcaatagaaacttttactctagatccttctgacgtagcactaaatcaaatttattccgttgtaatcagagatgataacagcgaaaatgtgagaagtggttcaatcgcactgaaaaaagggtctcttgctagcaatccaatagcaccggagatagaaagatcagaaaatattaccgaactaaaaattgcagaagtacgagtaaataaactggtagaagaagtgacggacgcggatataaaagataccagagcagatactacagtatgtggctgggtaacaggacttatagagcaggtggacacttctgatctttttacacagtgggaaagtgcatatgagcaggaacaccaaaggcaacaagaacaaataacaaacaaccaatgggaatttgacagatggtttgataatgtaaaagacacttttttaacgcaagcaactatcgtgcgaagaaaaacatcggaaataactactcaaagcagcggtgttaaagtgatagatataaatatttctgactttaaccaagatttagacgttttaagcgtttttgttaacggctttaaaataccggaaagtgagtatacatataacgctacacaaataacgctaaataaagcattagatatagggtcggtagtactggtagaagcgctaaagtccatagatggaaaagatgctgaaactactatgcaggagtatgtaaagcaagaagcgagcgcgaacgctgcgattgaaaatgctaatgctgcggcagaagaagcaagaacgactgccgcagcaaccgcaacaaacacggtaaatgcgatgaagggacagcctaacggaattgcaagcataagtgtaagcggggagctagagcaagccccgccgcaaagtgtgatgtttcttgcggcgcacccaataggcagtctgtttgaaacaacaatttccacaaaccccggcacactttatggcggcacatgggcagcgtggggaggaggtcgcgtccctgtaggggtaaataccgctgacagcgactttaatacagtagaaaaaacaggcggcaagaaaacggaaagacacgagttcaaggttggatataaaggttactttggctctaccgtgggtagtgacgataatatgatacaagcgtataaatactctacctcaagttatggcacctatgcatatgaaggcagtacacaggcaagcgtaaacgcagggattcaggcatcgacaaacactcgcgatgtagcacaagcttcgtcaacaggcgatacgagcgagacaagcattgtacagccatacattacgtgttacatatggaaaagaacaacataaggaggaaagaacatggcactggaaaaagaacttatcaacggaaaaggtgtgaaaaccacatatcatcgtatagatagtatctctatggtagacggtattgaagtaacggtaaaaagttatacagatgaaagttacaggcagcaggaaaaagaaagagaatccctgattgaaaggcagaaagaagtcaaagagcagctggaagcggaaatggcaaaaacgggagaggagtacagcaaagaaaaagtaattgcgttgacagaagaaaataacgagattggttttcctgttcctcttgatttatccatttttgtatatacctttcaatatcctctcgataaagaaacagcagtcagttatgaatctatgtatgaaaagttaaagcaagagcctatgtttgaaggcgcaaaagatgtattggaggaaggagaatagaaatgtcaaacagcaacttggtaacatatacaaatttatcaccaaacatgaacgcaccaagaaaccaaccgatttcaaaaatcaccattcaccatatggccggcaatctcactgtagagcagtgcggtgagctttttgcaagcgcaagcagggaagcaagcgcgaactacggcattgacagcaacgggaacgtggggctgtacgtagatgaagccaatcgctcttgggcaagtgcttcaccgtggaatgataatcgggcggtcacaatagaggtagcaaacgatgaaatcggcggaaactggcacgtgagtgatactgcttttaacaagctcattgacctatgtgcagatatctgccaaagaaacaattttcggctttcttatgacggtacacaaaatggcagcttaacaatgcacaagatgtttgcagcaacagcttgtcccggtccgtatcttgaaggacgctttcctgaaatcgtagagcttgtaaatgctcacttagacggtggacaagcaacacctgcaccacaaccgccagctcaaaccgcagaaatcaacgcatactatcgagtacgtacacaggcgcatggctggcttccagaggtgaaaaacaatgatgactttgctggctttcaaggctcaccgataactgatgttgcaatcagagtcgataaaggcagtgtaaagtaccgtgtacacgtactaggtgagggttggcttccatacgtgacaggatgtgacatcaacgactaccaaaacggctttgcgggtgaaggcaaagtaatagatgctatcgaaatttatttctttacacctgacgacatcagaccatgtcaaaaagcgatgtacagtgcaaatggttatgcatggcagtatgacaacgagaaaggaaacggccaagatggctatgcaggtcttttgggcgtgcctatcacagagctaagactttgcgttaaatagaggtagctatgagtgtgaatctggatattattttatacatatgtggggttatcacatccacgtcggcagcggtggctatagtcactaagctgataaataaaaagataacaaaaaccatagaggaaaactcggcaattcgcaacatccacaccgccctcgtatcacagatacgctatcagatagatacagctttaaaacgagcaaaaacggagggacacgtcagcaactattcgatgtctgcgctggaatctctctttgaagtctacaaagctatgggcggcaatggcttcgttgaaagcgaaatggaagaaatacgaaagataaatcagaacggaggaaaatgacatggattttttagaatatatcaaacccgaactactaattttagtaccggttttatatgtgattggtatggctatcaagaaaacagctttgattgctgataagctaataccgcttgcggtaggtgcggccggtatcttactatctatcatctacgtactggctaccagtgacctaggtagtccgcaggctgtagctatggcaatctttacagcattgacacaaggtgtactggtaagtggtgcaagtgtgtatgcgaaccaaattttcaaacagtttaaaaatagcgatagtaaagaagatagtacaaatacagaacaaaaataagtaaaaaattgagggtagcggtttaacagccgttaccctctttttttatgcaaaaagaaaagcggtggcaagcccgctttcttcttaatcttctaaagtactttgtaaattttctaaaattttttcgattcttttatttttcttttcttcgtctttttcctctcgaacttctttcaaatcgtcaattaaaaatcgaataaagccattaaattgtttatcggtcattcccatttctttcatatgtaccgcctttccgatatttgtaagaacttgccttcttactatctatattatactatatagtgcgctatatgtcaatagaattagcgcactaatttaaaattttttcaactttttcttgaatcgcatctaaataaaattgccgcatactgggataccctgcttttttggcggctttttcgtaaacctcaaattcttccggtttcactctgaatcgaatttcttttaatttttccaagtatttcatagtgtactctttttgtttttcatcgtaagccatagatacacccccttataaacagtatatcattttacttgatggtgcgctatagttagttttgatatattagcgcactaatgtttgtggaatatgccaattgatatatagcgctctatatgttatactataatcacagtaaagataagaacacaaaaacaaaggagatatataaaatgaaaatcgaaacattacttgaaaacctaccacaacttgaaggaagcgaaaaacaaattgcatgggcagaagatatcagaaaagaatttgtagagcaagctacagtatactacaattggattttagcaaaaggcgaagcaagagcagaaaaagttttggcaaaaggcagtgaaatcaaaagacctcgtttctactttgcagatatgcaccttgaaaatatcgttaaaactatacgaaaaaattctttgaaagttaaaatgtctgatgtagaagctatcgaagaaaatcaaaaacaagaaaatagctataacgatattttagcagagtgcagcactttagaagaagtagcagaaacagctttgaaagaactacaaaaagtagtatcttctgctgatatggctaaaatctggatagacagcagagaaagcatttctttcttcaaagctaactctgaaaatgacatgaataaataaaaaacacttttaaattacaaaaatttacagtataataaaaagaaaaggggtaaacggaaatgaaaaaatatgaggtaagatttgacggtggagaatccagaagcacatacaacggagaggttatcggtgtagactatatgctggtagaagtaccggacttagaggatgaaaatgaaaacatcgagttgtacgcagaacttccagcagatgatgagaaaaactatgatgaattaaaggctgaaatcttaagacaagcaaaagagtacggttatacaaaagaaaattttacattttggtatgattaataaaaagagcagcgacaaaaaatgctgcttttctttatgtaaaaagtacatttactttttgttttgtacgtggtactatatacgcatacaagagtgaagtacttgtatatctacatgtaaatttttattcttccctgcgtcagcaggggtgtccttatacttatactatctttctttcctgaaatgtttttagtaatagggcaaactcctcgcattagcggggctatagctgttcagctttcgggctgggcagcttctttttactaatcggaagaatattatctcttaaagctatatggtggccctcacggggagttgggcgcttcattgcgttatttaagtcaacgctattctatgccttatcctgaagtgaaagcaattttgacagatattggtacagaagagctggcccatcttgaaatggttagtaccattgtgtatcagttaacaaaagatttaacggaggaagaaattcaaaagtctggatttgacacctattttgtagaccatacaacaggtgtatatccaacagacgctaatggaatgccattctcagcgtccaccttctccgtagcaggcgatgcattaaccgacttgcatgaagatttagctgcggagcaaaaagcaagaacaacgtacgataatattttacgtttttgtgatgatagggatgtcagagatcctatccgttttttaagagaacgtgaaattgttcattatcaacgttttggcgaagcactgagaattgcaacggataatttggattccaagaacttctttgcgtttaatcctgagtttgaccgtaaaagaatgcaataacacatgaaagatggcttgtaactgtcatattatcacaatataacaacttagcaacagcagcaaaactaaaattttgattgttaagagaacattttatcagttgtaaattgctataacaacctagcaataacagcaaaacaaacattgaaaggaacgtctttcaatattcaaaattttggttattggcaagaacgttttagcattttgtagttaaaaattgctttgcaatttttttaatgctataatgagttaggtgatactatgcagattaacaggttatttgaaatagtttatattttattagaacatcaatgtatgacagcgaaagaattggccaatcgatttgaagtatctgtacgtaccatttacagagatattgatgttttatcggcagcaggaataccgatttatatgaccagagggaagggtggcggtatttctttgctgcctaattttattttaaataaaacagtgctgacagaatctgaaaaaactgagattttgtcagcactgcatgcggtacaagctgttaattcgaatgaatcgaaaaccgttatccagcgtttgtccaatttatttggagaagcccaaacagattggttggagatagatttttcttcatggggaaattatagggaagaggtaagcctatttcagactttaaaaacagctattttacacaaacgcgttgtccattttttatatcataatgcaaatggacagcagtccaaccgtattgcagaacctttaaagctgtgttttaaaggtcaaagttggtatttgtatgcgttttgtctgcataaatgtgactaccgtttttttaagctgcgaagaataaaagacttgaatatgtctgagcaggaagtacagcatttttcaccgaagcatgtttttttacaggacaacgaagtagatttaaacacagtaacagtcacattgaaactatcagctgaaatgggctatcgggtttatgatgaatttgactgtgtccggatatcagatgacggcagttttctggttacctgcaccttgccctgtgatgattggttgtattattatattgcaacatttggagagcattgcgaaattatagaaccacaggaaatccgttatcaaatgaaagataaattacagaaaatgctgaaattttatttataatatgacgctcttatgtcatgttataccgtgtatgatagtaacatctaataaaggaggtcactatcatatggaatatgaaattgtaaatttggacaaaaaaatagtagtaggtgttggagcatacacctccaatgatgacccaaatatgggacaagttattggtgacttatggacgaaattttttcaggaaggcatttgtaataccattcaaaatcgtgcaaacgagtatgcaattggcttatattccgactatacgcaacagggctatcatgtattaacaggtgttgaggtatcagaattgaacaacagtaatttggaatccagagtgattccggcaggtacatatgcaaaatttcgtatccatggtaatatggaaactgcagtacggaacgcatgggaaaagatttgggatatggatttagacagaacgtttacgggagattttgaagaatatctcaatgatgattataatcatgcggatattaacctttatgtcgctattaaaaagtaatttttcacttattgattaagagaaatcaaaataatttctgtatgttagaagcaacatggtcgatactaattgtatcaatcatgttgcttttccgttttttattgaaagaatcaagggatatttatacaaaaacaaccatattttaaagtagaacaaagggtataacgactgaaaaaacaaaaaaagcttgtatattatgttagtttgatataaaattaaagttaagtttttaacgaagggaggattgatgcgttatcgcagccaataatttttggattgtagtgaaaaagaatttgtttgctattattacaatggcaatctcaatcggtgtattggtttattttttaattacaacagatggtatcacagcctttgcggagattgcaggttctattcaaataccgtggtttatatcaatttttgctgctatcattgtcggttggttattggaagccttggtgttgcactttttttgcaaaaaagtatatcctcaatggaaatattggcactcactcattataggaatgataggtcttttgtatagcgcattaaccccttttgcaaccggcggtcaagcaatgcaaatctactacatgagaaagctgggaatggataccggtggggcaggttccattattgctgttaagagtttggtatatcaaattattatggtgttatttgcgttggttatggtgttttggaaactacctttttttcagagcagtgtaagtaatttttcatttttaactattattggtttaacaacaaacttgacgtttgttttgcttgttttattttttgcaattaatgagaaagcaacagataaatgtctaagagctattattaagttcttatatcgtataaaaattgtaaaaaaacctgtttcacgttattataaactccatagtgaatttgctattttccataaaagcactaagcttgtgggtaaatctgtaaaggtatatgtaggtgcagtattctttaccattgtacaaatctttgtagcatgtattatcccgtatcttatctatcgcagttttaattttgaaggcgccgatgtgtttgatatgttaggtgctcagtcgtttgtaaatatggtgtcggcattcattcctttacctggggcgtcaggcggtgcagaaggaagtttctatttattcttcggcacattttttggtaatctgattatgcccgctttatttatttggcgtataggaacgtattatctcaatattgtaggaggaattgcgtttatttttattgtaaaacggatacctcatagaacattgtacagagaaaaaaccaaagcagaattggaagcagatcgccaattaaaagaattatccagcaaaaagttagatttatagaaaaaaagacactcaccttaaaaggtgagtgtctttttttgttgttataacataagagaaatagctatgctatttctaacgaataaccgttaaaacgttcttgtcaacaatcaaaatctgtgattttgtacttgttgcaaggttgttataacatattattcttgactcaatcccgattcttttaaaaaatcttttgctacttgttcgggagattgctgaagaacgtctaccctatagtttaactccgacatgacatcgtttgttagcacatttcccaattcttctaatattgggacaatctctggatattcttccaatgccttttctgacatgataggcattgcgtaatatggggtgaaaaatcccttatcatcttctaacacagaaagttcaaattttttcaaaagaccgtctgttgcaaacgcatcaattacgtctacttcatcatttattaaagcggtatacctaggagcaccatccaatggtatattttctcctattttaaagttgtatgcctgttcaagaccgattaatccggattcacggttggtaaattcaaacgtagtaccggatttaaaagaagaggctacttttgcaaaatcacttacgttgctcagaccgtatttttctgctgtttccggttttacggctaagatatacgtattattgcacttcatttgagacaatacctcaatgttatatttttctttgaattccgtttttaccgtgttatatactgcatctacatcgttaatgggactatgctgtaaaatatcgctgtaagcggtaccgctgtattccacatacatgtcaatatcgccggattgtaaagcgctgaaacagacttgtgtaccacccagattcattttacggtttacctgaatatcggttcggtcttctatcatttccgataccagatttcccaaaaccaattggtcggtgtaatctttggaaccaatggtaatggttctggctccggctgcaccaccgccgatagaagtaattacgaaaatcacaatgatagcaacagcagtcacaccaagtgtaattttttgaaccagacgttttttctttttccgtgcggcatttcctttttgtaggctgatcggagttactaatttttcaatcataccaaggagaaaatcaacaaataatgccaacaagcatgcaggaattgcgcctgccaaaatttgattgttgtttacggtacgaataccggagaacaccagattacccagtcctcctgcgccaatgaatgcagccattgtcatcaaaccaactgcggttacagaagcaacacgaacaccggtcataataaccggcagtgccagcggtatttgtactttggttaaaatttggaatcgggttaagccgattcctttggcagcttccagcgtttgagaattaatactttccaatcccgtatacgtgttttttataatgggaagcaatgaatacagtactactgccgtaacggcgggaattgcacctattcccaagaagggaatcataaagcccagcagggccatacttggaattgcctggattacatttgcaatggataacacaattttacttgcttttgacatataagaaataaaaatgccaaggggaacaccaattaatacagccaaaccgactgagattgcagtaagtttgatatgttccagcaaaagtgcaagaatttctgtgtaattggttgcgatatattgccaaaagttcattcttgcgcctcctctgtatagtcaaaatattgttgactcagtgtggtaaccaaactgcttttggttatcagtcctaccaaacagaacttagcgtctactacaggaattgtagaatgattttcttttgtaaccagtttaatggcatccaaaatggtttgttccgggttcagtgcagcaaagtctgcgctgatgaaacttcgaatcggctgtgttttatcctcgatacttctcagctgatttgcttttacaatacccagcaactgacgggaatcgggttctataattaaaaggctgtccaccttatattgacgcattttatccatgcatttgagaatggacatttctttggtagcggtgacaggcctttcaatcataatatcttccaccttgatatattcgggagaagaccaaattctgtttttacccacgaagtttgctacataatcatctgcaggatttttcagaatattttccggagtatcatattgcaagacattgccgtctcgcatgatacatatcaaatcagcaactttgattgcttcgctcatatcgtgtgtgacgaatacaattgtttttttcagcttggattgcagctgtaccaattcatcttgtaaatcggtgcgtgtaatggggtcaagtgccgaaaaaggctcatccattaaaataatatcaggattggttgcaaatgcacgggctacgccgactcgctgctgttggccgccgcttaattcggttggatatcggtctaaaaattcattacaatccagcccgaccatgtgcattagtttttttgtgttctcctctaactctgcaggcttgtatttttcaagttttggaataatttcaatgttttgccgcactgtcatatgaggaaacaggcctgtttgctgtatcacataaccaatttttcttcgtaaagccacttcattcatcgtttgaatattttcgccattgatataaatagctcctgaagtaggtttaatcaatcggtttatcattttcagcaaagtggtttttccacatccgctttctccaatgattgccacaaactgaccttttggaatggttaaattaatatcgcgaagaatctgttttgttttataactcttcgcaatatgttcaaattgtaacatgcgttctcctcctaaaaaaagagtaacaacttcattatacaataaagttgttactctttcaactctcattcttcttttggaggatataaaaactctgttacccgctgtgtagaatcgtcttggggtagaaaatataatatatcatgctcgcataattcaatataaggtcccggagagcgcagcaattcatcctgctttcgcactgcaattacggtagctcccgtattttgccaaaattgtatatcagataaattgcggtttaagtagtggcaatcctttgtgatatgaatttcaaacggcataaacgggttcatggaccgaaaatgttctgatgcttgaatcagttcggataaatattgattcagtgcctccatctcttgtttttggtggtcaacactttggaatattttttctttgatactttcaatggtttcacgcttattaaattgtttgataaagttggaggcgttctgtcgcgatttaatggtaacgccgcttcctttttcggacacgacaatatctaagtcacttaaaacgcagatagcacgtcttgccgtttcgggagaaacgccgtaatgacctgcgatataagagcgtgtatagattttgtcgcccactttatattcttcatttgcaattctggtagcaatttccacagcaatttgctggtagcgcggcattgaaattttatttttaatttgatattccataaccatagtcctttttattgtgatatcttaaattttaatggaaacttaatactgtgaccgttaatcactataccatatttatttgagttactcaataagtttgtatgtagaaatttgaatttgatacagtatgattctaatcctatgtatctcatagagtcaattggtttgttgatatcttgattctaaatttgtacatgccgacatatagttaaaatacagtgaaaaatggggggatgcaaaagtggattggcaaaatttatcgaaggaggaatgtgtaaaaaagctggaaaccaaccaaaacaaaggattatccacgtctcaagtgaaaaaaagactggagcaatatggaacaaatgagttaacgcataaaaagaaaaacggatttttcaaaaaatttatcagtcaattttctgactttatggtaattattctgttaattgcagctgcggtatcttttattacatccctgatacgccatgatatggattttattgattccattatcattttaaccatagtggttgtcaatgcattcaccggcgtaatacaggaaagcagagcagaaaaagcaattgaagctctaaaaaaattgtcttctccgcaagcaacggtgcttagagacggaaaagaaatgaaaatagattcttccggtttggtgccgggtgatattgtagtgctttcaacgggagatatggtgcctgccgatttaaggattttggaatcttacagtctcaaagcggaggaatctgcattgacaggagaatcggtaccggttgaaaagagtccaaacggtactttttctgcagatacgccaattggggaccgtaccaatatgctgttttccggtagcagtgtcaccgcgggcagaggaaaaggtgttgttgttgcgactgcaatgaaaacagaagtaggaaaaatagcacatatgattaatacggaagagacaccgcaaacaccgctgcaaaatcatttagcaaaaacaagcaaaattttaggtatcggtgctcttattatttgcggtattatctttattttgggattattccaacatatatctccattggaaatgttcatgatttccatcagtttggcagttgcagcaataccagaggggcttcccgttattgtgaccattgttttggcaatgggtgtcaaacgaatggctaccaatcgtgcgattatcagacgattgcctgcagtggaaacactgggaggtgccagcgtgatttgctctgataagacgggaacactgacgcaaaataaaatgacggtagtggaaatggcagacagcgagcatgcgttggatttgagaggaacagaacctgagtttatattgaatttggcagtgttatgtaacaattgtacggtgtctgccgaacgagtgaacggagaccctacagaagctgctttggtgattgcttccaagaataagaaaaatgtattggaacagcagtatcctcgcataaaggaaatcccgttttcgtcggacagaaaacgtatgacgacaatacatcgcctgcatacggggggatatcgcatcattacaaagggggcccccgatgttctgctgaatttgtgtacaggggtgcatattcaaaataacagccacacgctgactgcttccgtaaaaaatcgtattatgcatagaaacagcgatatggcttcccgttctcttcgtgtgctgggagttgcatataaagatgtaacagaattgccaagcggagagaaaatgatagaaagcaacctgactttttgcggtctaatcggcatgattgaccctccgcgtcccgaagcaaaagaagcggttcgcatgtgtaaacaagcgggtattcgtcctgttatgattacgggagaccatgtggcaaccgcaactgccattggcagagagttagggattctcgatgaaaacggtatggctctgacaggagcacaattagaccaaatggagcagcatcagcttgaaaaagaaatttacaaatattgtgtctatgcaagggtatcacctgcccataaagtgcgtattgtaaaagcgtttcaagccagaggagaagttgtcgccatgacaggtgacggagttaacgatgctcccgctttaaaagcggcagacatcggctgcgctatgggacagtctggcacggatgttgcaaaaggagcttcggatttgattttgaccgatgacaatttttcaaccattgtgtctgcggtcagagaaggaagaggcatctatgaaaatatacgcaagaccattcatttcttaatctcgtgtaatattggagagattatgacaattttggtggcatttatttttggaatgccaagccctttgttggcaattcaactgttgtgggtaaatttggttacggattctttacccgcgcttgcattgggcgtagacccgattgatgatgatattatgcagcgcaaaccgtcacgacaaagtaaaagtctgtttggcaacggaatgggctataatattgtggtagagggttgtatgataggcgcgctgtcattgctggcatttaccattggccgtgtattctttgacggaacaggcacagaaccgctcattggaagaacaatggcctttgctgtactcagcttgtctcaggttgcgcatgcatttaacatgcggtcagagcattctattttccatattggtgtgtttaaaaatcgtaaactggtgattgcagcgcttgcatgtattgcattgcaagcaagtgttattttgattccgccattgtctgcggtatttaaaacagcacatttaggtattttacagtgggcaattgtcattggattggcattggtgccgattgttgtggtagaaattgaaaagcttttgttccgtatgataagagcattattcccgccgaaagaaaaatctcataaaaaagtgaataagaaagaagcaaaacaactctgacggacggttatgacagaatggtgacagggtgggtgattgggaatccgcagagaagttgcaaatcaaaagcgcatgtatgaacatgcgcttttttgtcgtgagaaatggtttgacttttgatagtttatatgatatattacaactgtattaatctaaatagtacagttgttacagataggagggagtttgtgtttacattagactatcaaagcagactgccaatttatgagcagttgtataaatcaattattaaaatggcatcactcggtgtaatggaacccaatgaaaaacttccttctgtgcgagtattgggacagcagttaggcgtcaatcccaatacagtgcaaaaggcgtatcaaatgttggaaagagatcaaattatttattccataccgggaaaaggatcttttatttcaccggatttatccagtgtagacgtaaaaaagtcagaggcattggaaaaagtggctttggcggtaaaagaggccatcgaccacggcgtagagaaatatgagttgctgcaatacatagaacagctgttaaatatagaaagtgcaggtgaagaaacatgatacaggtggaacgtcttacaaaaaaatttcaaacctatactgccttaaaccaaatttctgtttctgtacagccgggctcggtatttggtttggtaggttctaacggagcgggtaaatctactttgctgagaaccattgctggtatttataaaccggacagcggtacggttgccattgacggtactcctatttttgaacatcccaatgtgaaaaatgatattttctttatttcggattttccttattttattccgcaaagcaacatgaaagagatggcgaaattttatgcttctatgtactccaactggagtcatgagcgatatcgtgaactttgtagtttatttccgattgaagaaaaaatgaaaatttccagtatgtccaaaggaatgcaaagacaggtcgctttaatttgtgcactgtctacccagccaaaagtactgctaatggacgaaatttttgatggacttgaccctgttatgcgccaattgctgaaaaaattattggcacgagaagtgtctgagcgcaatattactgttatgattgcgtctcataacttgcgtgaattggaggacgtatgtgaccatgtggggctgctccatcaaggtggtgtagtatttgagcaagagctggacggccttaaattaaatctgcataagctgcaagctgtatttaaaccaatgatttcaatggatgtattttctgatttggatattctgaaatttgatatgaaaggttcattgataaatatggtaatacgcggtgacaaaggtgttatttccagaagaatagaggcgctaaagcctgtttattttgaaatgcttcctttaacattggaagaagtatttattagtgaaatggaggtatccggttatgacattgacaaaatcataccataacagcttccggcaatggtggtcagtgtatacttggtctttaaaaaagcaaagtggtatcggcattatatatttgattttgttatgtctggcattgccttttctgctgggaattatattgtttagttctataaagaatcagcatatgcttaccggtgaaaatattgcaaacggactccatatactatttacgtttttgataataccagggacattgttatttgtttttattactgctgttttattatttcgattcatgcataacaaacgcagtacagatttctatcatgcattgccggtttcccgtactgcaatgttttttggacgatttttagccggatttactattttagccgtcccaatggtcatttgctgctgcattacggcaattgtactggtttgtgtgcaagggacagcaaatatattaggcatgccgtacggtacattatttttgtatttgctttatttgttgattatcatcttaattacctatgcattcaccgtatttattgcagtatgtagtgggactacgtttaatgccattatttcagctgttgcaataggagttgcatatccaatctttatgtaccttctaattatcatggtaaattcattgctgccgggctttacactggaagggtttactaccattttaacagcaggttctccgtatatggcatcgtttgttcctgtgttttttatagcttataccagccaaggaataactatgagtgcagatatgattgccttttttgtttggtgggcatgtattactgttgtcatgattgttgcatcatggctattgtatcgtgccagaaaaagtgaaaatgcagagggaagaaaagcgtatccggtacctcaaatcatcattcgcactgtagtatcgggtgcagtaggtattggattgggatatattttgtttgcaacattgggcggtacggttgccttctttgcaggagtagtcataggcgctgtaattgcccatatcattattgaagtattgtatgccagaggttttcgtactttgctgaaatcactgccatacttagcaggatttttagtactgtttggtatttactatgctatattggctacagggtgttttggatatgatacaaaagtaccgcttgccaatcaggtagaaagtatagatttggacttggataataccccagcaaatgaaattctggatgtaaatggaaaaaccattggcacagtcacacctgttcatttacaagacagaacttccattgaagcggtaatcagctggcaccaagctactgtagatgagaatcgggaaaaacattatccttatcagatgtctgaccatatattttccggaaaagtgacatatcatttaaaggatggcagcaccttaacaagaacagtggaatatttccgagatttaaataccacagaaactaacagcacgtcttccaaacgaaaagagcagaaagatttgttggaaaaccaagaggaatacattaaaaaatcaaatttaattttttatgtagagcctcaggctttgaatacgataacagttgtaaaaggaaatgccgattccggaacatatattacagaggaaggacaaaaagaaattttgcttcaaatgttacaacaagacattatgagaacagaaatgaatcaatctcattctgacagtaaagagtccactttacaaaagagtgccgatacagaaatcgatgaaaatacgattttgctgacaatagatacaaaatcatttattccgtctcagaacagtattgtacgccaattaacgggtgcctatcacggacaaattagactttcacaaacaagtttcccatatgtgattgatgaatcggaatttccaaatacatatcaatatttgttggataacggttttctggcataaaattttttaaaatgcattctatgttaataggatgtattttttattttttacagattcagttttgttatttttcaaaaagaatcgaataattccgaatatgtatgtcaatgatatggataatgaaagaaacatacataagggatactttgtgtaacggaggaatcatagatggcaaaaaaaatactaccttatatggcaagttttcttgcaatcttttttatcattccgtttctgtcgattcaggttgcaggagaagaggtaacgtttgaaacaaattcaaaagcgctgtatatggtagatttaaatacacaggaagtcgtatatcaaaaaaacgcttcacagcagttggagcccgcttcctgtaccaaaattatgacgtatattgttgctgtggaatccatatctgatttggcaaatacaaaaataacggccggcagctatgtatcagctatgcttcagggaacagacagttctctgtccggaattcggcaaggggaacagttaaccgcattacagctgttacattgtatgatgataccatccggcaacgatgcagcacttgttttggcggaatacatcggcaatggagatattaataaatttgtggataaaatgaatgagaaggctgcagagctgggatgcaacaatacacattttgccaatcctcacggtttgcacgacgataatcattacacaacagccgaggatctttataaaataacacagtacgcaatgagtctgccttattttatggatattgtaacacaaacagaatacacattgcctccgacgaatttatatacgggagaacgcaccatttatacaaccaataaaatgatggataagaatgaacctgtttattatgaaccatatattgaagggataaaaacaggttcacatgatgaagcaggttattgtttggttaccacggcccagaaaaatggacagcggtatatgattgttgcgttaggtgcgccgattggtgatgtgcatggagaaatgttggacacaaaaaacttgtatgactgggcatttcaaggttttcaggagagcagtcctgtattggcacacaatgtatatccggagataaaacgagggcagttgtgggataaaatgaatacagttatctcttctccatggtttgtagccatatgcagtatggtcattgtaattgtggtattattattgtcagattatgcgcaaaaatataggcacaagaaaaagaacggaaagtaaagcaaagggggaagcaagttgctcaaacatttcaaacgattgatgcaccctgtaagagtagaacaccctaacgtacaatatgctgttctgcttcaggagcaactgggaggagcaaacggtgaattaaaggcagctatgcaatatatggctcaaagcttctatgtaaaagagcaagaattaaaagacatgcttatggaaattgctgccgaagaattcaatcatatggagatgataagtgtaaccatacaaatgctgaaaggtgaaaatgtttctgataagccttccgatttttgggtgcagtctcctttttgttttgtaaatatggacggtgttccgttttgtgcggattatattaccgttacaggtgacgttgcaacagatttactatctaatattgcatcggaacagcgttccaaaataatatatgaatctttatatcatcaaattgaggataaatatgtacgtaaaacaatagagtatttgatgcatagagaaaaatcgcataagatttcttttttagctgcattaaagcagtattcacatgaagaaagcggtctggaattcggggctactgctgatgaaaagttatattttcaatttcgttccatgtctaaagaaaaaacagatgagagtaatataaccccaccaccgggattttatcatccggatgaacatcactcatagtataaaattgttatgtgaaagttatctacgaaacaaataatagatatatactgattatttaatgtatagctacattttgtatctgtttttcacacagaagcccgtattaagtttaaaatgaatacaaaacatattcgggaggaagggttcatgaaaattaaaagctattctatcagaattgaacaagaccttttacacaaactgcattatatggctgcatatgatggaagatctgcaaatagtcaagttttgtattatattaaacaagcggtagtagcatttgaaaagaagaacggtcctattgaaatagaagcaaacaaataggttatatatttttacatgaaaaaagcgattgaatcattcaatcgctttttttttttacttgctgctgttcttttgtaacaattctgctttaatactccacagctcttgagataagtctacataatagttatgtggatggtcaaaccgcaggacttcaggccatagagtattcacttgttccttacagtatgcctgaatctcttgcaatgattttggggtagtcatattctttccgcgtttgaatatttgctggcgcaaaggtactgcacgaaatgattccactgttttccgtttccaagtattcacagggtcaaaaatagtgtacggtttggaatcatcaatcacttcatcgaacagagttacaacgtctgcaattgctttgccgctggttctgtcatataatcgccataaatttttgaagcatggtgttgtaatttttgcagtattttcactgatttttattttaggaataatattaccatgttcatcttcaatacctgctaatttataaacaccgccgaatacaggttccgatgatgaggtaatcattctttctcctacaccaaagctgtccacacaggctccttccatgagaatatctctgatagtaaactcatcaagtgaattggaagcgcagatactacagtcttcgtatccggcatcgtccagcattttacgtgcatggcgagtgagataggtaatatctccgctgtctatgcgaatacccgcagggcgatatcctctgggaagcagttcttcgttaaatacacgaatggcgtttggtataccggacttgagtacgttgtaagtatccaccagtaaagtgcattgtgaaggataggctctggcatatgcgcgaaacgcttccaattcactatcaaacaactgtacccagctatgagccatcgtacccattggagggatgtcaaattttctcgcacaaagtgtacttgctgtaccgcagcagccaccgatataagctgcgcgtgcaccgtaaatggcgccgtcaaatccttgcgcacgtctggcgccgaattccataaccggtctgccttgtgctgcacgtacaatacggtttgctttggttgcaatgagactttgatgattaatggtcagcagtatcatcgtttcaatgaactgtgcttcaattgcagggccgcggactgttacaattggttccatagggaaaataggcgttccttccggtactgcccatacatcgcatgaaaatttaaatgtacgcagataatctaaaaaatcaacagagaataattgtgtagatgctaaatatgcaatgtcttcttcactgaaatgcagatggtcaaaatattctatcagttgttgtacacctgccataattgcaaagccgccgtcatttggtacatgacgaaaaaacatatcaaaataagcaattcggtcacgatatccatttgtaaaataaccatttgccattgtaatttcataaaaatccattaacatggttaagtttgttcttaaaccgctgtaattatccatcatttatcatctccaatagtagtataggaaatttattctgtattacgcctattatatcaaatataaatgttcagcatattatatcaagaaagagacaaaataacaaatgttatttttgaacaatagatttgtagtattttgttttttattgcagaaaaacaaaaaatagagtataatacaattataattagtgaaagttgttcattttaaacgtgcaggacactgacgtttatttttatgcttgtattaagatactttagttttgcagctgatatgggagatgaatttatgagattacgcaagcaggccctaggcgaccgcaatttaattggagcccgtgttgagttggcaagaaaaaaccaaggtatgaaacaaaaagacttgctggcgcaactgcaggtaagtggagtagatatgaacgcctcaggtttatctaagttagaagggcaaatacgctttgtaacagattttgaattagtagcattggccgatatattagatgtttcggttgattggctgctgggacgtacacaacaagagtaatcaaaaaactccgtttgatacttcatacggagtttttttgattaaaaaccaaaaaccgcaggcacatttgtgcaccgcggcttttagcagaaaaatgaatgtatgtaatgtatctcgtaagctaattaaaaagaagagaaccttttgccaaattcttggcaagaagcaagaccgtctgcatcaggtgttaaattaattgtaagacctgtttcaaacaattgcgcaccgttattttttacgcggtcacaccagttctccatccactcgccggttccccagtcataggaaccaaacaaagcaatttttttgccttgcagtgaggtttctacttgttcaaagaaaggctcaaattcgctttcttccaatacctcgtcacccatagaaggacagccaaaagcaattttagaataagtatttacttggtcaggagaacattgctctactgacataacagctgcggtacctcccgctgctgaaataccttctgcaattgcgtttgccatactttctgtattacctgttccactccaataaataattgcaatattttccatgagttacacgctcctgttttgaataatagaatttgtacataaacaatgcaataaattcccatctgtatcttttaatgcttgggacaattgctgtttgcagcttttatattgtgcaaacaaacggcgactgtaggtttcgtctccgtatactttccaacaaccactgtatttgtaattgcagccgttgttcgtaatgaagcccacaacatcttccagaggataacccagaaaaatgccaatttcatgtgggaaaccttttgtggattgaacgcgctgtgctaaataggtcagaatttcatcaaaatatggttccacattgtttttatgatatacgggataaccgtaagataataaaaatgcacgcttttgcggttcacataatgttttgaccagttctgattttcgataaaccagcagaagttgtttacaattacattggcacacaggatgaaaataaatatcttgttgatttaagtgtgcattataattttgaaccatttgttcaaatgtttcaaaacgtggtaatgaaactaaatttgccggttttacccccattagtgtaggcgctgtatgagaggccagaagggtatctaatttttgctgtatcattataatgaaacaaacctccaaacctttctttacctatcgcaatgatagaggttagtttacgctaactcgattgtaaaaaataaaaattgttattttatttttgggttagcgtttgctaacttcctatatactatcacaacgattttatattgtcaatacaaaaaaataaaaaattttcacccaacatagtttaaatatgttgggtgaaaatttttaactgtccacattctctttaatacgttcaaatgtttcttgactgataatgtgttctatacggcaagcgtcttgtgcggcaagttcctcggggatattcaatattttttgcaggaactttgtaatatataagtggcgttcataaacttcattggcttttttgcttcctttttccgttaaaacaatatttccgctgctttccactacaatataaccatcatttttcaaaatactcatagctcggctaacacttggttttgtaaagcctaattcattggcaatatcaatcgaacgcacatagccttgtttctggtgcaacatcagtatggtttccaaataattttctccagattcatacatggtgtttttacctcctagtcagttatagaacatgtcgattcttactctatactttaccatgaatttaaacaaaattcaagcgttatcgtcaggagtgtatatgatatttttaacaagaaatttctttgtttatgccacatttcattctttatattctgtttttaaaatatataatatataatatgaaatttcattttgagagaaagactatattttaaatgatattgcgtatatgtttttcatatattatattgttttatgttttttgtgattccccacggaaatcggaagaaactagacaaaaatattgttaagtaatatccttgacaaaaatgttagcaagtgctaacttaataatgaggtagtaaaaaagcggaatcgttacaatttagttgtaactcgtcttatattgtcgaaaagagggaataaatatgataccattgacatttgcagatgtgggaaaagaacacattatccgcaaagtaggcggaaattccgaagtacgggctcatcttgaaaatcttggatttgttccgggtgcagcagttactgttattacaaccaatggcggaaatttaattgtaaatgtaaaagagtccagggttgcaatcagtaaagaaatggctgccaaaattatgatttaatctgtccggcggcagaaagggaggacaaaattgaaaacattaagagaagtgaaggtaggagaaaccgctactgttgttaaacttcatggagaaggtgcaacaaagcgtagaattatggatatggggttgaccaaaggaacagaggtttatatccgtaaagtagctcctcttggagatcctgtagaaattacaatcagaggatatgagctatccattcgtaaagcagatgcggagttgattgagatagaataagaagaggttgaacttagcttgaaaggaagaaaaagcaatgcaaattaaaattgctctggcgggtaacccaaacagtggtaaaactacgctgtttaatgcgttaaccggcgcaaaccaatttgttggtaactggccaggggttacagtagaaaagaaggaaggaaaattaaaaaaacataacgatgttgttattatggaccttcccggaatttactctctttcgccatatacgttggaagaagttgttgcaagaaattatttgattcaagaacgtcccgatgtgattctgaatatcattgacggtaccaatttagagcgtaacttgtatttaaccacacagctgacagaattgggaatacctgtggtcattgccattaacatgatggatgttgtaaaaaagaatggcgataaaattaatgtggaagagctctcaaaacaacttggatgtaaagtggtggagatatctgcattaaaaggtacgggtattacagaggcagcacaagcggcagttcaggctgcaaaagatacaaaaacagtacctcaacattgcttcagcggtgttgtagaacatgctctggcacatattgaagaagcagccgtacataatatgcctttggaacaacagcgttggtatgcaattaagatttttgagcgtgacgaaaaagtattagagcaattaaaacttgataagaccgttttagagcatattgagaaagatataaaagcggccgaagaagaattggatgatgatgcagagagtatcattacaaatgaacggtatgtttatattgcctctatcattaaaagctgttataaaaaacacagcaaaggccttactgtttccgataaaattgataaagttgtgaccaaccgttggttggctttacctatatttgttttggttatgtttgttgtttattttgtgtcggttactacggtaggtacttgggctaccgactgggccaatgatggtgtgttcggagatggctggcatttgctgggaattggcgatagttcttatgcagcagatgcagaccaattcggagaagcatcgcaggtagtaaatggttttatcgattatgcaggagagcagggcatagatacggaggcggtaacagctgcattggataccgaatcggaagattttgatcctgctgttgccaaaacagagttggcggaatttgcttctcaattctctccaacggatgaagcctcttatacggtgacagatgaggaaacgttagctacagaagatgtgacttcatcgggagaagagttgactgctgccttaggcgtatatgaacaatataattatacagagccggaccctgctgattacggcgtttgggtacctggaattcctgtattggtggaaaatgggctgaatgctatcaactgtgtggactggctgcaaggattgattcttgacggtattattgccggtttgggcgcagtgttaggctttgtgccgcaaatctttgtattatttattttccttgccattttggaatcttgcggttatatggctcgtattgcctttgttatggaccgtatcttccgcaaatttgggttgtcaggtaaatcttttattccgattttaattggtacaggttgtggcgtgccgggtattatggcttcccgtaccattgaaaatgaacgcgaccgccgtatgaccattatgacaacaacctttattccatgcggtgccaaactgccgtttattgctatgattgcaggcgctatttttggcggtgcatggtgggttgcgcccagtgcttactttattggaattgcggcaattatcatttcaggtattatgttaaagaaaacaaaaccgtttgcaggagatcctgcaccgtttgttatggaactacctgcttaccacttgccaactgtaggaaatgtattgcgcagtatgtgggaacgcggctggtcctttatcaaaaaagcaggcacaatcattttgctttccacaatcctcatttggtttgttacatattttggatttatagacggcacctttaccatgctttccgaagaccaaatagacaacagtatccttgcaatcatcggaaacggcatttcatggttgtttgctcctcttggttggggcaattggcaggcagcggttgcttccattaccggtctggttgcaaaagaaaatattgttggtacattgggtattttgtatggtggttcaggctctgtctatgcaaatatcgcagcttcctttactgctatcagcggatttagctttatggtattcaaccttttatgtgccccttgttttgcagcaatgggtgcaatcaaaagagaaatgcataatgcgaaatggactgcgtttgcaattgcttatcaatgtgtgtttgcctatgcaattgctttggtaattttccaacttggcagcttatttacaggtaacggaaatatcatcggttctattgttgcatttttgattgtagcgttcatactgtttatgctgttccgtccatataaaaaaagtaatatattgaaaaagaaagtgaaagtataaactttctaaggaggaattacgatgctggacttttttgtaaacaattggggaacccttttggccggagttattgttttagcggtcgtaattctggttattgtaaaattaatcagagataaaaagaagggcaaaaaagcctgtggatgcgattgcggacattgtgctgcttcggcaggatgccaccatgacgcggcacaacatcaggagcccaatcgaaaataaaaatggcgttcatactagaaatttcacaccattgattgtttaggaaaaaatagttaatataattcacaattactggataaaagctgatacgggagtaaaatactcttgtatcagcttttttattttagtggattatacgcagtacagtttaatttattacgaaggaatgatataatcgatacgaaaaggatacaaaatgtatggtacctttcagtattgtgtgaaaaatcgaggagggccttatgtcaagaatagacggtgacaggaaaaatatatgtggagaaaatataaaaagatatagagaaaagaaaggcttgtctttagagcaatgctgtgtagaattagaacaagaaggcttattattgagcgcaaaagaactggaacaaattgaacaaggacaaaagattgtattagatcaagaaattatttgtttttgtaaagcactatccatcacaatagagcagttatttgaagacatatccctataataaaaagatgagacaaatagaacataaaaaggacgaatcgtttatggtacgattcgtcctttttatcaaatcaatggaatccttgaccgccaaataccgaaaagagacgcttaacttgtccctttaatcctcgatgttcaggttgttctaatttagggtcacaggaaagcacatgtctggctgcagattgtgcttcttttaatacttccatgtcttctgccatattagcaattttcaaatccggcaaaccatgctgcttttctccgaaaaagtctcccggacctcgtaaacgcaaatcttcgtctgcaatacggaatccatctgatgtactgcacagaatttttaaacgtgcaaccgcttcctcgttttgcgcatctgaaaccaaaatgcaggtggatttcatggttcctcgccctacacgtcctcgcagctggtgtaactgggataatccgtatctttctgcattttcaattagtataatcactgcatttggaacgtcaacaccaacttccacaacagtggttgagacaaggacatcaatttctccctttgcaaatgcagtcatgacagtatccttttcttttggtttcattttaccatgcagaataccaatcactttgtccggaaatgtttccgtttgcaaagcgtttgcatactgtaccacactggccatatcgttggtactttcttccaccaaaggacagataatatacgcctgttgtcctgcgtccaaatgggtgcgaatatattgtaatgcccgcgcacgttttcggctgctaattgcatacgtttctatggtttgacgtccgggagggagttcgtccagaacagatatgtctaaatctccatagataatcagtgccaatgttcttggaatgggggtagcagacataaccagcatatgaggatgattgcccttttcagctaacaaactcctttgagcaacgccaaaacgatgttgctcatctgtaatgacaagaccaagattttggaatgctacggtctcgctgataagcgcatgggtgccgattaccatttgtatggaaccatcttggagctgttcaagcagttttctttttttggcaggtgttacagagccggttaacagaccaacagagatacccgtatcctttaaaatattggaaatagatgcatgatgctgttgcgctaaaatttcagtgggagccattaatgctgcctgcacgccatttttgatgacagaataacataaagctgcagcgacagctgttttaccagagcctacatcgccttgcaccaatcgactcataggttttctatttttggggtttgtcatatctgccattgcctctgaaatggcacgtttttgtgcgccggtgggagcgaagggaagcagttggaagaactcgttgctgtaatcgataaaaggcggcagggaagtttcctgttttttacgatattttaattcaagaagtcccagctgtaatgtaaacagttcctcaaataccagtctttttttagcaatctccttagattccatagaatccggaaaatggatttgttctaaggcgtatctcagctcacaaagatggtgctgcatacgaatgctataaggaatcggatctttgacttgctcaggcaataatgccaaagcgtgctttacagcattacgaatcattcgagtagataatccttctgtttgatgataaatagggcacaccgaaggcgcggaagaaacaggataaaattcaggtacactcatttcttttctcagaagggtaccggatactttaccgtaaaaaatatattcttttccttctgtcaaagtattgacaatataaggattattaaaaaaagtgagctgtaaatcacgcatgccgtctgttacggaggttttatataaagtcatacctttacgaatacgcgtctctatgggtttatgcaaaacaacggctcgtatagcacaggggactccaaaaggtgcttgttcaatggtaagcggttgactccaatcctcatatgtgcggggataaaagcgcaataaagcgccaacgctaaa

SEQ ID NO: 4114 - DNA, 20650 bp, Unknown
  16S sequences of unknown bacteria
aaacgaggatttggcacggcagtgccaaagacgacgattgaggttgcggatcacttcccctgcctagacggagagcatggagcggaagaattggacggcggtttgaaggttggggccggtgacggtgcagaggccggatagcgcttcctcaccggtgactaagaagggggagaaacggtagaccttgtcccacgcggcggcgtagaaacggctgtccgtgataaaggggcaaagacagggcgcgatcaccgcccgctcgaattgaatctcaatggcggtctccaacgcgtcccacgcttcgccgctggccgcgctcaaacggctgtgctcgtactccacctgcgtgtggaaactcagggcaggctccttcaggcggcggcacaggcgctgacggaatcgggccgtcttctggccggggatcaccgtctgccggaagcaaagctcaccccgccgggccggagaggccggttcgccgtaggccgccagatggtagaccgtcagctccgagaggaaaaactgatgaaagaccgaacgcccgtgccagcggcaccgcagaagggggaagaacaggcccgggtgcagcatgatggcccgcttgaaaaagccgggcgttttgcggccgatggcttccagcatcttccggctggccgcgcaaagcgacgcctgccggggccggcgggtcagcctcgcgccgccctgtaagagccgtgccgcagggtcgtcccccggcgcgacatgttccgcttccacctgccccatcaacaagcctttttccgccacgccgatcagggccagcggcacgttcgcgggcagatagcttcggaaggactccatcgtggcgtagccgccatagtccagcacaaagcagggcttgatgttcagcttttgcagatagtctgccatggcccgggctccctccgccccgctgagaccgtccatgctcagggccagaaacaggtcgccccccggacggtagccgtcccgtagcagctcctccagcgcttccaataaagccactacatgggcgcggctcatgggcacactgagaggaatgtccggcacattgggcatgaacggcgtggcctgcccgtctggcacgtccagatggccggtgaaaatcagcgggtcggtgacgctggctccctgcaggtgcagcagaacgcttcccttgggaaagcgctcctgttcggttttggaaaaaaccagcgggtaacattcccgcagcacccccatggcttcttcggccttctgctcgtcgtagccgccgtaggcgctcagacggcacagggcttcccgggcgcggtcgtagttcaggggggccaaaaattcgctcatggcgtacctccgggacaatgaaaataaaagaaagaaaacagaaaaagaaaggggagacccctcactttttcaaaagagctttacagttttcggttcatgatggagacgatcaggctgctgtcggagaaggtcttggccagcacgctttgatcggccagcgtgcggaagttttcgagggggatgacgctctccatcaggggcagcacggtgaagcagacgtagcacagcagcacgcccaccagaaagccgaacgcgccgcccgccagccagtccagatgcttgagcaccgggaagcggaacacggcccgcaccagattgatgaggatatgcaccacgataaagcaggcaaggaagcacaaaaggaagcacaacacgttgatggacacgctcaaaatggtctggttcacgtagtcgcccacgttggtggccagattgcccatggggctgaatacctgcgccgacaggttgtgctgcagcagggtgccgatggggttgggcagatcggccttctgcaccacctgcgtaatcgcgtccccggccaacccgctgaccgcctgactgctcaagtccagatcgcccagaaggctctgggagtcggtataggtggaaatcatgcgggtgatgtcggtattggacgcgactacgtccgccagccggggataaagcaggaaggaacccacgatggacaaaaggcttccgccaaggctcagcaccgactggataaaaccccggtacaggccgaaaagcacgcagatcaaaatgatggcaagggccgcgaaatcaatgggattcaggcttcattcctcctttgaaaaggggcggtcatacgccgctgacgagattgccccggggcagggtgagcacgtagacttcttcgccgcaggccacgatgatgcgtccatcgctgagggtgtccaccagctgagtggcctgactgtcaaggggcaggtcgaaggtggtaaaacggctgtcgttcagtccggcccgcaaaagctgagtggcggacagggcgtagatggtgcggttccagaccgtcgcgccgatgcagctggcgggcaggctgtagcgcttatccaccgtggagccggaaatgagccgcagctcccggatatcgtaaatgctgtcagactgggaagtggggctgaaaagcatcagcgcgttgccgcggtcgggaatttcatcgtccagaagccgccagccgtataccagcacgctctgggcggtgtcctcggtgccccgatagttaaaggcacgcatcttgcgggtgttgatgacccgcagcacgccgttgtcgtagagcacccggtaggtgatgttctcgcccagcgacacctcgccggtgttcatcttgcccacctcgaaggtgttgaggatgctgttggcggcggtgccgaacacgtccagcgccagcgtccacatatactcgccgttggggccgtagaagcccaagtccagcaggatcaggtttttgtaagcgtcggcttcctcgtccatgtgcgcgcccgccatgtccttaaccagcagacggggggaatcggtctcgccgaccaccgcgcccagatactgcttgccgatgcggcagaactgcacttcctcgcccagattgtcgttgtagctggaattgccgttctggtccagaatatacacggtggagcccacccacgcggcgatgtgctcgccgtcgcagtcgaagcccgcgttggttcccagctggaacgaccagcgcaccgcgcccgtggcgctcatgcagtggatgctcatgccgtcgtagtacagcacgttattgccgaaggccttgatattctcatcgtagggacagggcagccgggtagcggtaacgccggtggtctgctggccctgcaccagggacagaatgccccacgtcagaaggcccgccgcggccagcgcgacgatcaggatcagcaccgctttgccccggctcattctcggtttcactctctgcatgacggtagcctttcttccgccgccttcccccaaaaaaacgaaagggcggcgcggtttcttgcaatcttgaaaatctccattgttattatatccctgcgcgggaaaggatgcaagtgttcgcctttcggcgctatctgtgttatactggggaagtccttttgttcctttttataaggaatcattttataaagaaagaaggatgggatcatgtccgaaaaccacaaggccaaagccgaagcatggcaggccgtcaagttcacccttttctccgccagcgcgggcctcattcaggtggtcagctttgagctgctttccaaggcgctgaagctgccctactggggcagctatctggcggcgctgtgcctgagcgttttatggaactttaccttcaaccgccgctacaccttccgcagcgacgccagtgtgccccgggccatggggctggtggcgctgttctacgcggtgttcacccctctgtccacctggggcggcagcgccctgaccaacgggggctggaacgaagacctggtgctggtgctcaccatgctcctcaatttcgttctggaatttctgtaccagaagttcgtggtctaccgcaacctgaccgacaccaacgtcgtggccaagcgggccatggaaaaagagcaggaaaaacaaaataaagcctgctgaaagaaagaagcgaagcaatgaagctgcccaagaactggaaaaagattctctccatggcgctgtttatcgtgctggtgggcctgctgggctggtacctgtaccgccactgggacgagatgcgcgatctgctcacgctggacgggcgcacggtgacgctgctgatcctgttcgccctgtgcggctgcgtgatgaattgcgtctaccaccgcatccttttaagcgtatacggcgtaccgctggacgtggtggactggatgggcgtggtgttcgtggccaacgctatcgcctacgtgctgcccatgcgggccgacctgatcttttccgccacgtattacaagcgggccaaggggctggcgtatgtcaaaagcgtcagcatggcggcgggcaacgtggtgttcggcgtgatgttcgccctgctgcaaatgctggcggcgcttctgtgcgcaggccttctgaacgggcagtggccgcttcttctgtgggcggtgctggccgcgggcatcctgtgcgtggcggtgttcctgtggctggccctgcgtctggaggatcaccagcccgcctttgtgcagaagcacaagctgctccgggatgtgatcaccggcttcaacgcccttttgcgcagccggaaaatgctgcggcagctgcttctttgcctcatcgtgaacaacgtattccaaattctgctgtacatggagtgcttccgggcggtgggcacgcccgtgccgttccatcaggtgctgttgtataacagtctgagctggctgagcacggtgctgagcatcgtgccgggcaacatcggcctgaaggaggccgtgctgggcgtggccgccagccagatgggagcgctgttccagagcggcgtggccgcctcgctgatgcagcgggtggcggtgatgatcgtctatctggtgatgggccttgccttcgcatggcccgtttggcggcgctatacccgcggaaagaaggaagagctttcccatgaatgacgttttgcaggaaaaaatccggctgctgccggaaagcccgggctgctacatcatgaaaagcggcggggagatcatctacgtaggcaaggccgtcaacctgaaaaaccgggtgcggcagtatttccacggcagccatacccccaaggtggcggccatggtcagccgggtggacgatttcgacctgatgctgtgccagaccaatctggaagccctgacgctggaatgcaacctcatcaagaaatacaagcccttctacaatattcttctgaaggacgacaaacactatccctacctgcgcatcgactttcacgagcactatccccggctgacgctggcccggcggatggacagccgggatggcgccaagtacttcgggccctacatcggggccacgacggtgcggcaggtgatggacgaggtgcggcgtttcttccccctgcgcacctgcaacctgaccctgcccctgaaagcgccccgccggccctgtatgcaccatcaggtgggggaatgcaaggccccctgcgcggggctgatctccgaggaagaatacgccgtcatcttaaagcgggtggtagccttcctgaacggcgacagccgggaactggtgtatgagctgcaaaaggaaatgatcgccgccagtcagcggatggagtacgagcgcgccgccgagctgcgggacaagctctacagcatccagggattgatggagcgccagcacgccatccagaccaaggacgtggagcaggacgtgctggccgtggccatgaacgagcaggacgccatggtgcagctgacccatatccggggcggccgcatggaggaaggccgctccatcctgatggaaggctgcggcggcgaagagcctgcccagatcctgagtcaattcctgacccagtattacgacgacgagcatctgatcccccgcaacgtgctggcgcagacccttcccgagccggtggaggagctggagcagtggctccggctgcgcaagggcggggcggtcaccctgaccgtgccccagcggggcgacaagctggagctggtgaagctggcccaaaagaacgcccagaacgcgctggatcatcattaccaaagcgagcaggtcaagtacatgcgtaccaccttggccatgaaggagctgatggaggcccttcacctgcccaacctgccccggcgcatcgagggatacgatatttccaacacgcagggcatcctgagcgtggccagcatggtggtgttcgagggcggtctgcccgccaagaaggaataccgtcacttccgcatcaagaccgtggagggggccaacgacttcgcctccatggcggaggtcatcggccgtcgctttacccacggcctgcaggaaaagcatgagcgggaggcgcagggcctgcccgggccggggggacggttctccaccctgccggacgtggtgctgatcgacggcggcccggagcagcttctcttcgcccaccgggccatggaggaggccggagccagtgtgcccatgttcggcctggccaagcgctttgaggagatctacctgcccggcaggccagaccccatcgtgctggaccggcgctccaacgccctgcatctggtgcagtacgtccgggacgaggctcaccgcttcggcatcacccatcaccgggccctgcggggcaaaaacagcatccagagcgagctaagcgccatcgagggcatcggtcccaagcgccagacggagctgatccgtcacttcaagagtgtaaaggccatcttcaacgccacggaggacgagctctgtcaggtggagggcatcagcaaggaaatggcccgccgcattctggaacacgggcgacccaagctggaagaataaggatggaagggaaaaagcgctatgggcgcatccctaaaccatatacttactaaaggaggaatccatttttatgaaagcagcggtattctacggaaaaggcgacattcgggtggacgagcactatcccatgccggcggtggggccggagtcggtgctgattcaggtcaaagcctgcggcgtatgcggcacggacgtacacatttacggcggcgcacagggcgcgacggaatgcaacccgccggtgattctggggcatgagttcagcggcgtggtcacgcaggtgggcagcgccgtcacccgggtgaaggtaggcgaccatgtgactgtgaaccccaacatttcctgcgacgcctgcgaccagtgtcgccggggcaatccccacttctgcgactccatggccgccaccggcgtcaactacgacggcggctttgccgaatactgcgccgtgctggaacggcaggtgttcaaggtgccggacagcgtgccttttgaagaagcggccctgtgcgagccggtggcctgcgccctgcacggcatcgacctttgcggcatcaagcccggcgacacggtgatggtcatcggcggcggcaccatcggcatgatgatgctgcagctggcgcagctttgcggcgcggtgcgagtcgtcatgctggagcctaacgaaaagcgcttcgatctggcccggaagctgggggccgatctggtgctgaaccccttgaaaaacgacgtgaaggcggagctggcccgaaacggctttgacgacatccgcgtcaccatcgaatgcgtgggccggcccgaaacggtgcagtacgccatcgaatacgcgggcaaggccgccacggccatgattttcggcctgaccgacccggactgcgccattccctattacccgttccaggccttcaagaaggaactgaccatcaagacctcttatgtgaacccggacactcagggccgggcggcggcgatcatcgcctccgggcggctgaacctgcatgacctcatcagcgaccgggtagccctgagcgacatcggcacggctttcctgcccggcccccgcaacggtaaaacggtcattcttccctgactctgatccattctaggagggcccgacgaaagtgctgggaattttgtatctgctgttctttctggcggggggcgtattcctgacaaggatgctgctgccccgccgcaagcccgtgctgcgggtctatctgggcctgagtctgggccttttcctgatgatgtggctgccggtgctgtgggcttacgcggtgcggttttcctatacggcccacgccctagcggcaggttcgctggccgcgctgtgcgtccttggctggctctgccgggacaaagccgcccctgcgcctatggacgagcggcagaaaaagcttctgctggcgctggccgtgatggtgatcccgctgggcgcagtcagcgggtatctgcaatatacccactccatccggctggctgcggacggctcctatcacgtggggcagagcacctacggcgacttaagcctgcatctggccatctgcaccagcatcatcaacgccaaatttccgctggaaaacagcctgatgcttggggccaccatggcctatccctacctgtcggattcggtggcgtccacgttctatctgctggggatgccgctgaatacggccatggccttcaccggcaccctgatgatgctgctgacctacaccggctacggcctgctggccgaccagctgtgccggaagaagggcgcgcgctggctggccttcttcctgctgttcctgaacggcgggctgggcttcttcttcaccctgtccggtcgggtggaggacggcgtgaccaccaccttctgggataacctgcaaacggtgatgcagggctactacaagaccccaaccaatcagcccgaccccaacaacctgcgctggtccaatatcgtggtggatctgctgatcccccagcgggggctgctgggcggctggaccatgctgatgccctgcctgaatctgctgctgccgcccctattccgaggcgaaaagcacgagacccgggcgctggtgctcctcggcgtgatggcgggcgggctgccccttctgcacacccacagctatctggcgctggtgcttttgtcgctgggaagctgcgcctattccgtgtttcgggacggcgaaaaggcgggccgctggcagcggttccgcccatggcttctgtacggggccgttgccgcagccctgtccctgccccagcttttgtgcttcaccttcgtgcaggcaacggaaagcaatcacttcctgcggttccagttcaactggtgcaataaccggggcggcagagggctggtggatccctatttcttcttctatatcaagaacgttggctttccctatctgctgatcctgctggcgctgctgaaacggaagcccagagagctggaagcccccggcgcggcggaagaagcggcggcggtacgccagtaccggctcatcgcctgcggcgcgttcctgatctacggcattgcggagttcattctctttcagcccaacgaatacgacaacaataagctgctgtatgtgtggttcgccctgtgcctgcccatggcggcggattatgccgtcgaaatctgggagcggctgaagggtctggccgggcggcgggtcatcgcagggctgttcctgttctgctgcttcttcggcccggcgctgaccgtggcccgagaatgggtcagcgactatcaggcctacagccgctcggatattcaggcggcggaatttatcaaggaaaatacgccggagcattcggtgtggctcaccggcaacgagcatctgaatccggtcagttcgctggcgggacggacgatcctgtgttccagcgaatcgtacctgtattatcatggcttcgacacctggccccggcggctggagatcgccgccttctttgaagacccggcggaaaatctggcgcttttgaagaagtatcaggtggaatatatcttcgtcagcgcctacgagcgcagcgccagctggttcgacctgaacgaaagcgcgctggaagcgctgttccccgtgatctacgaggatgagggcggccagcaccgtattttccaagtgccggaggaataccgccaatgaaccgatttttgcgctattcgcaggaaaaagggcggaagatccgcatgatgctgatgctgaacggccagcttgcgcagaagacggcgcttgtgttatgctatgacgagcaggccgccgtgctgcagctcggccagcggaagcagcccgtcaccgtgcctctttccgatattttgagctgcgactacgcccggggcgacagcggcgaggactgaagtccgaagaactgcgcaaacggacagaaagagtgtgtgactatgttccataaaatcaaagattatctggaaaaacatcccaagcagtacgagctgctgcggtacgtcgtcgccggggggctgaccacggtgctgagcatggtcatttcctatgggatggagttcctgctggccgcccgacccgaacggacggcgggctttttgcagtgggtgatcgactgcatcaacgccgccaccgcccggcaggtgatgatcgccaacgccgtcagctgggtgatcgccgtgctgttcgccttctggatcaaccggaagatggtgtttcaggtgaagggcggcaccggcgcttccgtgctgcgggagctgggcgaatttgcgctgggccgggtgctgagcttcgccctgttcgaggagggcatggcctatctgctcaagctgatcggcgtgagcaatgtggtcaaccgcatcatcgtgctggtggcggtcatgatcttcaactatgtggtcagcaagttctgggtgttcaaagacaagaaggaaaaagcctgaccagcagtccgcaaattccatacgccgccgccccgtgaagcagcctgcacgccagcagccttccggggcggatgcttttgcccagaaataggaggttctgcatcaggatgctcagcccgccgaagctgcacagggcgcacagcaggggcaggtcgggcgcggcggaagcgtccagcagggcgtgagccccgccgcccacctccagaacggcccagaatatcgccggaagctccggatggctcgccgcccagcccggcagcagggccgaaagtccctgccggaaaagcgccgccagaatggaaaacagcatcatggccccgcagaccgccagcagggccgggcccgcctgccgcaagctgtcgggcagcgccgccagcagggagaccggctccggctccggcagcgtctcttttttcgggccgaccgggttcgttgtctgcggcctggaaaacagacgaatcagcccggccgcagccagcgcccccagccagtgggcggtcagcatcagccagcctccggccgggtttggcaggcggccgcccagcgagcctaccaaaaacaaagggctcatgacccccgtcgccgccgccatgggcagcagctcccgcccggcgacttcgccccgtttccagaggccttccagccgctgggctgatgcaggcgacccggacagccagcagaagcacaccgtcatccagcgtttttcctgcccgcccagatgccccgacaggccgtttaagaccatcatgggaaacagcgcgggcatcacgcttcgcacaaacagccccgccgcgccgttgaccgcgtccagcaccgtacccgagtccagcagcatcagcgccgccagcccaaaaagccacgccatgaaacttcctcctttgccaagcgtaccgccgcttcgtccctgcccgcggcgttttttctgaaattgccggatctcgctccgtttttttccgccgaagaccgtcttttttcaggccgcaaaacagcttatgcaccttgattttccgtcatttccggcccgccgggagaatttcgtttcaaaaagttcacagtttatgcaacaaaacgtcacgttggtacgtcatactatatgtgaggtgatcgcatggcaacgattttgattttttccgaaaactggcagatcgcgcataagctctgcgattcctatgcaaaggaaaaatacgacgcaagattatgcagcgatcctgaccagatttccgccgccgcggatgaaaacggcgcgcccctgatggtgatcgacgcggcaatgaaatgggtggtctgccgtccgatattcgagcggtgccgccagacgggaagccccattctgttcgtcaccagcgaccggcgcatgagcgaccatctgctggccctgtatccgggccggtcggacgtggtggtgacgcccttcagccgcaagacgctggcggaaaagacccgcattctgctgggcggcgaaacgcccgcccgggagatctccgtggacgaaacagcgcaggtggccctgctcaacggccgccgggtcgagctgaccgcccaggaaatggcccttctgctggccctgatgaatcagcccgacacccccgtcagccgggaacagctgctgcgggaggcttggggataccagagcatgggcgagacccgcaccgtggacgttcatgtccagcgcctgcgcaaaaagctgggcgaggactggatcgagaccgtctataagtgcggctaccggctccgtctggcctgagacggaaaacccaaaacaggaaattatcaaaccccccggtacggcagcgaagaaccgtcgtgccgggggtactgttaaaaaggaaaccgtctaaaagaacgcaaaacccgttaccggcaaaaatcagcgccgggcctcgagaaagcccttcccgcacttttcctgcggaaagggcttttcggcgcccggtgttcccttttatgttcttttcggcgaacggttcttcctgccgttcctttacgcgcttcgctccatggagagtttatctgcgatcatggcgatgaactcgccgttggtaggcttgtcctccggggtgcataccctgcatccgaaggcagtgttcagagtctcgacccggccccggttccatgctacctcaatggcgtggcggatggcccgctccaccttgctggcggatgtgccgaaataacgggcaatgccggggtacagctccttcgtgatccgattgataacatcgggatcggccaccaccattttcacggcctgacgcaggaactgatagcctttgatatgggccggaatccccatggtcaaaaacagactgcccagcctctcgtccacattttgacggcagggactttttcggagatcggagggcaaattttccgccggagcagtctttctgcccgtcaggctgcggatgtggcacatcagataacgcggctcaaagggcttgaccatataaaaggcggcccccagctcgatcgcccgggcaacaaaatcgtcccggcccagcgcggacgctacgatcacgccgggctggtggggcagcttacgaagctcctccagcagggtgtagccatccattcgaggcatgatcacatcggtaatcaggacgtcaaaggtttcctctttcaacagccgcagcgcatcaaagccgtttccggcttcgcgcaccagcgcgatttcctcctgcctgcgcagaaattctgccatagcgctgcggttctgagcctgagcatcaacgatcaagatccgggtttgttccatggtgattgcctccattactgaatgatattcctccagccgaaatcagcgcggtttttctttcggcattggttcctttttcgttcttttttgataagcgctgtgttttttctatttctccattgccggattttttgactggcggtccactttgtgctaaaatataggagaaatttccctttttcgggaactgacgttttggatatagcacgttcgaatgcaaaattcaatccgcagattccgaacgctgtttctaaaacgacaaaaccctcatatctggaggccgaaaaatgaacagcgagaatccgaaatcccgcccagaaattgacatggaaggactgcgaagccgtatcaaatcagccctttccgcccagcgaatgaccgttcagaatctgagcgacgccgccggaatcccaaaaagtacgctggatggctttttgaaccggggcactacgccagctttcgacacggtagcgaccgtatgtgccgtcttatccatccctgtggattccatcacgggcgcatccgtcgccgtccagtccgaagcggcggtaacgggtagtcaaagtcaactggacgaggtcaaaagcagccatatccgggaactgaacgccctaaatgaaatgcaccgtcaggaaaaagaatccctgctggaaacgcaccgggtcgccatggagaccctgtggcaggcccacgaagcggaaaaccttgcccgggacaaacatattgcggagatcagccgggaccgtggcgtttggcgggtcatcgccattacgtcgatcgtccttctcgtgctgatcctgtccgtctggttcatctgggatatttcacacccggacgcagggctgatcctgtacgaccgaaaaagtgtgatcggcccgttgggatgtggctgacccatcccgtttcattttctatatcaaagaggcccgctgcctgccctgacggtttttctcaggaatggcgccggcctctttaccatttttacctgccgcatttttgcgctctgctgcgctgcggaattttgttgcgtttctttacgcgctgcgctccatagagagtttatccgcgatcatggcgatgaattcgccgttggtgggcttgtcctccggggtgcagaccttgcagccaaaggcggtgttcagggtctcgatccggccccggttccacgccacttcgatggcgtggcggatggcccgctccactttgctggcagacgtgccgaagtgccgggcaatgccggggtagagttccttggtgatgcggttgatcatatccggctcgtccaccaccattttgacggcctgacgcaggaattggtagcctttgatatgggcgggaatgccaatggtgaggaacaggctgcccaaccgctcgtccagcgtttgcacccggtgtgtctctctcggagtgggtgcggcatccgccggtctgatccttccgccggacaaatcgcggatgtggctcatcagatggcgcatatcgaagggcttgaccatgtagaaggtcgctcccagctcaatagcccgggtgacgaaatcatcccgtcccagcgcggacaccacaatggtctggggtttggacggaagttccctgcggcgcatttcttccagcagcgcgtagccatccatttgaggcatgatgatgtcggtgatcatgatctcaaacggttcttcgctcagtagtttgagggcttctgcgccgtttccggcctcccgtaccagcgcgacgccctcttgcctgcgcaggtactccgccatcgttgtgcgtgactgcacgtgatcttccacgatcagaattcgataaccttccatccctcgttcctccatttcctaaaatccttgcgggttttgtaactttcccctgttttttcagagtatagcacgagtttctctcgatttgtcgttttcgtgcaaaatagaatcattattttgcattgtgacacagtaccatgcagaagcgcgccattcccgaaaaaacggggccgttccgctgcgaacctgaccgatcatgtcaaaacctcggtaaatggccggatcgctgcgtctttttcccggaaaaccgtggatttttccgcaaatcgaatttgtaacaaaagtgaaaagaaccaaaatggtacaaaatgccgttttctgttgtttatatcggcacgtatttcccatttcaaaaacgcttgaattatttgggtttatccagtcttcctatatcctctcgtgaagaaacaatgcacagaaacaacaaaaatacttcgaaacatgaaaataatgttagaattgcgtctttttttcgctaagattcagtcgtccgcccaaacgagtcctatgtcgaaaaacgacgttccagagaacgggcgttctaaagcggctaacacggcttgtcaaaaaagcgcatttacggcgctttttaacgtcggaaatttacggcccgctccgttttgcccagcggcctaactccgcacttggctatgcgcttcatctctttcagtcatttccagcgcagcctatgttctccattaagcgcaggtttcggactacgtccctttccttgtttgtccatatccgaccgcgcactgcacacgacaaagcctcacagggtattttgaggttagccggcaggaatacggctgtacaaagtgcagcgagggtcttgaccccccgccgcactgaaaaccgcattgttttccctctgctagctccttctgaatgttctcagactgtagccgtattttcgctccatcaaaacagcccgcctccttatgggaagcgggccgtcggtttcagttttcttttggccgcagggcaaagcctgtcaatgggaaggccatggccacaatcggcaggaaataacgtaagtagtcgttcaccgggctgagcatacatacgcccaaactcagcagcgccggcaggaacgcggccagccgccgccactgcccccggcggaccagatacagacccacgcccaccagcagccacgtatacgttgcgcagcagtacagcagactgagcagcggaatccgccgccagcccctggcataggcggccagcagtgttcgcaccttggacaggaagccgatctggcgggtgtggacgtagccgggatcgtcccccaaggtataggtttcgaacatcagccggttgccggcctgattattgtagctggggccctccattttggggatgaaggcgtaatagcccgtgctgccgccgaagaaggcttccgcatagcttaagggatattctgcggccatcttcttccacgtctgggcatagcgcttcagggcttccttttccaccgccgcgccctgcccggaatagcggaaggtgaacttcaccgggtcggaaatgttggtctcgtacagctccggcagcttttccgcgtccagcacccggtcgatttcggcatattcctccggggtgacggtatcgccgtgatcccgcagcacccgggcactctgctggaagcatacggaataaatacccgaggccgtctcatccggaatgcccagcgccgggatcagcacgttggaaaacagcagagcgcaggccacgcagccgcccagcgccgcagccagcggcagacgggccttgcccttcgcccccacggccagcagcagaagccccgaagggagcaccacatacagcccgttggagcgaaccagacagctgagcagtccccagccgaacagcccggccagcgccgcaggggacggggattttccctgctcccggcccgccagcacttccatggcgttcagcgcgaacagcagcagaaacgccgtgtagaaggtatccttgcagatggactgggcatacccgccgaagatcggggtcaggccgaaaaagcccagcgccgccagccggaaccagcggggcagtccccagcgccgcagcagctccatcgtccgggcgaaggcatagctcaaggccagcgtttgcagcagcatatacagggccgtgcccagattatcgctggaaaacagccgtccgaagctcagaagcgccccgtacagccccgtcaggaacaccgggtgccaggtattgatctgccgcaggccgaagtactgcgccgccatttcgcccagatcccagcagacggaaccgggaaagaaaacaatcagaaacggcgaccagcacaccagcagcgccgccatgctccccagcaccgggtgacggcaataccagcgtgccttggccggtgcttcctccacagcgggcagcgccgcgaaggtcttctgcatccagtcatggagccatgtgaagcctgccagcatgggcaaagactgccccacagcctgcaggcacaccagtcccagcgtcaggggatttttcagcgccgcccagctgtcatagctgtacagccacacgccgaaggcgtttaccacgccgaagatcagggcgaacaccccgttcgccggcgcgggacggagcttcctgcgcccgtacacggtgtgatacagcagggcaaagcaaagagccagcgcgcaccacaggtagctggcgctgctggcgggcgggtcgctgatgccctgataattttctccgctgacgataaaactcatggcgctcagcgcgccgaacgcggcgcaaagggccgcgtttcgaaaacggacgccgtttctgatttcgtttgtctggggcgccgtcatacccgttccctccggcgttggccgttgagcaggttcaggttgatctcaaacagctggcggtgttttttggccacggtgtccagaatcagcccgcacacccacaaaagcagcgccatcgtccccatcaccccgcacacgatcagcgtggggaagcggggcaccagcccggtatgcagatattcggcaaaaatggggatgaacagaatgacgctcaccagcgccatcagcgcggccagcagcccgaagaagctcatgggccggtattccttatacagccgcacgatggtgcgcagcaccttcatgccgtcggaataggtattgagtttagaggggctgtccgccgggcggtcccggtattccacctgcacactctggacgctcagattcttatccagcgcgtgaatggtcatttccgtctcgatctcaaaccccttgctcagcacagggaaggacttgacgaactggtagctgaacgcccggtagccggtcataatatcgctgacgctgcccttgaagatggtattcaccagcccctttaccagccagttgcccatattatggaagggacgcttattctccgtataataagtggcggacagacggtcgcctaccaccatgtccaccttgcgttccagcaccagattcaccatttcccgggcgttttccgccgggtaggtgtcgtcgccgtcgatcatcaggtagcagtccgcgtcgatctcccggaacatggagcggatcacgttgccctttccctgacggtactcgtagcgcacaatggcccccgcctcccgggcgatgtcgtcggtatggtcggtggagttattatcatagacgtaaatatccgcttccggcagggcggcgcggtaatccctgaccaccttggcgatggttttcgcttcattatagcaggggatcagcacggcaatggtcatagcgttccctcttttcctttgcagaaaattcgcgtattttcgctagggctattgtatcattgccgatgccgggtgtcaaaccgccgtcagaggacgtagcacagcacgcacacggcgtgcagaatgctgccgatatccacaaacacgtggaaaaccgtgtgaaaaatgggatttttcttactgccgaggccatagagcaccgcgccgatggtataggccacgcctccggccagcagccacgcgaagccctcccggctcaagcattccaccacagggcggtaggccgccacacacagccagcccatcaccagataggctgtcatttccacggcgtggaattttttatggtcgatggcagaaaacacagtggccaccgccgccgtgccccattccgccgccagcaatgtccacgccagacggggatagctgggccggagggcgcatagcaacacgggcgtatacgtcccggcgatcagggtatagatggtgcaatggtcgatgacctgcatcaccttcttccccagcgagggaatcaggccgtgatacacgctggaaaccgtatacagcaggatcaggctcaggccgtacaccgcgccggacacaaggctccacacattctgatgaacaaaggcgatccagatggacagggcaaacacgatcacgcccacgccggctcccacgatgtgggtcgtcatattggcgatttcctctttacgggtatagccgggcagagagcgctccttcaaaggcgttctagtcatttttgatctctcccgaaattcaatttttccactgacgaaagtgttttattccaagggttttggcttacgtatgtcagatttacccacggcgcagcgggccgattcccgctgcgccgcaggaaggccgaatcacgacaggtcaattcaggaaaaaaacaaggaaaatcctgaacggaaggtcgtcccccgatctttttcgcaggcgcggatttcccacggaaaagacgtaccaggatggggcaggattcagcctgaaggaggggggactccttttgctttcggctgcgaaagaaaagaaagaaaagaaagcgattcggcatcggggagttggggccccgaataagggaatgtcaaggaatgggggcagagactccatggggcttattggccccggaaaaacgatgcttcgaagcggccccttgcaggggtctggcgcgccgacttcggtgcggacggcggggttgccgtccatgggttttctcgccaccttcggtgcccgaaggtttccaaaggggaacgaagggaagacgcaaggcgggttgcccttgggcaacccggtctgcctttggcagactgaacttttcaaattaaatttgaaaagttcaccgtcatccagtggatacaaccgccgaaggcggttagcgaccggtcgttcaggcaaacaacaagcggagcgcacggcagtgcgaaccgcgccgattgtttgccccgaggaaagccttttgggcgcccgcaggcgcaatcctcctttccccgatgagggattgacgcgccgactacggcgcgggtggtggggctgccgccccgaggggggaagtactttctttcgaagcgaaagaaagtaccaaagaaagc

SEQ ID NO: 4115 - DNA, 3330 bp, Unknown
  16S sequences of unknown bacteria
cggccgtattccccgtcgtagcccggctgccggcgcacgcggccctgccgcaggcggcgcagcgcctcggccgcggcggggccggcggcgcgctccatctcctccggcgcgcactcccgcaggatgcggaactccggccccaggcgcttgagcaggccgaaataggccgcctgcacgcgcttgctcgccgcggaagcgcccagcacgtccgccagcagctccgacaggggcagaaggctctcaaagggccggctgtccggcggcgccgcgccctccggccggtcggccagcgtctccacgcggtgcgccacgccgatggtcacgcgcttgccgcagaccgggcagaggttgcccagctcgatcgcgcggcccggctccaggcagcagccgcaggcgcggtggccgtcgaagtggtacttcccctcctccggaaagaactcgaccgtgccctcgagcccctcgcccgtctcgatggcgcgcttgagcgcggaatagctccgcccgcaggacaaaaggttcgcctcgcgccccagcttgttgggcgagtgcgcgtcggagttcgagacgagctgaaaccggtccagcatggagcagcgccggttcatcggcgggtcggaggaaaggcccgtctccagcgcgtggacataaggcgtcaagtccccgaagcattcctccaccgcatcgaacccggaaaacgccccgaagagcgagaagtgcggcgtccagacgtgcgccgggatgtacacggcctccgggcacgtctccagcacgatctccagcaggtcgtggctgtccaggccgaggatgggccggccgtcgctgtgcaggttcccgatggcctcgagcttctgggacagggcctccgcctcgtccaggcccgacagcagcagcacgtggtgcaccttcctcgtgcgcccgccgcgcttgtagatcgtgctgatctcgccggagacgacgaaacgcggcgcctgcgcctccacttccgcgggcaggcgcaggtcctcgcgcaggcggtacaatccctcctccgcggggacgagggcctcgcgcagctctgcgcgccaggcggggtgcgtaaagtcgcccgtacccacgatccccaggcccttataccgcgcccagaggtccagatgcggcgcgtcgccgtcacggctggtcgcgcgcgagaacctcgagtgaatgtgcagatccgcaagaatcatcccgtttcttcctccgtcgccttttttcccgattataccaatcttttcgcgcctttgcaaacgcggacaaaaaagggcccgaagcgggagcgtctccgctctcttcggactcgccggtctcctaggcccggtcccaggtgaacgcatccgcgcccgcgcccatcgcaaagtggtatttcacaatgcccaggtccagcttggtgtaaaagccgctccctgccgtggcggaaacgcggtttccctgcagggcgaagcggaacttctgctggttcatggccgtgggcgcgagcagcgcggcctccacgccggacacaaaccattccgggaagggcggctctccctccgtcacctcgcggagggacttgacgcggtggccgctgccctgcgtctttccgtatcccaccgcgatcacggcgcagagcttctccccctcgccggcggagaaggcgctcgggaccttgctgtaggtcatggccacccagcaggtgttcaggccgatctgctgcgcccgcagcacgatccgctccccgaagtatccgcaggtctccgagaggttcgggcccttcttgccgaccagggcgatgtaattcgtcacaccgctgaactttccgtagcgcgccaggagcccggaaaaggccttgggctcgccgcagacgagctggatgtgcaagccgctctccgcgttgcaggcctcgatctcctcccgcagcagggccgcgtcctccttgcgcagcgcctcctcccgatactgccggacgctgtggcgcgcctgcatggcttccataagggtcatttcgtctttcctcctgtctgggtcattcttcttccccgctccggtcgggaagcgcctccatgatgcgcttggcgtgcgcgagcatctggatgaggccgcgcatcgcgggtctggacaggtgcgtccgctccgcgatctcgcccacgcgcacgccgccgcagcggcccatgcgcagcatctccaggatgaggtgctgccagttcgcgtcgcccagggcctgcaaaatcctccggcaatccgcaaactcctccgccaggcgttggatttcccctccgtgttcctgcatgccgcgctccctccgttcgttgaaaggtttgaaccagtataccatagcttagcgcccgctgcgcattcggaaagaaaatcgatacggttcccgtctccgcccggcaaaaaagcacctgtccgcatggacaggtgctttttttggctccccaggtaagactcgaacttacaacaccccggttaacagccgagtgctctgccattgagctactgaggaatatggaatccggcaacgttctatcctcccgggccgtgtccagccaggtactttcgacgctgaggagcttaactgctgtgttcgggatgggaacaggtgggacctcctcgccattgtcaccggaaaaggcttacacgtttgcaagtgcttttcacttgactctggtattatacccccattttttccgttcgtcaatacctttattcaactttttgcgcctccccatccaggcgcaggacatagctccagcccgcctgtgtgcgctccgcgcgccgaaagccgcaggcctcgaacatccgctgggagggcaggttaaagtcatagatctcctggattcgcagctcggaatacccgagctcccttccgcgctcgatgaggttgcgcaccacctttttcccgatgccgcggccgtgcaggtccttgcgcccgatggtgatgggcatgtcgccctgccagaaggtcacgtccccgatgggcacaaaccggtccccttctctgtactcgatgagatacatctcgccatgctcggtcaaatattggtacatcccggcaatgccctccttggaatagggcttgacctccccgtccatcggcaggaggatctccgggtcctggtaccacgagagcgcaaagtccacgccctccgcgccctcgtatttcctgaggcgtaggtccgcgtcgatccagcgcaggtccggctgcacaattcctgcaatcggcattgtcgcatctcctttgtatgcaagagcagcccatcgcaatgcgatgggctgctaaaatggaatccggcgatgatctatcctcccgggccgtgtccagccaggtactttcga

SEQ ID NO: 4116 - DNA, 21933 bp, Unknown
  16S sequences of unknown bacteria
ttctcagcgtgaccgacgcggacggcaagaccgtcaagaatgcgtatgtctacgcaaaagtgtgggatttctcacttcccgtcgaaacctcctgcaagaccgcgttcggcatgagcgcatacaccatctatacgacccacggtgtgacttcggacgaaaaccgtgagctctacaccaaatactacgaatactttctcaagaaccgcatcaacatatggggacttccttttgatccgctgaccgatgaggccgacgcattcatgtccgatccccgcgtcaacaccttcctcgttgcaggaggatataacggagagatctacggtcgtgacaagaccgacggagacatcgtggctgcttacgagaaaatctccaaaaacgaagattgggcgaaaaaggctatcttctacatggacgacgagcctacttcggaagcgcagcttgaaaacgtaaaggcaagcaaagcgcgcctcgacagactttatccgaatgcgcgcatagtcgttccggagcatgtaaactactttttcaacggcgaagatatcatgagcgtggtaatggacaacacaaccgtcctctgcccgcacacaatgctcttcctgcccacgtcgagcgaactgttcagatcccatatgtatacgcaggaatcgatcgacaaatacggtgagcttgtagagcgcacgcagaagcagcgctccgcgggcaaggaaacctggtggtataccgcgggcaatcctccgtctccgatgtgcaacataaattccgcaaacaccggaatggaaaaccgtgtgctcttctggcagcagtacagctacgacatggacggtatgctctactactcagtaaacgaatggggcagtctcaaccgccgtcatcagatcgagaagcgcggcggataccttgtataccccggcaaggagtacaagatcgacggaccgatctcatgcatcaagatcgagatcgcacgcgacggcatcgaggactttgagtatctttcactcatcgagaaatacatcggcgcggacaaggctaaggaatttgcgtcacgcatcacgacaaatgtggagacctatgtcaccgattccgaaacgctttacgaggtacgccgcgaaatggcaaagcttctcgaaagcgcaatgaaataatcccgtcggggaggcttttgcctccccgatttcttatccggattctccgcttttctcctttcagccgaaaatcccctttccgcagcttcgcgccgtccgttttttcaaaaaaatccgcattccccgtcgagtattctccgctcgcttgcgaagactttatccgagttttttcgaaaatgtattgacaacggcgaaaatgagtgatacaatcgatataaagaaataaaacctgtgagcgggagaagtacccggataaatattctcaaagagagccgcggtcggtgtgaagcggcagaatatcttcggcgaatggacccgtgagggctaaccgaaaatgcttcggcataagtaggagcgacgggagccgaccgtaacatcggcagacgtatgaagtacgtcctgttcaataaaggtggcgcacaagcacggcttttgtcctttagagacaaaagccgtttttatttcttcctacatcacaggcggcgggagtttcgccgcggaaaagaggaaagcaaatgaatccgaccgaaaagcagcttgaactgataagagaccgcatctccgcggcaaaaagccgcgaaggaagcctttactcaaagaaatatgccgacatcgacgaaagcaccgtcacgtccgccgaggcatttcgcgcccttcccttcaccgaaaagaacgagctgcgcgaaggataccctctcggaatacaggcagtgcccgacgaggagatagtccgtatacattcatcctcgggaacaacgggtacaccgataataatcccctacaccaagaaggatgtaaacgattggacgctgatgtttgcgcgatgctacgaaatggcgggaataacgaagctcgaccgaatacacataacccccggatacggtctgtggacggcggggatcggattccaactcggatgcgagaagctcggcgcaatggcgatcccgatgggtcccggcaacaccgacaagcagatcagaatgatgatcgatatgaaatcgaccgtgctttgttccacttcttcttacgcgctccttcttgcggaggagatcgccaaaagaggtgtcggggataagatacgcctgaagaagggtgtgatcggctccgaaagatggggcgacaaaatgcgtgcgcgcattgcctcggagctcggcgttgagctttacgacatctacgggcttaccgagatatacggtcccggcatcggcataaactgctgcgccgagggtccgatgcactattgggacgatttcatctatcttgagataatcgatccgaagaccggagaaaacgttcccgacgggcagatcggcgagatagtcataaccacgctgaaaaaggaaggcgcgccgctcatacgatacaggactcacgatctttcccgcatcgtacccgaaaaatgttcctgcggctcccgtttcccgagaatcgaccgcataatcggacgcagcgacgacatggtaaaggtcaaaggggtaaacatctatcccggacaggtcgaggacgttctcaaggcgatcggcggagtttcaagcgagtatcaggtgatgatagatcatctcgacggaaaggatataatgacgctctttttcgagaccgacgaaggatactctccgaaggaggtcgaggcggcggtcggtgaggaattcaaagcaaaggtcgggctgaaaatcgtaccgaaaagcgtcgccataggcgagcttccgcgaagcgagaaaaagtccacgagaatattcgacaacagatattgacatatcgccctccgcaagccggtatacccgatcggtctgcggacgggcgattttgttcatttttcgaaaaaatccaaaaagtctgtaagattttcaagacttcgcggtcttattatacagcacggcaataaaaagacacggaggatacgatggacagtgattttgaaaaggtatacaaggaatatttccgcgacgtttacctttacgtaaaacatctatcgggcggagacgagcagctcgccgaggatatcacgagcgagaccttcttccgcgcactccgcgcagccggatcgttccggggcgaatgcagcgtgcgcgcctggctttgccggatcgcaaaaaactgtcttttctcatattgcaaaaaatcaagccgggaatttgcagcggacgacgacgtactcgacttgaaagcctcttcggacgaagaccccgaaaagatcgtcatacaaaatgaggaggccgaaaaagcaaaaaaactcaccgcttcgctgccggaagtgtacaggaaggttttcactctgcgcgcaatcggtgacatgagtttccgcgagatcggcaggcggttcgggaaaagcgaaaattgggcatgcgtgacctatcaccgtgcgagaaaaatgctccgcgaaaatatggaaaacgcccgtcgggagagctgacggaaaatcaagccgtgcggattttatgcggtcgcggaccgcggaaagagggtaacaatgagtatcaaaaacgaatgtgcaatagtacgtgatctgcttccgctttatgccgaaaaaatggtatgctgcgaaacggcggaatttgtgcgggatcatctcgaaggctgcgcgtcgtgccgcgcggagcttgagcagatcggctccgggcaatccgacaaaaaagaaaaaaacgacgaaattcccgcggaaaatgacaccgctccgcttgcgcgaatcgggaagatcgttttcaaaaggaaaatgtacgccgtgcttatgacggcgctcattctttccgcgtttctcgtctcggtattcggatatctttcatctccggaatatctcccgtattcaccggatacggtatccgtcggcgaaacggcggacggcgcgctcgccgtatccttcggtgaaaacgtcacgggataccggatatatgaagaagcatcgcccgacggcgagaatgcttcagtctaccgcatcgaagcgtggacgactattctcgaccgagtgtttcttcatcccggacggcaaaatgccgtgatacgtccggatgatgccggacacacggtaatatggtttgcccagaacggaacgaacaaaaatctttccgacgacgtgcagatatacggaaaaaccgaaaacggcgggcgcatctctctgccgcggctcttcctctggtattatctgatcgcggcagctgccgcgctcgtcattcttctgtcggcgtctgccgccgtgagaaagaaccgccgtctgtgcgcacaaattctgaagatcgccgcacttccggcatcgtatataatctctcatctgtgcatcaggggcttcggtactttgtcgtactcggcgaatcgtgatctgtttctcattctgataatcacctgctttctttactgcgccgcgcttctcgcaatcggggcggtgcagtcgggacgtgaaaagcgcgagagcctgtcattggcggaaaatatccggtcttaagccaacgcagccaaaaggcgaaggcaagacttcggcggtgccgcggctttcacggatcatcttgtgtgagcgaaaaagcttatgcaagccaaacggttcaaaataggatttttcagatgaaaaaacgcggtaacgcacggtcgaaaatcaaagagaaaaacgcccgtgtctgcgcatgatcgtccgtgcatccaacgcagtaatatacggtcgagaaaacgcccgcgcgcctccgcagtcgaaaagcgccgtaaacagcggcgagttctccggattacgttgtttttacaactctgaaaacacccattcacacggagaaagtgctgttttgggcttgccggacgtctcgtgacaagcttaccgcctgcgccgccgttacctctcatgaaaataagactgcaagctgccgctttgcgctatcgtgcacggctccggggcggagtttttgcgcatgtctctgctgcccgcgggaccgcagccaatgaggaaatcgaaagagaatacgagatatcacacaaaccgctcacatgacaaaaactttacaaactcaaaatcctgcggcacagccgcaggctttctcttgcatactttacgttttgaaaagcgtttacccttgtgttgattaatccccggacgtcacacacgctcggcgccgccgcaaagcttcatcgtaaactcgcacacgtcggcggcggaattcggacggcgaagaatatctatattgcggagcatggcgtcaatacgctccggatttttgaaaagagaatacacaagctccggcacggggcaggtgctcgatgccgcgacagccgcgccgttattcagaagaaaagcggtattccggctctcctgacccggtatcgggtttacgattatcatgggcaggcgctttgcaagcgcttccgaggtcgtaagtccgccgggcttcgacacgataagatcagacgcatccataagctcgtccacatatccgacaaatccgagattaagaatacggcggaccgcggacggcgcgtatgcgttgattttattccgcatatcctcgttgtttccgcaaacgcagattatctgaaaatcctcgccgatatcgagcctgtcaacatcccttaccgtctttgccatatgcccgtatcccatcgatccgcccattataagtatggtcttcatcgcgggatcaagcccgtgcttcacgcgcatttccctcttcggctgagatctcgaaaacttctcgtttatcgggatcccgagcgcaagcacggacttttcgtcaaatcccttctgctttgcctgataattcagcatcggactcggcgtgatgacataatcgcacatgaggcactcctcccaataagggtggaaaacaaaatctgtaagcacgccgatcaacttcgccctgacggtgtgccgctggcacattatatccattatcattccggcgaagggatgagtgaagatcacggcatcgggcgcgtagccgtctatataatcgtaaagatcatcggaaaaaagcgtattcacgagacgcgccgccgatttttcgcccgtgccgccgcgtcgcttttcagccatgcggtaccctgccccgaaggcgacctttaccttgtccgacacaagaagatacccctcggagatcagcttggcgactgccgggctgacatatctgtaggtatcgagtatgctgcattcggtgccgtgagcgtcaaaatacgacttcatcgcgcgcgcggttgaattatgcccctctcccgcagttaccgacattataagtaccttcatcccgcgatcccccaaaagtaatgttatcttattatatacttttttacccaccgtgtcaataaagcggcgatgtaaagtcgggataggcgtaaaatcaggcaaagaaaagccgcgcaaagaagagagacacgaacagcgaaaacacagcaaccgcggctgccgccggaaaggcgtacagtgtctttttcactctcgtctgagaaaaatagacaaaaagcacataaacgagagtgtccgagcttcccatgatgaccgccgcggcaaacacctcaaacgaattcgccccgcaatccgacgcaagcgatgcaaatgatgcatttgccgccgcgcccgaaagaggacggctgattatcagcggaaaaagctccgacggaatcccgagcgcccctccgatcggcgatagaaaggcggagatcgcctccgccgctccgctcgcacggaatgccgctatcgccgagcacaggagaaccattgcgggaacaagtccgaccgcgcacctcaatccgtcctttgcgcctctgataaacgaagcaaagcagtcccttccggggaaaagaaacgcggacgacgacagaagaaatacgatcggaatgatgaacgaggatacatactcagccatggcgttttactcttcccgcagacgacagtgcccggcagagaagcagcgcaaaaaggaatgtcacagcagaggatatccagacgggcgggatcacggaaaacggtgacgcatgtccgaaggacgcgagaagcgttacaacggtagtcggcatgagagaaaacggcgccgtcccgagcacggcaaagcagatcatgtcctgacttgcacgcgcgggctcgggattcataagatcaagctcgttcatagcgcggactgcgagcggggtcgccgcatttccgatgccgagtatgtttgccgctatcgcggcgcagacagtctcttccgtctttttcccgtgcaccgacggaaatgcaaatcgcataaacggcgaaagaagcttcgacagctttcttacggctccggcatcgcgcaggacctcaagtatcccgcaccaaaggcacatcatgcccgtaagcgatatgacaagttctaccgctcccgcagctccgctcagtaccgcagaggaaagcgatgccatccttccgccggtcacggcaaaggtaaatgagagtaaaataataacaaaaatgtatttgcctatcatgaaaaatcccctccgctgaatttttgttgaaaaagacgaaaaatagttgcaaatatattgctttcaggcattgacatttatcgaattcaatggtaatattatgcatggtagcgaaatatgctgccttttggaaaggaaggatataaaaatgaagtcactcggaatcgttcgtcatatcgatgacctcggaagagtcgtcatccccgttgaaacaagacgcaatatggatatcaaccccaaggatccgcttgagatgttcgtagacggagatcagatcatactgcagaagtatgagccgtgctgcattttctgcggagactccaaagacgtcatctacttcaaggacaagaagatctgcagcaaatgccttgaagaactcaaggaaaaagcataaaaacaaatatcggcggatttacataaccgtttattcggcggacaggtcccgtacctgccgccgatatttgctttttcgggaactttgatgtataatggatacggttttacataagcgctccgtcatcgaaatcgcagcggagctgacagcgccgtttatttttacggttcctctgcccgtgtaccgaaaacggtacacggaaagtgatagattacagttgattatattcgcattctgcgccgtctatgatcggcaaaatgccttttcgcaaatatgttgcacagatgaaagaatgccgcaccgaaagcggacggaggtatgccatgctgtttgatgttctaagatcgttcggagtaagacgcgcgggttttattccgctcggagatgcagatcttatatccaaaagagaatacggctttcccgaggatgcgtttgtcatatcgttctacctaccgtattacacgaacgtaaagtcaaaccttgcgaatttcgcctcggcgcgggattaccaccaatattacgccgagctcttttgcacctgcaaaagctttatgaacgaaaagcaccccggacgctatttcaggggatttgccgacgtgtctccgtttgcggaagtgctccttgccgccaaatgctcgctcggcgtgataggtgatcacggtatgctcataacgaaggatgcctcatccttcatagttctcggcgaggccgtgtgcggtctttccgaggatgagcttctcgccgaaggcatttcaaaaggcgaaggcaaggtcggaggatgcacccactgcggagagtgccgtaggcagtgccctgccgatgccgcggacgacaaaagccgatgcatatcctcgataacgcagaagaagggcgagctttccgaaagcgaaaaggacataatcaggaaaactggcatggtgtggggatgcgatgtctgcgccctcgcctgccccgtaacgaaaactgcgatgaaaaacggcactctcgagacggacatcccgtatttcaccgaaggacggctcggcacggtcgatgaagggatgatctcctcaatgagcgacgaaaaatacgaaagatattcgttttcgtggagaaagcgcgaagtgatgataaggaatatccgcatcgcgtccagcacggatttcgaaggagaaaacatatgataaagcttttttgcggaccggaaagcgcggagaaaaacggtctcattctgaaaatgatatcggagtcatgcgcccgcgcgatcgatgcttcaaaggacaaagacaccgcatcccgtgacgcactttccgaaatcgcgccacagcgggtatgccttatagtccccgaacagcaggcggtgatatgggaaacgcgccttgcgaaatccgtccctcccgaaagcgcgcttgtgctcgacgttgtgagcttcacccgccttgcgaatcttgtaaagcgtcgtttcggaggtctttccttcaacagcgccggacgggcggatcgcgttctgctgatgtggaaggctatcgcatcggtcgcgccgcttctgcgcgtattcggcaatgaaaagaacagcgcgcggacagtaaaaataatgcaggaagcacttgacgagctgcgccgcggcggagtcggcgccgaggatgccgcgcgtttgtccgacatattttcctccgaggaagcgaccgcttctctctcggacaggcttcacgatatatcgctcgtcatggcggaatacgataattccttcggtgaaagcttcgacgatccgggagcggagccggagcatctgctcgatacgctgcgcaggcgcgatttcttctccggatacgatgtgtatgtggattctttttactcgctaaccgcggtcgaggaaaagattgtgcgcgaaataatacgtcagtccgacaatttcacgatgaccttcacctgccccgctgggggaaaggttccgccccatctcggtgtggcgtaccgatttttcctttcggtgaaagaattcgccgcccgatgcgaggatgttgaaataaatgagatcacgcccgatgcgtcaactccgtcggcgtatctgcgcgatcatctgtgggatttttccgcagagccgatgcgcggcgaaaaggatttcgtttcgtttgtaaggtgcgccgacagatacgatgaggctcaggcggcgctctgccgcgtaagggagcttgtcggaggaggtgcggattattccgacattgcgatcatcgcacgcgatgcgtcaacgcgcaccggcatcctcgacgccgcctttgccgacgcgaatattccgctgtcggtatcggtgaggttctcgctttcggattctcccgccgtcaggttcgttcaggcagccctctgcgccgtgaaatcatcctttgcaagggaagatgtctgcgcattgcttcacagctctctgacgcctctgagcgcggacgagcgtgcggcgttcgagcgctataccgagatatggaacatctcgggaaagcgcgcgtatgagaaggacggcggatggacgatgaaccccgacggattttccgcctcgttcactccgagagcctcgcgcgagcttgagcttgcaaattccgcgagagaaaaaatatgcgacatgctccttccgctttccgaagcattcaagaacgaagcgtgcgtaagtgatgttctcacggagctttggaggatgctcgtcggtgcgggcgcatatgagcggctgcgcgaaaactgcgcgcgtcttgcggagaacggataccgcgatgccgccgcattcgggtatcagtcatggctcaagctgactgaggctttcgaagcggcggagcgcattctcggagatatcgcggttgacatttcgacatttgccgatcttttttcgctgacgataggagcagaggatgtcggcacgatccccgccggaataaacgaagtgcttttcggtgcggcggatcggataaggaccgaaaacatctctcacgtcatactgctcggcgccgtagacggcgaatttccgggagtgccttcggagagcgcgctctttacggaggttgaccgtatccgtctcgagggcgaaggggttgtgctttccgacaacgaacgtgaccgaacggaaaaggagctgttctggttctggcgatgcgcctcgctcccgtcaaaaacgctctgcgttatgatcccggaaagcaacggggtgcgaaaaaccgaagcctcaacgggagcgcggcgcatcgccgggcttttcccggacgcaccggagaattactttgatcccgacagccccgccgcggctctgtgggatgaaaaggattccgcatcgtttattctctcatgccggaacgagaaaatacgctcggcgatactcgccgcctctcccgaagccgggctttcactcactgcggcgcgcggcgacaccgattggagccgcatatgtgccgaggaagccggaagtattttcggcgatcgcataaagctcactcaatcccgctttgaaacgtaccggaagtgcgcgttctcatactacggaagatacatactcgaccttgacgaacgcgaggaaaagcatctttcccccgtcgatgtcggaaacttcatccatgccgttcttgagcggtattttaccgaaacgaatgtctcggcgcttcctctttccgaggatgaaaatcttcggcttatccgccgcctcgtttcggaatacaccgacggcatattcggcaccgctgttacgccgaggatcagatacctcctcgatcgtctcgaaaagagtctgctcctctttacgggaatgctcggagaggaattcgcgcagagcgatttccgcccgttcgcacttgaacagaaaatcggaatgggggacggcacgcctcccgcactttcgatcccgacgggggagggctcgtccgtcgagctgcgcggcattatcgaccgcctcgacgtaatgcgccgcgacggtaaagcatatatccgcgtagttgactacaaaacgggggcgaaaaagctttccgaccgcgatatggagctcgggctgaacatgcagcttttcatgtatctgttttccgtgtggaaatgccctccgtgcgaattccgcacgaggcttctcggcaatgccgaagagatcgtgccggcggcggcgctgtatttcagcgcgcgccccggtgaagcgctcagccccgacgatcccggggagcgcgcgcttgaggttgccgcctcgtctgtcgtgcgttcgggacgctttctcgccgacgaagccgttctgcgcgcgcaggatgcgcagctcgagggaaagtatatccccgtcaagcagaacaaaaacggcgaattttcgtcgaatgtcaccgatcttcggggatttgaagagcttctgcacgcgctgtgcgagcggatatcgtcggcggcagaggaaatgcgaagcggaaaagccgatgcgcttccgctcttttacgacggcggcgtgccgtgcagatactgcaagctgcgtatgctttgcagaaataccgacgggaggtgcaaatacagatgagcagcacacggacatggacaaaacctcagcttgacgcgatagagcaccgcggaagcgatcttcttctgtcggctgccgccggttcgggaaaaaccgccgttctcaccgcgcggctcatacggcttctcacctcgcccgactcggatgtaaagccctccgaggtgctcgccgtcaccttcacaaacgcggcaagtgccgaaatgagagacaggctcttctccgccgcgctcgagcttgtgcggaccgatccttcaaatgcccgcgcaagagagcttgtcgcgtcgatagcctcggtgaagatatgcaccatacacagcttctgtctgtctgcgataaagccttattttgcaaggctcgggcttccttcggactttcgcgtggcggacgaaacggaaagcgagatactgcgccgtcaggcgatgagcgagactgtctccgaatatttcgattcggtcacggacggcggcgagaacttcgtttttctcgccgacactcttctcacggcgcgagatgaaagctcgcttgacgagatactcctttcgcttgcgagaactctcggcgcaaagggggttggcgcaaaggagctttcggcatatgcagaaaatcttgaggcgatccgaccgggcacgttctggagctcgtttgccgccgagggaatccgcgaggacctgcaccgtttcgcttcattctactcggatgtattcaatttctaccgcggcaatctcgccgaaaccgaagcggtatcggcgaaatatctcccggaatgcgaagatctgtattcgctcgccgaacgtctgcaaagtcttgcgaacggcggagactacgaaatcctgcgcagtgcaatgtgcggtcacgtttttcctcgcctgccgtcggtgaaagcgcaggatcaaaccgacttttccctcgaattcaaggcgtaccgcgatcttttcaagaaggaattttccgcactgcgcgacaagtttttctcctccgacgaagcggacatcctgcgcgacgcacggcgcaccgcatcgctcgaacgtgcgcttgccgcagttctcggaagcttttcggcgcgcttcacggagaagaaacgcgagcgcggaattctcgatttcaacgatatcgaaatcaagaccgccgagctgttcatcggcagtgacggaaatcccacgcccgaagcgcaaagcgtcgcggaaaagtacaaatgcattttcatcgacgaatatcaggacacgagccgcatacaggatgcgatcttccgtgctatttcgacaggtgccgaaagattcatggtcggagatataaagcagagcatctactccttcaggagcgccgagcccgagatattcgcaaactaccgcgaagccttttcacacggcgacggcggaagctacatattcatgagtgacaacttccgctcatccgaaaacgtgatccgatttgcgaacgccgtatcgggaaggatcttcccgttcggaaaaattccatacaccgaagaggacgagcttcgccgttcgagaaatatgcccgacgcggacgaaccgtgcgagcttgtgcttatcgacaaggcaaagcgctcggaagatgacgcagaaggcggcggagatacggcgttcagcgaagccgagtataccgcgcggcggataaaagagcttctcgaaagcggaaccaagccggacggcgcgcccgtccgccccggagatatcgcaatacttcttcgcacgaacgcgggaatagacgaatactcatccgcgcttgaagcgctcggcatacggacgtgcaaaagcgtgaaaagcgacattttctcaaagcccgaggtgatgacgcttctgtgcatcctcaacgcggtgtcgaatcccgtgcgcgatatatatcttgccggcgcgatgaagtcttgcgtgttcggatttacgctcgacgaaacggtaaagatacgtcttgcctttccggactgcccgctttactccgccgtgtgcgcgtatgcggaaaacggtgacgcgctcgccgaaaagtgcgcctccttcatatccgagcttgacgcgatgcgggatcgcgcatcgttcctccccgcgggggcgtttgtccgcagcgtcataaaaacgctcgatctcgaggttcggctgtccgacaaaaaaagaagcatccgcacggtgcgccgcagtctccgcgagcttcattctcttgcggtgcgcgccgggcagagcggattctgctcacttttccaatttctccgctataccgaccgcctgatatccgacccttcgccggtatctgccgcgcaggatgagggcgaggatgccgtcagcataatgagtatccacgcctcaaagggacttgaatttccgatctgcttcctctgccgatgcagcgcggagctgaaagcaaaggatgcctcggaaagcctcatgttcgatcccgtgatcggcattgcctcgcgcctccccgaccgcagcggtcttgtgcgatgcgacaacgttctgcgccgtgcggcagccgccgacataagcagaaaggcgctcgaagaggaaatgcgcatcctctatgtcgcaatgacccgtgcgcgtgagcggctgatcgtcaccgcagccgtcaaggaccctttcgaatatgtaaacggggtgcgcgccgcgcttcgtttcgacggtgaatataccgtactcggcgcgtcaagctatctttcgtggattcttccggcacttctctccgacggcggatgcggtgcaaagcttgtattcgccgaatcggatgaggaaaacgtcgtttccgatgagccgatcaaaggggctgacgatgcggtagcgaaagaagaaaattcggcagacgatcttcgggaagtgctcggacggcgtttcgcgttccgatatccgaaagcttttctctccgccgtacccgccaagctgaccgtatcgcgcctttatccggaaatacttgatgaagatgcggcggcggaagcggactccgtcggggaaagcgccgttgtattcgacgacgaagcccccgccccgggatttatctccggaaaatccggcgttcgcggaagcgacatcggaagcgcgacgcatgtgttcatgcaattctgcgattttgaacgcttcgcgcgggacggcgccgaagatgagctttgccgcctcacggatgacggatttatcagccgcaaaatggcggaaatcgtcgatatccgtgcgctcgagcgatttcgtgaaagcgcgttcttcggtcggatgaggcgcgccgtgcgcatggagcgcgaattccgctttaactcggcaagggcggcgaaggatttcaccgccgatcccgagctgaagaagctgcttgaagaaagcggaaccgagcttatcgtccagggtgtcgttgatgccgtattcgaagaggcggaccaaacgctcgtgctcgtcgattacaagaccgaccgattcacgcgtgagcagcttcgtgatcctgcagagtgcgagcgcattctcaccgaacgccattcaaaccagctcacctactaccgcgacatctgcggcgagattttcggaagaaagatcgacgagacatacatctattctctctcgctcggcagggaaattcttatctattgaattttcaaaatatgaaaaggcagcgccgccgaaagcggtgctgcctttatttatgcggttttggcatcagtcgtaatagtaatttgccttgcagtcctttacgcttaccgcgttcaggagctcttcatcgacgcttatctcgtcgaaatgggacgtgatcatcttattgtaaagatcgtccgcgacggaggtatcgaagtcgtcaaagaaatccgcattcgcttccgcggaatacgccccgtcatcaagtgccgcgcgcttgatgaagaaagtgccgtaggtgtcggaggtgtacttcatccattcaccctcttcgagggagaacgctttcgtaacgatatccgcgatgtaatctccagccgaggtcagcgaaaaatagtatccgcccggatagtcggtattttccgaataatcttcgtaaagctccgaaaaatccgctccgtccgagagcttcttctcgatctgtgcgatcttctccgccttttccgctttctctttatccgtgagggagcgcttcttgtacgaaccgtcctcgtttttctgatatgttccgtcggagtcctcggcgtaggcataagcatcgtttacgttgatctgataaaacctgacgtaattctcctcataatacgcttcgcgctccgaatccgtaacgggagttttcccgttatccccgtagtagtaatcgaaaagatcggacgacttctgctcgtttataaacacagtcctcagaatattcagatttatcccgaattcggcaaggttcgcattcatcgtcttgcggcttccgtccgcaagctcctcgacaagcgaatctatatatgagtcaatcttgtccttcatgctgtccgacatcgtgagcccgttctcggcgtacagcgacattgcaacgagattcgagcggatattgtcgcggataagtccgtttacaagctcctcgttcgtcttttcggatgaatcagagatcttctcgttccaatacgatgcggtatcctttatatccgtataggttcgaagatacctcgccttgtaggttgacatccaatacgcataggtcgcctcgtcgatcttcgcatttccgagagacataacggtctttccgccgcccgacgaacacgaggtcacaagaagaagcgcaagcgccgcaatcagtgaaacgatctttttcatataaactccgaatttttcgttttggggctgccgcacggcaccgcccgaatatattttatcatcgctcatttcccgaatcaccgcgaatttgtatatatttctttaacaaatcgacgcagaaatcgacgactccgaccttcggcggaagcttaacggtcgcgctcggctcgggattcagtcccacgcggagcattcccttgccgtattccgcggcaagcctctgccacagcgcgggatcaaagctttcgggcacgaatctgaccgtaccgtcgatctgggttatcttcgtcattcccgccgagattcccgcgcctcggagtcttgcgatcctgcacagatttaccgcgcttctcggcggctcgccgaatcggtcgcaaagctcgtcgatcagatcctcgtaatcttcctccgtcgatatcttcgcaatcttcttgtacatttccatgcgctgcgccgacgatgtgatatagctcttggaaaggaatgcgtcgagctttacgtccaccgtacattcgcgcggcgcggcgaccgtctcacccttttcctccagaaccgcttcggaaagaagctttatatacatatcgtatcctaccgcgtcaaggtgcccgtgctgctccgcgccgagcagatttcccgcgccgcgtatctcaagatcgcggagcgcgatacggaatcccgcaccgaacgccgcgtactcgcgtattgccgaaagccgtttttctgcgatctccgaaagcgtcttgtcctgacggtaggtgaaatacgcatatgcgcgccgcgtgctccgtccgacacgtccgcgtatctgatgaagctgagaaagcccgtaccgatccgcgttctcgattatgagcgtattcgcattcggaacgtccactcccgtttcgatgatcgtcgtggacacgagcacatcgatctctccgcggacaagctctgcccatatttcctcgagttcttccctctccattcttccgtgagccacggcaatgcgcgcatcgggcaccatgctctcgaccttcgatgcgatcttgtacacgccctcgacgctgttgtacagatagaacgtctgtcccccgcgccgaagctccttgcggagcgcctcggcgatcacggcatcgtcgtattccataacgtacgtctggacgggagaacgcattcccggcgcctcctcaagcacgctcatatcgactataccgcccatcgccatgttcagcgtccgcgggatcggcgtagccgtcagcgtcagcacgtcggcgttggctgagatcttcttcagcttttccttctgcgcaacgccgaagcgctgctcctcatcgattatgacaagtccgagcttcgcaaattcaacgtcggaggatatcagtctgtgtgtaccgacaattatatctgtctcgccgcgcttgagcttacgcagcgacgcctcctgctgctttttcgtgcggaagcgcgacaccatatcgacggacacgggaaacgatctcatgcgcgagagcagcgtctgataatgctgaagcgcaagaatcgtcgtaggcacgaggatcgcggtctgatatccgttctccgccgctttgaaagccgctctgagcgcgacctcggtttttccgtagcccacatctccgcagagcagacgatccatagggtactcccgctccatgtcggctttgatatcctcaaccgcgcggagctgcccgtccgtctcttcatattcgaacgaagcggcaaattcggcggacatttccgaatccggagaaaacgcgattcccttcgtgcggcggcggcgcgcataaagctcgatcagctcctttgccatttcgcggcttgccgcctttgccttcgtctttgcgcggttccaatccgcgccgcccattttggaaagcttgactcccgcgctgtcagacgaagcgccgatatactttgacacaagcgaaagctgatccacgggaagataaagcttatcgctcccggcgtaattgatgaggatgtagtctctcgacactccgccgacgctcagattttcgattccggcatactgaccgataccgtatgcctcatgcaccacataatctccgggattgagatcggcatacgacatgatcgcctcggtggagctttttttgaccttgccgcctcttctctttctcattctcgaaagaatgcccctgcgttgggacgacgacgaaagatcaaggaaggcaaagcgcggcgagtcaagctcgaatccggcgaaatattcgcccgtcagggtgacgatcggcagagtcttccccttcttggagagatattcgtcgaatatctcctcaccgtccccgtcgccggcgcggacaacgctgtacccctcattcacgagaaggcgcgccgtctgctcctcctccgccgcggtcgagcagagcacgcaggcaagagtatgcctcgattcatacgacgcgatatcctcgagcagtctctgcgtatttccctcgtatgcgggaatgtggcggctcggaaaatccgcgcttataccgtccgcgctccgcaggaaggtgtccgtgatgaccgtcggtacgtttaccgaaaggcggtctatttctgacatatccttcatgtaagcacctgacgttttcgcaagctcgccgctctccttcatgtcggaaatgctgcagtcgcaaagcgtaaatgccgcgtctgcgcgctcgcggcatgctccgtccgacacgacgattatctcgtcggcgtaatcggtgaggcagcagccctcgctgaatataagcggaagatatttgtccgcaaagttcacgtcctgcgaattttcaagcgcgtcaagctcggcacgaagtgtctgctccgccgcgcttccctttacacgcgatatctgtcttgtcacgctctcacgcaggctccgccgttcctcgtcgccgaggatcacctcaagcgtcggcggtatttcgatcgagtccgtctcctctcccgtaaatctctggctttcaagtgaaaagtatcccatgcggtcaacctcatcgccgaaaagctcgatcctcaccggatgcatggacggcgcgtaaatatcgacgatcccgccgcgcagcgcaaactgcccgcagctctccaccatgtcgcatctgcggtatcccgcgccgttcagccttatcgcaagctcatcggtatctatcggtgaattgcggtcgaggcggatcgtccgcaccgcaagcttctccggaggcatcgtaagctgaaatgcggcggcgggcgttgaaacgacggtgaagctgtcgtttttcatcatccgataaagcaccgcaagcctctcatgctcgaattcatgggaggcaagtatgttgttgaagttgtaatccctcgcaggatagaacgcgcattcccgatcgagcgacgatatgaaggaggctgttttccgtgcttcggcatcgtcgggacacagaataagcgttcgtctcggactgtcggaaatcgccgcgcagaacagcggcagcactccctcgcagagtcccgacactcttatcggacgccgcctgccgggaggtgcgcttttgttcatgctctgccgcacgaattcggcatccggagaacgcagaaacgcatttacgagaattttattgttcatgtatatcgaaaaccgtgcctttcatcttttgcctcggatttcccgggcgtcaccggagattacgtaccggacgcactccgtcggatcggttccgcttcccgcgtggtcgcgacacatttaagtcatttgactaaaactcgtccgttcgcccggaatcccgtaatatctggagatcgcgagggatcacgctttgccgttatatttcgacatcgcatcacttatgcgtttgtctaacacaagcggaagcgcgtcgttgaccttttcaaagcacttcatcagcgcctcctgatcctccttcggaaaaactccgagaacccatgccgcaagatcgtaatcctttgagggcttttcgcccacgccgattctgaagcgcgggaaattctccgaagaaatatgtgaaattatgctttcaagtccgcggtgtcccccggcgctgccgttttcgcgtatgcggagcgttcccggagcaagatatatatcgtccacgatcacggcgatgttttcgggttgaatcttgtaaaacgacgccgcctccgcgatcgcctcgccggaattgttcatgtatgtttccggcttcatgaaaagcacgccctttgcgcctatctttccctcggcgcacattgccttgaagcgcagacggaattttccgagctcgcgcttctgtgcgatgtagtcgatcgcaagaaatccggcattatgcctcgtcctcgaatatttctcgccgggatttccgagacccgcgactatataagatattcccacagtgctcttttcaccgccggaagatatttttttgaaaagatcgaaaatatcagccatgcaaactccttcggcacgattcgccgtaacgcaaaatatccgccgttttcgttttcgcggcggtcgtagaattattatctttattatacctttttatgctcgaaagttcaagagcgattttataaaaatccgtatagtttttgtgactgcgctttcctcaagcggaaaaatccatctgcatttcctccaggcatcgccgaaattgtaaaaatagcattacaaaacggaaacttttaagattctctcttgtattattatctttattacattataatctatattatacagatatgaattcacacatttttcgcagcacggaataaatccgtccgttctgcgca

SEQ ID NO: 4117 - DNA, 15637 bp, Unknown
  16S sequences of unknown bacteria
tacatttatcaaggaattagagagaacaggataatgagtatagcaaaggatataagagcatatattgcagaacagtttacaacgacaagaaggacgagcctgaagttaactaatgattatgtattcaaggcagtattcgggcaggataatgacaggtcaaaagaggcactgaagatgcttctcaatgtgatacttgacagaaaaaacgaccctataacccgcatcagaatacttaaccctataatcataggccaaagtgatgcgagcaagggaggcgtttgccgtagagtaccacgcactgaagtgctgtactcctgacagaggacctgccgcagctcatacctcgctgggctaggtctctctggacattatggcagaaacccagaacggactcatacttgatatcgaagcgcagtcaggaaattttaaggagtactccaacagggcgcttcgctatgccaatgcgctgctggaaaagtcattgaagcgcggtgatccgtatgatacaatggagaaaagcatagttgtaacaatagcagacggcaagccttacagtgctaccggcagactgcattgtatatttgatatcagggagagagaaaccggagtacccatgacggacaggctaacactacgttccaacagacaagctgttgctgtccgttttgcctagccaagcatagcttggggcaaaaaggcggaatttcactgcgtgcagctgggatttgtagacgaaacaaagcctgtatcggaactcagtcctttagagcttgttgcagcatatcttaaatatgctgcggacgaggataaggtggggtataccagtgaactccttgaatacggagaggggcttatagatatggcagagaatatattcagagatgttactcttgatgagagggcgtggattgagaagaggtcaagagagctggcggagcatacccgcgctactgagatgcaacaggcaagggaagaagctatggaacaaggtctggaacaaggtctggaacaaggtctggaacaaggcagaatcgagggatttgctgagggtgaaaaagtcggcgaagaacgtggtgaagcttccggcagagctgcagtagccaaagccttaaaggacaagggggtcagtattgatataattgctgaagcctctggtttgtctgtagaagaaatagagaagttgtaagcaggaaatagactgttaaggtagtcagagcagctataccttatattaacaagcagattgaatgatatcgaataatattgagtaacattgaacaggcaattcactttgttaaggtggactgcctgtttttttaggtctttaaaggctggagagggagaggaagatgtcttggggactaaatgactgtgagaaaggcaataaataagataataaataagatgtatttccatattaacaaggtaaattcatatcaaaaaacctgctttaaaccaaaaaaactaaccaatggttaatatcttttttaaaaaaagtattatataatcccttgacaaagtaaatttaagaggagggaggtttatgcgtataagatatattgacagtgtaaaacctcttgaagactacattcttcaggtggatttcataacaggaagcagactgcttctcaatatgaaaccgtatcttgacagtctgcggttcagaccgctttgccgtccgggagtgtggcagagcgcccataccaatggggtgtttgtatggtttgatgatgttgagatgagccatgatgagattatgattatggctgagcagagtaaaataacttagttaaggaaggagagttgaggatgaaaaaaaggatattcagcatactactgtgtatagcagtatgtatggcaatgatgccccttggggtgtatggatcagtttgcgaggttactatagcaggtaacagtgtgacagagtatgatactaatattactggggcaggtataagtactggaagtggcggatatgtacgattatccactgatagcagtaaaaacgttagaactctgacactaaagaatgcaacgattacgggtactattcaaattacaggcaatggtacagctgttattgagcttataggcgagaatacaatcacagcgaatgcacaaggaattaggtcaagtgtaccgttgacgattaaaggcaacggttccggtaagctgacggtcattggaactccggtagctggggaacctttgggaataaggtgtgatggcagtttgacgtttaaggatgtagaggtagatgtacagaagaatgataatagtgtggcaggcatatacgccgatggtattttgtgcaaatctggtgatattacaatagagaacagtattataaaagcgcagccaacaagcagcaagagtggaattaaagccaataatggtgttattattgccgaggatgcaatagtgaataagagtaatttcacatcaggaacaacaaaagatatagatggttttgtttctatcgacaataaatttgataaatatgatatatgggtaacagatgtgcgggtaacctcaaggaatgcaagtgatgttttaggaaatggaactgtttcatatgattatgctgcaagaaccctggcgcttaataatgcgaatatcagcggatcttacagtcagcctgagggatatacttcttataaaaactggggtgccataacatggctcagtaatactggcaaccagtatcttaagattgagctgaaaggtgcaaattctgttacaaataatatgcttgacggaatatgtgcatatggacgttttgatatagcaggcgacggcaaccttactgtcaacggaaaagataacggcatatatacaagcggaaaaattactatagcagccggggacggtattgatgttaccggagaacagagcggtatatccgcggcgcaaaatgttaatattgaaagttatgtgaaagcaacagcaacaggtgaatccgggtatggtatttcttcagcaataaatgttgatatatctggcaaagtagaagccaagggtactgcagctgcaatttcagcagcaggaagcattagctgcggtaccgaggagatagaactggagaacggtcttctggctggtgacaagaagatgctcgcagtaaaagatcctaatgccaacaatggctatgcagctatcagccctataaattatactctctactataatgcggccgatggtaaaatgtacaaatcgtatgatgacacatctttcaaagatgaatttacaaaagataagaatactaaatggagcagcgaacaatcaacaggaaccggctattatgatattttaaaactggacaactttacattcgaaacagctgcaggcaccggtctgaagattatcggtatagatgctggtaaaacattcactatcaaaggaaccggcgagaaccatatcagcgtttatggggataatggatttggtatatatacggacggcagcctgaattttgacggcggcagaatgtatataaatgtcaaaaaagatgatgctaaaagcaaagctgtttatgcaaatgggaatattaatctgactgattgtgagctttatgatggcgctgaacctgatagtgatggcgaaataatatcggaaagtccgaagggtattagtgcaggcggagcacttgttatagaaaacgcagatgtcagaacaaactgcattgaagcagcgggaggaatctcagctcgtgaatatatgcagataaaaaatttaaacgttacagaaaaaaagggtacgagtgttacgaaagtagaagctgcaagtagcgagaaacttttgactatttatggtcgactgatagctagatttgatgtgaacggcggtaaatggagcgacggaactgatataattaaacctgtaccggtaagcttggatgaaaaccgttatataatactcccggaagaagatcctgtcagggaaggatataattttacgggctggttatacaaggacggcaagaagctttcagagaaaactgagtacaaaattactagagaaaatctatttccgaaatctgttgatgtttatgaggaattcgggtattgttatacattttatgcccactgggaaaaagcctcatcaggtggcggagcggttattccacctgcagcagatgatgatataaagacaacaacagacagcgctacatcagaaacaactacaagcactacagttaaggatactaagactgaaacagttaagaacgaacagggacaggacatctcaaaagtaactgcaactgtatcagaaaaggtggcagataagctcgttgatgcggctgtttcaaacaagtcagatacagtggaaatcactgttaagtcaaatgacggaaacaaggtagaacagactgaggttgaaatccctaaaaaagcattagagtccattgcaaaggatacaaatgctgatttagtaattaaaaccgacagcggtcaggttactttggataacaaggcccttgaaaccatagcagaagaagcagagggtgatactgttaagattactgtgaatgaaaacacacagttcaaggaagaacaaaagcctgcacttgatgttataggcaaaaacggtaaactgtttgacatcaaagcagttatcggcgatagaactatccacgactttaagggtggcaaggcgcacgttacactgccgatgcctgagaaactaaaaggcaaggacatagttattatctatatcaatgataaaggtatctgcgagatattaaatcacactatggaaactgtgggagcagagaagtatattaaattcacaacatcacacttctcaacctttgcagtagtagaaaaagcagatgcagagaaaatcatagagaagcagaatgctgataagataaattccttaatcagggaagctaaactcaaagcaaccacttcaaagacaacaaagaagagcattaaggttaagattggagaggctaagaactcaaactgcctgattaaggaagctaaagctatgggatatactgttaagtacaaattctataagtcaaccaggaaagcttcaaagtacattgctcttaaaacaaaggacactgacacatatataaacactgccggtaagaaaggtactaagtactactacaaggctaaggtgcttgtatatgacggcaagaatctgatagcgcagactgaattaaaacagtgcagatacggagtaagaagctggaataagtaaattaaccgaagcaaggtaagttaatgtatttcatacattaataataagggactgtgagattttcacagtcctgttttaatgggttttgtttttctttattacagtccgttcggcatatttaccgaagaaatggtagccggagccgccctcggcgatgatgtcaagcagcccgtcggcatcggtcacaagtatacctcccgcaatggtaactcccatatcaaaaagcacatcgggaatcattcccgcagtaggtcctgtaactgcaatttcagctccaggctttgccatttcaagaagccccggaagcgtatcgtttaatattgtaacccctgttataactagaagatccgagtaagggacaacggtatcggccctatctgccggcacgaaatatttcatttcacgctctttcagagttttagaatcaagttctaaaatgctgaaatcgctgtctgaggcaataagcttctttataatcgggacaagcgcgtcgactgctgtgactttgccgtaatcggtgggctctatttcgtcaaatgtatcggcagcctgtatgtcgtaatcaccgcgctcaaacagtatggcgctgagagcgttgagagctgcaattccgagagcttttttgaggggattatccgaaaatatatattcaagataatccgaaacaggtctgcccgacagcctgcccgaaagaggcattgcccttgcggagcttgggcagcatacagcctcaggcatttcctttacaggagtgaagcacagaccgccgtggcctgtagaaagcttgactcccgtaaaaaacagtccgaggacagatctttcgactgtaattgtgtcaagctctgattttaatacaaacagaactcctctgtgcgaaaagttctgttgctgatttctttatttctgtcttataaacaccgggagcttggtggacactaagcttttaccctgagccactacctctgtcagcatcgagtttctgtaaccgtcctctttccataccacttccgtctgctctatgttcttttccttcagtttttcactgatatagttttcaaaatctgcagcatccacattgccgtcaggctctgcatagaggcgaaattttctctgtattttctcgccctgaatcagacggaaaaacacctttcgatctgattcatactcttcaattatctgaataagatcgctggaatagaaactcttgccgttaatttccactctgtcctttgacttgcacaggaatgttatcataggtataccgtttttgtctcttgcaactgtaaccatatcgtgcatattgtagcggtaaagtcccgaatagcttgtaattacaagttcatattttattcctggctgcgcctcatgcagcagtaccgtttcactgcttccttccggcagcagttcaaaaaacagtccgaatatcgcaggatagccttccgaggtttccggtgttacgggaatattgaatttaccctcgctggctccgtagccccaatccagaaacattgtgtcctcaggaaaatcttttctgaattctctcgctgttcttcccacgcttcccgacagccagcatactgtaatcgaaaatttgggccacagggctttgacagtaaattttccgtctctccgatatatattttccagttcctctgctctgccgcaggctgctttttctttccacagtctctgtatttcctgcgctgacttctccggaagaggaactgacagtctgccggtttttatatcacataatatccgactgcattgcgtattcagcagcctcattattctgtcaaactgcgctgtattgttgcagacaagcaatgcaatatctctgtcagccgctgcaaatgctgcagtcagataatccaagctttcggaggacatttctgtgtctgtcagcagaatttcaggcaatgtcattttttctgccatcgggcccctgcctgcagcctgtcccgatgctgtgcctatgggaattcctccccgggttctgccgcacaccgacggatttgttattgcaagtatattgtgtccgggcatcagtatacggggcgccatacgcactatctctgccgtgcggagtcttccgacgatttcctttacctttgctccttctgcgctttcgggtatgttcttgaaagctccggtagtgcctgtggtaaccacaaatgactccgcttttcccggaaaaagtatgtctgcctctccgttttccattcgaactacagcctctttgtagtctttgtattccgtaatcggaaacttcctgcgatattcctccgggttttttatctgcgcaaatccgtttgcaatgccaaactccgtattttcactgtatctgaggatgtccagaagcacctgctcctgaacctcttcaaaggatgtcatgagtctccgcagttctccgggcaggctctgcattttagtctgcgccagtatttctgtatggttcttgtttatcatttttctctccccttatatttatctatttttcaataagtgcgctgaaaaatttcttcttgacaggcgtgtctataactcttacgggcttcagctggttgcccgatattccccgcataatcatcatatctctgtaaagcgcatatgtttcctgctgttcaaaatgaagtacggtactgcctagcactccgttttttaccttgtcgccaaaggaagggtttgccagtgaaagcttctcctcaatcagtcttgtatattctgccgttttttctttcggcattatgcggtcaggttccatatatattatatatcttcccggctggctgtcggtatccgcctctacgctgtagtcgtttatgccgcagcctgcttcctttgcaaattccgatacagcccatgatacagcctcatcattggttttttcaccggcaatgcttatcatctggtttttgcggtagacaaatttaagctttggggactgtttgtaaaatcctgtgatacgaaccacgtctttaattctgtagcggtaaaagccggaaaggttcgtgataattatttcataatctctgccgggctccagctgatctatagtataggtagtgttctcatcgtctgagtccataggcacaaattcataaaatccgctgtccggtatgagtacaaattcttcctcatttacgtttaccgcagcggctacaagagcttccgaggccgcatatacactgaaaagaatcggcatatcacctgtgtacctgcgcattttttccgtatagcccgaaaagcctccggttcctatggcaaatatccaggtcatatttctccatattctcggtacaacgggagtgtcaaagccttttgcaaattcacatcttaattccgccgcccgcttaggatccggtttaatttttgcctgcagggcttttctcacgtcatcgggaatgtttgcatcctctttaagagttccgtattctatttctctgcacaatgactcccagtttgtctccatatatgtcatcatatccgcgagggctgtcataaaagcgctcatcataaacataagatttctgtctgcaagagcaaatcggatatgcagatacttaagatccatatgctcctttgtaaacattatttcaggcggaggcgagaatatatatggtatgaattttttaagagtattaagggatcttgctgaaatagtaccctttggcactccgttttcagtctgcatacttcgcacctcgacaggatttattcccctgccctttggagaatatctgccgaaggtcttgcggcagtatctgtccataacgccgaataccatatttgcagagtatttgccgtaacactctaccgtatgctccgatacgggaatgcttttgggaactcccacgcttccgctgctcagtgcgtaatgcacggccggatatacggatataaggtctgtttcattgttttttatcattctttcaatatatggcgcatagtcgtcatataccgaaaacggcaccttttgtctgtattcttcaactgaagttatatccgcaaagccgtatctgcggccatactcggtatccttgttgtcctgaagtattttcatcagaaggtccctgctcatatctaccgctgtctcgcagtttctgtcaagttcgtctaaagccctggtgccttttttcttaagcaccatatgtatcagtcggttcattactgtttctttaatcattcttttaacctcatatattaatctgaaatatttctgtaaagctctgcgtaaagtccgttctttgccataagctccgcatggtttccggtttctttgatatctccgtcctgcatgaacagaattttgtctgcatttcgtatggtaaacagccggtgcgcaattatgaagcctgttctgtttttcataagcgcctccattgcggcggtaagcatagcctctgtcttactgtccacctgtgaggttgcctcatcgagaattagtattgcaggattcgaaagcaccactcttgctatgcacagaagctgcagctctcctgacgagagccggccgccatccggtgatacagcagtgtcatagcctgccggaagtttttctataaaagtatcgcagccgactgtttcggcagcttttatgatttcctctctggaagcgccttccctgccgtagccgatattttccgctatagtgccttcaaatatccagctgtcctgaagcaccattccaaaagcactccggaggctctctctggtgtattccgatatatccgttccgtctaaggttattctgccgccctgtatttcataaaagcgcatgataaggtttataacagtggtcttgcctgcgcctgatcctcctacaatggcaactgttttgcctgccggcgcatcaaaagtcacatcactcataagctttctgtcctgtgtatatccaaattccacatgttcaaaggaaacagctccccgtacttttgaaagctccagtgtttttttgtttttttcctccggctcctcttcttcctcaaggaattcaaacaccctctcggccgccgctattcccatctgaaagctgttgaaattggccgacatattctgaatcggcatcgcaatcatattggcatatatgataaatgcctgaaactctcccagggtcattttgcctttaagaagcagtactgcgctgagcacgcaaagcgctatatatgccatattgttaatcagctttgaaaccggcataatgcagcctgaaaaaaatctgcttctggtatagtttttctgaacctctgcattaagcccgtcaaatatttctgccgccttatcctcataggaaaacgcctgcataagcacatggttagtatatatatcgttcataaacgcattgaggcttcccaccttctgctgctgttttttgaaaagcctgcgggtagtggcagttatcagcgtcatcgagaaaaagcttacgggaatcatcactatgaatacaagtgccagcacaggatttaacacaagcattgccgtcagtattcccgctatggtcagaagctgcgccgtcatttttgtcacagtggtgtcaagggtgtttgaaagagtagtcatgtcgttggtaactcttgacagtatatctcctgcggggtgggaatctatgaattcaagcggaagtctgcctattttcttctggcttctttctctaagctcaagtactatactttgcgacagggctacagacagtctgttgtccgcccactgtgagctgttccctgtaatatacagtcccagcagcacgctgcactgaaacaggatatattcaaaatctatatttccgctttcagagccgcttatgctgtcaattatgttctttgaagcaagaggcgccagggtcagcgccgccgtttcaagaattaccgcaactgcaagcagtattattgacttgctgtgaggctttgcgcatgctgcaagccgtttaagcccctgccggcagctgttttttttgttttttcttccggaggtttttgttttgtctttactcatagtctgactcctttgcctcactgtagttctgcgtagcataaatctgccggtaaagctccgagttttccagaagctgcttatgatttccggaggcaataatccggccgttatccatcacaagaattttatcggcattttgaaccgtagctattcgctgcgccactattatcactatcttgtcctgcagcgcctttgctatattggttctgacttttgcatcggttttcagatctagcgccgaaaatgaatcgtcaaacagataaatatacgcatctctgcaaaggcatcttgcaagagatattctctgtctctgcccgcctgataggttcatgccgttttgagcaagctctgtgtctataccctccggcagactctctgtaaatccggtcgcctccgctaaacaaagcgctttcattgcagactctctgctgagaccctcgtctgcaagtctgaggttttcgtagattgtattctgaagcagcatggatttctgaggcgcatagcttattctgcttctgagctctgcagtattcatggtctgtatatcctcaccatctatgcgtatgtttccctctaaggtgtcaaacagccctaaaacaagggacagcagagttgttttacctgatcctgtagctccgactaccgctatggtctgcccgggatctgcgctgaaagatatgtcggttaagacctgcttctgagcgccttcatacccaaagcaaaccttatcaaatacaagtccggtttcgcactccctgcgctctgccgcaggctgctttgccctgtcagcactgaaattcagaacctccataactctgtcggccgaaacctttgcctttggaatgaatacaaatatgtcggcaaccgatgccagtgaggaaacaaacagcagtatatactgaaagaactttataaggtctgccgtatccatcatattacgccggatctgttccgctcccagcaggtatatacccaccattgcaatattcataaccagctgcattacaggactgagaaaattaatcgagcggtttgcatttatggcctcatcgcaggctctccggtctgcttctgttatccgctgctcctcatactgctgcctgccgaaagctcttacggttcttgctcctgcaagcttttctctcagcagcaggtttattctgtctacacaaagctgcagactgtaaaaagctgttctgctttttttggtgcatactccaatgaatataagggttacggtaaaggttgcaaggacaattaccgacagcggccagttcatacttacagccacaattattgccccaagccctgtaaatggaatcagcattgctgagcgcaggctgtttatcataagcatctgcattacggttacatctgcagttgaccttgtaagaagcgtcgccgctccgaatctgccgtattcttctgtcgtaaaggttttaactctgtcaaagaggtcctttctgatatcataggtaaatctggctgtaattttggcactgaaatacccgcttataatcataaatatgcctacgcctgcagtcatagcaagcatttcagttccgatgcttataatatagctgatattccccccggcaactccgaacctcaatattctgtcggtcatttccggcaggataagctgacacattatctgcagcagagaaaacagcagcacgcacccgatcagcagtctgtatcttccgaaatatcgttttaccagtttaatcaaggcttcctcctccgaaattctgttttgcactgtttttgatcattgcggcaagctcgtttacaaatatgtcggcaagcctgtgctccccgcgtttttgctcctcaaacagatatgtaagccccggcattgaatttgcctcacagagataatattcattttcgttttcaccaaagagataatctatgctgcctattttcatccccattgcgtttgccagcttctctgatagttccttcagaaaatcaggcatatcaaaatctgtgatatatccgccctgcctgatatttgatttaaagtcggtatcgttgcatcttacaaatgagtgtataattctgccgttcataaatatcagccggatatccctgccatttgatgaggttatggcctgctgcgcgataataggctcgctgaaaggcgctccgaaaacaatactcagcagattgccaagctcctcctcggttttaatcagggaaatgcccttgccctgacttccgtgcattatttttataacggcgggaagccccacctgacttactatgtattccgcgctcatttcggctgtgaccagaagcgtctttggtatcagaagctcaggcacatactgctgtgcaagctggaaagtatacagcttgtcagaggttttttcgatcagattaatactgttgatacatacagcaccaaggctttcaaacatgcgcagtacggcgccttcgtggtagctgttcagatctcccatgaaacccaccagcacaaaatccggacaggctgtctgctttcctttaatcagaatgctgctgcctgcaccgcctgctgccacatctatatcctttacatttactgcttcaagctcaagacctgcagcggaaattatcttttggaccagttcaagctctttgtctatttctttggtactgccggtaagaagtatacccttcataatttatgctcctttcgaaaatccatatctgaaagtgtaatcacgtttatttgattttaaccacaaagcggttacttgtcaacgatacttttgcagccgtttatctgatatatatacacatctcaggcatcaatagtatattttcattgaaaaaattcaaaaacagaatccgccggagctgtatggcttattgcaacatgtatatttcctccgcttttgtggaacaattttaataacatatattactaaggaggccaggtatgaataatctgacaggaacacagaccgaacagaatctcagatttgctttttcgggagagtccgaggctcgaaacaaatatacttttttcgccaaggtggcaaagcaggagggctatgaacagatagctgccatatttgaggaaactgctttaaatgaaaaggcccacgcaaagctgtggtttgaggcgctatcgggaataggaagcactctcgaaaaccttaaaaacgccgcctccggcgaaaactacgaatgggccgaaatgtatgcaggctttgcccgtacggcagcgcaggagggctttcctgacattgccgctgcttttgaaaaggtcggagaaatagaaagaagccatgaggacagatacaatcagcttattgacaatatgtccggaaacaaagtatttgcaaaggacagcgatgtcagatggatatgcagaaactgcggtcatatagcggtcggaactgaagcgccgctgaactgccccgtatgcagtcaccctcagtcatattttgagctggtttcagaaaattactagtctaagagttcccattgccaagtatgtatatatagaggtgatgggaatgatttattatgctaaatatcataaggacggcaactcctttataatcacagagcagcaggatatatgcggtgaaaacaaaaaaactcttgcggaaacgctgtgcaggcaggatacaaatataggcgcagactcccttacagtctgcgacacctcgcagcacttcatatcaatggtttcctacagccgaaacggtatgcgccagcctctgaacggaaacggcattgcctgcctgatccagtactgttacgagtacggctttctcctcgaaaggaaagcatatataaagaccgatgcggcccttgtgggtgtaaagataaagaaaacatcgccgtttacaaccgccgtttatcttcctcccgcaatattttcggccgaaagctgctgtatgccggaatcggtatacaccgaagaaatatacatagaaacaagttacggcaaaataccgcttaccactgtaaataccggaaacatatactcggtaatatggtctgatgaatatcagaaatggcaccttaacagaaaaggaagaaaggtatttagaaatgacaggcgggattttatgagcaggcttgcccgtgaggtttccggcagcagtattttcaggctgaaaacaggagtcgtctttgctgaaatgattgaatacaatactgtcgcgcttaacatatacgataaagatgccgcgcctctttcctcctgtcttactgcagagactgccgccgctgtatgcgcattaaagaaaaacaaatgcagcggaagcaatattgtttcaggaaaaaccaatcttcgcatcacatatgacggcgttatagaggctgcctgcgtcacgcacaaggcatctgaaggatttgcaaaagcagacaaaaaatgatacagaggtatgggctgcccatacctctgtatacatatataagtgtaagt

SEQ ID NO: 4118 - DNA, 8190 bp, Unknown
  16S sequences of unknown bacteria
gcttttcatccatgcaaataacgggatagtcttcgtcatatgggcgactgtatacttcaagcacgtcttccatcgcagccacaaaagcggcactgtgttccggcggaatacaccagcacttcttcaggttaggcttaaattcgtttttttaagaattgttgaaaccgtaacgtgcgatatggactctatatacccaagttcaaccgttttgttcgcaagcagccgcagtgtccactttgaatacccctccggcggttgtccgcaggcaagtgcgatgacgtgtgcctccacctccccggtaacctttgccgggatcggcggcgtttctcgtttcttcctggtaattgtggcttcaagaccttttttacaataagaagccctcacagtctgtactgttgtgggtgtggtgcggtatgcatttgctatctcagacacagtcatatacctgtcattttgcttgtctgaggcaagcaggatgttcgcacgcaggattgtccgggctgggctgctgccttttttcacgatttccatgagtctggtcttatcctgatcgctgagctctatcacatatttgtacgatggcatataataacctccatagtataatctgagattattataccacatttctctggattatgcaagatctaaatttaacaatatactaatttagatatcatctacggaatcaaattatattatatattaagtcttgtcatatacataatagaaattctatctgaacagctttttattatcaattcaatgcagattgtcaattccgttctaagacaccacttttcaaagcgtgaattgacataactactctattatatattttacatcaaaataaagaaattgtcaagacgatttgcgcgccaatatgtaaataatttccgaatgtcagatgggagcaaagatatcggacgattctgatgcgtgaaggagtttcattgatcgttgaaagccgaacacatttccggcagataagttgacatttgccacggcgatgctttcttctgaacttcacgttttgccgccgctaattcaccctttgagaaaattcactcaaagcgtttcacactaactcttgcttttgcccgtacgatcaaattgaaaatttttattgaacttttttgatgatgtgaataatcattgacaaagcattcctgatgtgatataatattaatatcaaggaaaatgagcgtgacctcatgaatgacagcgtacccgagattgaattgattccgtatgacgcggcaaaaagtaaaacggattctgaccttgaccggattatcttcgatcttgacagtcagattgaaggtttttcagccaaagccgatacactcgattatattatctcgatagcgtcgggtattctctgcgcgtcgctcgatgttctctttgtcggtgattttgactttgagcgcggacgcgggatcgctgatgacaaggtgaacgggttcgtaaaaaagaccgcccatctgcttggctgcgaggatgacgacctgacatcctgcgtgaaatttctcgaaaagaaatttccgattcccagtgatcggaacacacctgatttcggcggcggattgcagcatcatctgcgggatttcgcgcatcatccgacaatcgtcgggcttatattctcgctgctgacacagttcacttatgaatcgtatggaataggcaaagacggactatttcaccactttccggttccggaagccgggaaggcgttcatcggcgacgatattccgacaaagataatctacggaaccgtgacgtggttcttccatcttgtaagcgacgtcgcgggatcgggcggaacagtgggatttggcggcggaaccggaattcccggtccgatactctcgctggcaaaggaactgtcggcacttcctctgttcagaaacatgaagatcggagataactctctgtctgtatttctgtcaaagctctttaatggcacgcttttcgcggaacatgatgaaaacggcagaatcatcagtgacagtcttctgaggctcgacctgcgcggagagctcggagtcggaattgaactctcaagacaggcggttccggtaatcgcgaacgagtgtatagtcaggacgttctggtttatccgccggtttgcagagaaactgcgcgacgctgatgtcaattcaatcggcggactttcagcgattatccctgattttccgaagccctcggaagatccgacgctcgcgagaatgctcacgatcgcgaccggggttttcacgacgatcgacataggagcggcggtcatcacgaagaagtatctcgtcgcggtgaatttcgcaggcgtcggacgcttcggcgtggcaatcggacaggatgtctcgtggtgcctgaaagcgcggaatctgaagaagctgagacagatgtacgatgacatcagacaaaacacataccgggatgaagacgacaggatatacacgagaatgggacgtgacacgatgaacatagatagattcggactgacggtcggacaaaccgagatactctacaacctcgaatacctcaagacacaaaacgacatcgaccgcacaaagcttccggtcggctgcgagcagataaaggaacgcaaatccaagtggctttgtgagtggaaagattacatgacgaggggattttcgggcttcctgaataatgataacgccgaactgagatggtattcagccgaagaactgacaaggaagataatggagagtgaacctgacggaacatggctgaggctcgttctgcttgaggcaatgctgtttgagccctatttcccgctctcgaccgagactgacaagaaaggcaatgaaatcccatccagagattacaattcacttcagaatccggtgaatggctacagaaaaacggatggcgacagctacctcgacgcgtttctcatttggaacgattcgacaaaaggctgtgtgaagcgtttcagaagatgctatgacagggtgcttttcgaactgaatgaggtcatgaagactgttcttaaatctctgtcgataacggctggggtcgcgctggttactgtcgcgacggcgggagctttcgcgcccgcgatcgcggtcgcgcttgtcgggtcgaactttgctgggctgagcggcgcggcgttgaccggtgcctgtctcgcgtatctcggcggcggtgctgtcgcggcaggcggactcggaatggcaggcggagccatcgcgatagtcggcggcggcgcggctctcggaatcggagtcggcgcgggagtcggtggagctgtcggaatggcgggacttgccgggaagaaagatgtgattctgcaatccgcgaagctcctcgtggcggtgagggagatcttcctgaatgacgagcatgatatagcctactcggacagcgtttacgagcagtatgtgaataatatcgcgaatatcgagaaggagcttgtagacctgagactacacgctgataccgcggacacggaagagaaaaagaaaatccgtgagatgataaagagatccgaggagacagttgacgccatgaaaatcgcgaaaaagagcatggaaaaatttgtttcttccttcaaaaccggggtcgccgataaggcggaatgaattcaaaaggcagtgtcacggatataccggcgtgacgctgccttttgttttatttgaagtgtaatttacagcttctcacagacaactctgcaacgttttttgcagaacgcgattccgaagccgatgttattctccctgccttcattgcgaagccgttcgtcataccgccgctccttgatttggttaagggcgtttttgcaggcggcgtcaagctcggcgattgtcggcgcgtacttgacctcaatcacgatccccgcgtccgggtcgtccggctcgatgataatatcgctgaagccgtcgccggactcgacgtttgacattatcagccacgtcgggtcgctgcggagcagcccgagaagcaaaccgtgataaaagttctccttctggtcgtccttcgccttcgtgtcgagaatgctaatcattcgggtcataacgagattcaggtgcttttggataacctcggcgtctccgttcatgaacgcctgacagaaatcgcgcatcggtttgtcgtcacggacgaaagtctttttgaaccactcctgaatctggaggatgaagacctcgcggacctcatggttcggaataatcagccttaactttccgtcgtcggtttcgccgtcgtatgtcaggtatccggtcgtgaaaaggacgctccagaggttgtcgatcgtgtcgtcgatttcgctgtatgtcagttcaaggcgaacctttttctcgattgcctcgccgtttatcaggcgttcgatctcgccttgggtggtcttatcggctttgtcgacgaaacgctttacgaggtcgtttccgctcgtgtttatccagtatgcctgcggcttggcgtcaggagcgagcgagagatttttgacgtaatttatgacgtcccacgggcagtaaacatcagccttgccgaaattgtatccgtcataccacgctttggtttcgtcgtagtggtcgagaacttcgtaatccgaaagtatctgtctgacctccgggtcagtgaagccgaaatgttcgtcatatctggtatccagtatcgaattgacatcgaaattattcagcccggtaaagatgctctccttggatatacgcagacagccagtcagcacagcgaattgaagataagggttagtcttgagtgcctgaccgaacagttcgcggataagagaaaccatttccttgtaatagctgtgattgaacgccttatcgagcgggacatcgtactcgtcgatgagaatcacgaccttctgcccataatgcttatagagcatttcagagagtattttaaggctgttctgtatgtcttctttggtgtcctgctcgtgcagaatgcgcctgaacgcgattttatcgccttcaggaatgcgcgtgctttcgtcgagaaaacgcagacgtgaaaattcctcgcgcaggataacgcgcagcatccggtacgcgctgtcgaaattcagcccgtcgactcctttcaaagtgataaaaacgaccggatactttcccatatgctcgtcgcagagtgctttttcacggctgattgccagtccgtcgaaaatcgttttatccgtgccgacctcgaagaaatatttcagcatactcatattaagcgttttgccaaaacggcgcgggcgggtgaacagattgacctctccccagttgccgagaaggtcgatgatcagtcttgtcttatccacataatagaaattttctttgcgcagcttttcaaagttatcaatgcctaccggcaatttcagtttctccatatcgcaccgcctttcacactgtgagatcgtataatcatcctattatatattttacattaaaatagcgaaaatgtcaagcctctttgcgtgctaatatgtaaataatttccgaatggcagtgccacgcagatttcagcgcggcactttttttaatttctttgaaattttccatcatcagacatctgaatatccatgtcgatgatctcacgtactctttcctgtccactgagaataaaggtgcgtatatagtcccgatcgacttcaatcggtatttcatcaagacactcattgatgatgctttaggtaatctccggaagttcttgtacgttttctcctttcctccttaaccactccccatatgcctccttttatactccatcggagtcatcccgaaatatttcctgaactgcgaaataaaatgcgaactgtccgaaaaaccgcacatataactgatctccgaaacggacttttccgcgagcatcgtgaccgcggcgcgcatccgacggcttgtcaggtacgaatggatcgtcactccgacctcagacctgaagctccttgaaagccacgactcactgaccccgcagagctttgaaaggtcggcgatcgttatctgctcgccgaaattctcgtcgatgaatctgactgtcctcgaaatgttcatcgaaagcacggtcggctcaggctgctcattttcgctgtaaatacggctgagaaggtcgagaaatcttatgacctccgcaaaagcgagcggcagattcgacctgtcaagcgcgttttcaacctcagcgcaggatgagatcaaaagctctgtgtccgccgacttcggacggataaagacgtttttgtttttatcgcggtcggtcagccattcgagcagcttccttccatccggtatcgtgtcgaacgcgctcatgccgatgtcaaactgataataatcaagctcagtatcgctgggaatttttccgtagtgcatctcaaacggcgcgagaaagcagaggtcgccgtaaatcggagaaaacaccttgtcgccgacgacgaccgagaaatcgcccctcataaacacattgatcttgcagttattcagcaggatctttttgttttcgttccattgattcttccgacctgtatcaattatgtgacagaactccacggcgtatgtttcgttcgcgcccttttgtatcggaaaatgccagtaagtgctcataacggcctcgattcacttcagcttttttatatttctgtctcattttttgctatacaatgagaaaacaagctgatataattattatacatcaaaaagtggcgaaagtcaaccgctttatggaggttttctatgaattacaaaccgatcccggtgaccaaccgcatactcgcgtcacgggagcttgtgaaaacgctcgtcgtcggaagtgagaaaaatccttattccgacggaaattaccggatgttctgcaccggcgaccgattcatcactcttggatttctcgagggctgggaaaagcacaaatacgcgccgacgacaaagctccgccgttcgctcgccgaggcggaagaactcaaagcgtctgagccgataatctgcgaaaacgaccttctctgcgggcggctgtatctcccgcggatgaacgaggaggaacagaaacgctacaacaagctctgcgacgctttcgaaagctccccgtttccgcttcacagcgcgggcgcacggaaggatcacatcgcgctcgacttcggaaagctgctcacggtcggcgttcagagcgtaatcgacgagcttcgcgaaaagctcaggaaatccgactcgcgccccgatgtaatggacgctgatatgtcggtcatcgagagcgcggagttccgcaaatgctgtatctgcgagcttgaggctctcctcgacctcgcgcgcagatattcagaagaagccgaaaagctcgccggaaacgcaaccggaaaacgccgcgacgagcttctccggatgtctgagacgatgaaaaaagttcccgcgaaacccgcggagagcttcttcgaggcaatccagagcgtgcatttcttcctgtcgaatctcttcggactttacccgctcgggcgtccagacaggtatcttaatgacttttacgagaaagatatcgagtccgggaaactgacccgtgaggaggcacaggaacttatcgacttcttctgtctcggagtctcagaccgggtattctcacgcgccgcctgcggattcatgatcggcggacaggatgagaacggaaatcccgtcgaaaacgaactcacgtatatgttcctgaccgcgctcgaacatatcaggatgtcagacccgaacggcgcgctttcagtgaattcaaagaccagccgcgagatcatcggatacgctgtcagcattctcgcgaaaggagtcacacatccggcgtttttcaatgatgacgtgatcgtttcttcgctcgaaaggctcggtatcgaacgggcggaagcggtcaattacatccactcgacctgtgctgaaatcacggtcgccggatgttcgagagggcacacaacggctgtgacgattgatcttccgcgcctgcttgtcgaaacggtcgccgaaaatcccgtaatttcaggaaaagacgagcttatgaatctcttcggcgaaaagatccggaggaggctcactgatggaatccggaaatatgagtattcaatcctcgaagctgaccggagcggaaacgagccgatgcgcatctgctgtttcatcggcgactgtatggaacgctgccgcggactatacggcggagggacgaaatatgtcttcatccagccgaatttcgtcggcttcgcgaccgcggtcgactcgg

SEQ ID NO: 4119 - DNA, 5022 bp, Unknown
  16S sequences of unknown bacteria
ggctcctccgctcagcgctcgtttatattaccatcctctcccttttccgtcaagctgttttttccttttttttgctttttttcatttttgtgtatctgcgtcttccttcaacagccgcagatacttctgatagagcgcgtcgatctcctcatgcatgaacggggatttctgcaatgcgatatcgttgagcacatcctccagcgcctgccggatgaccgcttccagcttccgcccataacgcatggacgcgctgtgctgacgaaattcatcctcatccaggacgatgatcttcccattcggcaagatcttcacatccagatcatagtcgatgttcttgatcgcctcttcgtccaccaggctgggcgaagcgatgttgcaataataatgcaccccgcctttgcggatcatgcagatgacattataccagcggtcaggataatagaagcagactgccggctcccgcgtcacccacttgcggccatccgcctcagagaccagcgtgcggtccgtcactgccacgatgcgccgttcattggcttcgatgacatatccggtcgcccacgtccgatgcagagaaccgtcatgcttgaagctctgtatatatacactgtctttttctttcagttccatgtcttcctcctgtccgaactattatatcacctttctgtgccgatgccatctgtccccgcctccttctttctgttatactgaaggaagaaagaagggaacgaaatgaacaaaagcgaatggtatgcctcactgtgcgcgcagctttcttcgctgcttacgggcaatcagcgcaaggtcaccatccttgccaatgcgtctgcgctgttatacgatgccctgtccgatgtgaactgggccgggttttacttatatgatgaagagcaggatgcgctttacctcggtccgtttcagggaaagccggcctgtgtgcacatccccaatggcaaaggggtatgcgggagcgccttagccagaagagctgtcctgcgggtggacaatgtgctggaattccctgggcacatcgcctgcgacagcgccagccgctcagagatcgtcctcccgctcatcaaaaaagacacctgtatcggtgtccttgacattgattctgcgcgtctgcgccgctttgatgaaacagatgaagcggggctgaacgcatttgtcgatgtgctgatccgcttcctttaaggattcagcacatgcctggcaacctgaaacgcctcatgcgcggaaaacagcgtgatccggccgctgccgaaataagaattgacgatggtcttgcgctcctccatcttctggcgcacctgcaccagccctgacgcatccatgcggtaatcgaggatatctttccagaacagcgaagtgcctttctcgaccggcaggcggcggatgcagatcggcaaacgccgtgaatgatatttggccagcgcgtgcatgcaggactcttcaaaggccgtgcccagcaagagcacatagccgctgaggtccttcacatgccccagcggagaatcatcgctcaggccgaaatgcagcgggtggcggctgcagatgaccttggcatattttccccaggccgcaaagctgtacagcggatgattcgaccgcacgaccgcatcattacgcagaaactggcagacaaagggatcggcatgtgcagggatggacagctttttctgatacggcatgctgttgcggcggatatcctcccagcattcatagggaaaagggcatcctgggacacacgccgggtcaagcagctccggcgtgaacgccggcacgacgatcgtgccgtcatatccgaccacatccatgagcgcttcgatcagcgcctgttcaccggccaccacatagggcaaacgccgcgaggtcacttccacgagcagcaccattccccgggacagaccaaggccgcgcagctctttgaccagctccgccttcgtcagcaccggatcgttcatttttcgcacatccacatcataacgcatatccatcaccctttatatagattattctatcatattttctgaatgcttcatcatcaatcccatcgattttcaccagaaaaggcagagagcgcctgacgctttctgccttctgttttgctttaagcgaaatggatcacgcggacgcggatgatgccctcgctgcggcggatctcctcgatcgccgcctgatcgatcgtatcgttcgtctccacgatggtgtaggcatgattgccgcgcgccttgttcgccatgttttcgatattgatgccgcactcacccagcttggatgcgatcttcgccaccatgttaggcacattgcggttgatgatgcagatgcggttgcgcgcgctgggattcagcgccagctccggcatgttgaccgaattgcggatatttccccattccagataatcccggatctcgttggccgccatgcgtgcgcagttgtcctcgctctccggcgtggacgcgcccagatgcggtgtgatgatcacctgatccagcgcgatcagcttcgggctggcaaaatccgtcacatatgcggccaccttgccttgtgcgatcgccgctgccagcgcatcttcatcgaccagcgcatcacgcgcaaagttgacgatgcgcacatcatccttcatctgcgcaaacgcttcttcgttgagcatgccccgggtcgaatccatcagcggcagatgcagggtgatatagtcacattcctcaaagatcaccttcagctcgctgatgtgatggatccgcgccttcagcgtccatgcggcgcgcacggagatatacgggtcatagccatagacatccatgcccagcgctgccgcggcattggccacctgcacgccgatggcgcctaagccgatgacgccgagcttcttgccggcgatctccggtccggcgaactggctcttgcctttttccaccgccttggcgatgccctccggatccagcgtcttcacccactcgatgcccttgacgatcttgcgggaagccagcagcagacctgcgatggtcagctccttgaccgcattggaatttccgccgggcgtattgaagacgacgatgccctgttcgctgcatcgatccagcggaatgttgttcacgccggcgccggcacgcgcgatgcacttcagctccggctcaaactctgcgtcatgcagagatgcgctgcgcaccatgatcgcatccgcatggtccaggtcttctcccacttcatagcgatcggccggaaggcgcttcagcccttcctgggagatcttgttcatcagtctgactttcatctcatttgcctccgttctctgcctcaaagcgcttcatgaaggcgagcagatgttccacgccttccagcggcatcgcattgtagatcgacgcacggatgccgcctacggcacggtgtcccttcagattgctcatgccgtcctcgatgctctgcttcacgaacagggcatccagttccttgctcggcgtcgcaaaggtgacattcatcatcgaacggtcctccttcgcgacctgtgtctgatagaagctgctggaatccagatagtcatacagcatcttcgctttcttcgcgttgcgctcctgcatcgcctgcaggccgccctgctgctctacccattccaggacgagtccgagaatgtagatcgcataggtcggcggcgtattgtacatcgagcctttttccgccatcggcgcataatccagcatcgtcggcgtcgctgcggacgcatgtccgatcagatcctcgcggatgatcacgaccgtcagtccggcacagcccatattcttctgcgcaccggcgaagatgacaccatactggctgacatcgatcggacgcgagaggatatcgctcgacatatccgccaccagcgtcacgccatcagtctgcggaacatagttccactctgttccatatacggtattgttgttgcagatatagacatagtccgcatccgcatccagcttcagctcctcctgtttcgggatccggctgaagttttccggctccgtggaagctgcgatgttgacctcgccgaacttctttgcctcctgagctgccttctttgcaaaatatccggtcacgacataatctgccttgcccttctgcatcaggttgagcgccacagacgcgaactgcgtgctggcgcctccctgaagaaacagcaccttgtaattgtccgggatctgcatcagagaacgcagacgcttttccgtatctttaatgatcgtgtcatagacacttgatcgatggctcatctccataaccgacattccgctgcctttgtaattcagcatctgatccgccgcggtcttcaacacctgttccggcaggaccccaggcccagctgagaaattgaaaatacgcttttccgccatatccggcaccaccctttcttgatctgtgcattttctgtcaatccaaaagaggattgtatatagtataacacgctttcaactttttggaaagtttttcatgaatttgtgtaagtattttcaccacggtgcagcgtttaccgttctttccgctgagaaaaaagaggattgacaatatcgttaaacgatattatgatagagacagaagaaatatcgtttaacgatattaaggaggtggatcatgccgaaagaacagctgaagaccctgaccgaacagatgtattatgtgctgctcgccctgaaacgggagcgctgcggcgtggacatcacagaatatgtccttttgcgcaccgacggccggctgcgtcttggacccggcaccctttacagcatgttaagcaaattcgaagatgaacagctcatcgaaaagacccgggtggaaggacggcggcaatggtatcagatcacagaaaaaggaatgcagatggtgctgcaggagatccagcgcatgcagcagatgatcgatgacggcatcgacatcatccatcacgattaggaggtgaacgagatgaattaccgtatcgaactgcttccctgccctatgcaggaaaatgaccggcttgcccgccatatgatgcagcgcgcccagccagggggg

SEQ ID NO: 4120 - DNA, 8426 bp, Unknown
  16S sequences of unknown bacteria
ggccgccgtagaatgcgaagttgtagcggtccttgatgacggcctggtcgccgccccgggccagggccatctcaatacccagcgtcgcgaagctgaaggactcggtataattggccccgtccttgccgatgccgatagagaccgtcgccggaatgcccgccgggtttttgacctggcgcatcgtctccagcagggagaatttcttctcgaccatggccggaaggtccttggcttcaaataggaagaggtagcggttgcgctcgatcttccgcagcagaccgccgacgccgtctgtccaagtggcgatgcggtcgtgaatggcgacgttcaggttggaaatgccgttttccggcatgttgttcgtcagatcatcgtaattgtccaccagaatgatcccgacgatggggcgggagcggatgtactcctgcttgacgtgggacagctctgtgatatcaataaaatacaccgtcgccagcagcacatgctccgcaccgtgctccgtccggacgatattgcccatgacccgataggtccggtcccgcaggctgacgtcgtacggggactctgcctgcccggccttgagccagtcaaaattcagggtcgggcagtaatccgtgatgcggcttgtgaacaggctggcggattttgcaccggtagccgtgtggaagagatcgttgctccagacaatctcgcctgttcccagcttgaccagggccatggggaatggcatctcgcctttggctgccgtctcgagcgtgtccgtcgcggtttggatataggcggaaatctcccggcggcggcgcatggcgtttattttaaagtagagcagaagcagcagtccgaccgctgcctcccccagcgccaggtaaaaatctccgaagaagaaggtcacggcagcgaaggcaaacagcaggcagaaatacagggccatgcctggctggatcagccgactgagtttttgagaattcacaaaacacaccctccttacaaaaatcaagaaacctgggcataattagagatattattataacatagccccgtttcctttgcaaggccgcccaccacggcttgacagaattttcacaccgggttacactattagaaataaagtgaggaggtcgcattgcaatgccatcgaacgtatactttaccgatttccacacgaccgccgcggaaaaccagctgcagaagctcaagcggctgatgctcaccgccggagctcgccagatcgactggaagggaaaattcgtcgccatcaaaattcattttggcgagccggggaacctggcgtttctgcggcccaattatgcccgggctgtcgcggatgtcatcaaggagttgggcggcaagccgtttttgacagactgcaacacgctatacgttggcgggcggaaaaatgccctagagcatatcgaatccgcttaccagaacggctttacgccgtataccaccggctgccatatcctgatcgccgacggcttgaagggcaacgatgaggttgccgttcccgtccaggggggcgactatattaaagaggccaagatcggccgggcgctgatggatgcggatatcgtcgtctctctgacccatttcaagtgccatgaaaacgccgggatcggcggtgcgatcaagaacatcggcatgggcggcggctcccgcgccgggaagatggagatgcacgctggcgggaagcccctggtctcgaacctgtcggcctgcatcggctgcggctcctgccgccgcatctgtgcccacgacgccccggtcatggagggccgcaccgttactcacatcgaccatacgaagtgcgttggctgcgggcgctgcatcgccgtctgtcctatggacgtcatcgagccgcagtgtgacgcagcctttgacgtcctgaactgccgaatggccgagtacgccaaggcggtgctggatggccgcccggcgttccatctgagcctggtcatggatgtctcccccaactgcgattgccacacggagaacgatgtgccgatcatcccggatgtcggcatgttcgcctccttcgacccggtggcgctggaccaggcctgcgccgatgcctgtgcgaaaatgcctgtgttggccggcagccaggcggataagccccgccagcccgggcaggacctcttcgccgctgtccacgatacgacgaactggcgcgtccagacggcccacgccaagaaaatcggcttgggtgacaatgcgtatcagcttattaaaatttgaaaaactgccctgcagcattgaattcgtctcttgtggcgcgctcccggttttcccggcggcgcgccgctttttgcgtatttgagaaaaattttaaaattatttgggtttggagcttgacatttttgcattattgtattagtatcttagtacaatgatatgaacgaggaggtacgatatggcttggcaatttcgaaatgacgcgccgatctacacccaactggtggcgcagatcaagctgcgcatcgtcgctgggacatttcagcccgggcagcggctgcccgccgtgcgggactttgccgtggaggctggggtcaaccccaatacgatgcagcgggcgcttgcagagctggaacgggagcagctggtgtttagccagcgcaccgcgggacgatttgtaacggaggacagtgagatgatccaaacgatcaaacaggaattggcgcagcagcagctggcgcagtttttccaggcgatggccgagcttggctacgcccgggcagagatcgtcgctctggtagagcagagtggcagcaaggaggcataagatggcgattctggaatgtaaaaatttgacaaagcgcttcggcgcgacggcggcgctgcaggatgtgagcctggagatcgcgccgggacggatcatcggtctgcttggccccaacggcagcggcaaaacgacactgctcaagctggccaacggcctgctgacaccggacggcggcaccctcgccatcgacggcatggccccgggggtcgagacgaaaaagatcgtctcctatctgccggagaaaagctatttggcgggttggatgaacgtgcggcagctgttgggttatttttctgatttctatgccgatttccagccccagcgggccctggagatgctggcaaggctggacattgacccgaaccagcggatcaaaacgatgtccaagggcacgcaggagaaggtccagctgattctggtcatgagccgggcggcaaagctctatctgctcgatgagcccatcggcggcgtcgacccggcgacccgggactacattttaaatacgatcatttccaattatgatcccgccgcctcggtcatcatttcgacgcacctgatcgcggatgtggagcagatcttggatgaggtaatctttattcatcgggggaaggtcgttctgcagtccagcgtggatgccatccgccaggagaagggatgcagtgtggatgcactgttcagggaggaattcaaatgcttggaaaattattaaaacatgaatttgtcgccgctgcccggccgctactgccgatctggatcggcctgccggtgctgggtattttggtcaatctctctggccgtgtcatggtggatacgacggccaatatcatttcggtacttcggggcatattgctctttttattcattgtctgcgtgatcggtgcttgggtcatggcagttatcacgatggtcaagcggtttcagcagtccatgctcagccgggaggcctatctgacccacacgctgccggtgaatgtgcaccagctggtttggagccggatgatcgttgccgtctgctattttgctgtgacgggtgtgctgatcctcggcagtatttttctggccatgttccagctggactgggtgggttggttcttcaaaaacgcctttgatatcctgctgtgcttcttccgggagtaccacggcgatgccattggctggacgctggaagtccttgcgctgctgctcgtctccgggctgaccaactgcctgctgttctatgccgccttgaccattggccacagcttcacgacgcataaaatgctgctgagtgttgccttcttctttgcactggagatcatcgcccagatcgtcggttcgatgctcctgttctcctccgggagcctgctgctcaccgttgcctcgggccatatggtcctgctttcgttgaccggcttccttgccgccttcggcgttgcctattatatcatcacgacggtgctgctgcaccggaagctgaatctggaataatgccgcgcccgctgtctgccccggctctgccggggcagacagagactggcagatttttggaaaagcggattttcgcgaaagagaaaaataatgcttgacaattccaaaaaccgggcgtataataaccatgctcatttgagtcgctggtatagctcagttggtagagcagctgatttgtaatcagcaggtcgggggttcgagtccgtctaccagctccatcagccttcaagttgagcccaattgcataggggggatttcccgagtggccaaaggggacagactgtaaatctgctggcaacgccttcggtggttcgaatccaccatcccccaccaaaaaagctcttttgcatttgcaaaagagctttttgctgttccttttgcctgctagcaaggggtgtgcagcgggggtgacaggcttacggcgggacctgctgacaagacgggaatgcggcgaaaaaatccaggatgcagggttctgcgtcgagcagcggtggaagccgcagcggcttccgcgcccctttccggaggctaggtgcctataccggcgccgaggtggccgttgttccgcttgcttcgcggatgcaggcattgcaatagcgcagttgggggtgattatgtagaagcccggttggctctttcgcgggagacgattgaaataaagcgcggatgactgttctcctaggcgcattgatgtactgcctcggctttgtcctggcctcggccacctccttttccgggcatgctggctggaagctgttgcttggcgccagttacatcggactgcaggcagtaatgctgcctcccttggtgcttggccgcagcaccatgctgatctatgtcctcctcgattccatcccagcgcggaaaatcttcccggatgcagcgacttggcccactgtcctgccaatctattatggcctgctggctgcgtccctacgttattctgtctatggctttttccgccgcaatcagaagcaataccataaatatgccgggccactgcccgctgcaggataaaaacaatacccccggctgcatcagcttgcagccggggtattattctcattcttttgcgcatcgtctggcgcagggtcgtcacttaaatagtccagcagggcctgcatgccttcgccggttttggcgctgatctcaaaaatcgggctggcgccggtgagctccagaagctcgcgcgcatcagcgcgctgctgcggggtggcacagtcaatcttattcaccacgccgatgaccgggatggggaaggagcctgccaggcctggggcgaacataaaacgctccgccgtcgcatcgtggataaacagcgcgacatccgcctcgacggaggtgaccatcagcgcatgcaccagggagcggcgctccagatactcccccggcgtgtcgatggagttttgcaaaaactccagagcctgggtcttctgatatgtctgcttcaagccattgagccgctggctgagggtcgtcttgccgcaggccacatggccgaccataatcacgcgcttcatgtcttcgtgatcaccgccggggcaaagtgcaggagattctctagcacatttaaaacatccttcatcgctgcttcgacatcggcgaccgtgccattgatgaccagggaaccgttgaaccggtcgacaaagataatatcgacactggcggcctttgtcgcaacatcggcgccaatgatcgcggcctcgtggggcgtgatggtcagaatgccaatggcgccctggggattgccgatgacgcccagttttttataaagatccggattgggattggcaatcagatgtgccatcgtgacctgcttgccaggcacgatctcctgaatgatccgctgcttttgctcttcgtacatagaacaggacctcgatgcgttgaattcgataaaaatagacggattagaatgatattagtatagcacgcccctgcgcttgcgtcaatcttccggggaaaaatctttttctgcgtcttgccgggcctgccgttgggtggcccgctctgtcgcctggcgcagcgcgctgacatagcccatacaggagaagatcgtcgaggcgttgcatagcaccagggcaagatccgcggcaaaagccaaaatgctcgccgctgacacctgcgcggcgagggcctgcaggctggaaaacagcccgtgccccggaatccaagctgccagccccacggcatcgccgccgctgcggcgaagcaggaacgagactaccagctgaatcaggaacagcactgcgccgacggccgcgccgccgtacgccgccgcgaccggagcccggaagaggtagagcagcagcagcgccaccggcagcacgaggatataccaattccgctgcaccagcggcagaagctcgccgaaggcgtccatcgaggcgaagcccagggcccattgcagcagcagcagaaccagtcctgtcagggctagcagcaggggaaagcgatacatcagcttggctctttttctctcttttgcgttcatgtgcccacgccctctctcggccaaagtgccagtatttgtataaattttacacgctgggaaaataaaaatcaagcacgccagaaaaaatgccggaaaaaatcgcaaaaaacagcagattatccaagaaattttcaccaaaagaccggcaattaaaaaaatatcaagaaaagacaaaattttttagatttatatagaaatattttcgcaggcgtgttatactggtatacggaggacgttgggccttcgaatttttgtagttttgcgtattacattccgccgggcgtgcccgccggagggggtacgctagatttatttgctataggaggaacactttgcatgaaaaagattgatcttgaaaagtatggcatcacgggtacgacagaaatcgtctacaacccttcttatgaggccctcttcgaagaagagacaaaacccggcctggaaggctttgaaaagggtcaggtctctaatctgggcgctgtcaatgttatgaccggtatctataccggccggtctcccaaggataagtttatcgtcatggacgaaaactccaaggacaccgtttggtggacctccgacgaattcaagaacgacaacaagcccgcctcccaggagacctgggctgcctgcaagaagctggcgcagcaggagctgtccaacaagaagctgtacgtcatggacgtcttctgcggcgcaaaccatgattcccgcatggccatccgcttcattatggaagtcgcctggcaggcacactttgtgaagaacatgttcattgctccgacggcggaagagctggaaaacttcacccccgactttatcagctacaacgcatccaaggccaaggtcgaaaactacaaggagttgggcctgaactccgagacggcagttatcttcaacatcacctcccgtgagcaggtcatcctgaacacttggtacggcggcgaaatgaagaagggcatgttctccatgatgaactactacctgccgctgaagggcatggcttccatgcactgctctgccaacaccgacatgaacggtgaaaacaccgcgctgttcttcggcctgtccggcaccggcaagacgaccctctccaccgacccgaagcgcctgctcatcggcgatgacgagcacggctgggacgacaacggtgtcttcaacttcgaaggcggctgctacgccaaggttatcaacctcgataaggaatccgagccggatatctacaacgccatcaagcgcaacgcgctgctggagaacgtcaccgtcaaggaaaacggcgaatgcgacttcgcagacggctccgttaccgagaacacccgcgtctcttatcccatcgaccacattgagaagattgttcgcccggtttctgctgcaccggcggcaaagaacgtcatcttcctgtctgcggatgcctttggcgttctgcctcccgtctctgtgctgaccccggagcaggcccagtactacttcctgtccggcttcacctccaagctggccggcaccgagcgcggcatcaccgagcccaccccgacgttctctgcttgctttggtcaggccttcctggagctgcatccgacgaagtacgccgaagagttggtcaagaagatggaaaagagcggcgccaaggcttacctggtcaacactggctggaacggcaccggcaagcgcatctccattaaagacacc

SEQ ID NO: 4121 - DNA, 11119 bp, Unknown
  16S sequences of unknown bacteria
acaccgaaaccgggctgtattatctccagagccgctattacgatcctgtcgtcggacggtttttgaacgcggacgggttgctcggagccaatggcgacttgatgtcctataacctcttcgcctattgctccaataatcctgttaatatgagcgacccgacggggaaatgtgccatatgcaaattagaaatggaacggcaattccagctaaaactacgcggtatggttaggagtattgagcagccttccgttccatcacctccctcaagccccgctccggctcccacaaaaagtgttggtgaaaaaatagtagatactgtgcaggctatagcatcgtcaattgaaactgaagctggagtaggtataggcttaaagggaaatgtcgatatagcgggtattggcgtggacgttggcgtcaaacaagacttatttcaagcaaaaatcgtcgatggaaattttgatttagggtatggattcgatgcttcttttatggcgactgttggaccatatgatcttggtccacatgtatcacaattcggttctcacttatctaatataatatatccagaagaatatagtaatctgcaaaatactggagttatagaaatatttggggcagaagcatatgtgctatatggttttaattattcgattgggtttaattacaaaacattttcaaaaaagtgggatgaaatatggaactagcgaaaaaaagaagaaaaactattgtcgttgttttatctattgtaataggatttatagtatatcaaatcagtatgtgtgtatttgctgagtatatacttaatcaaggggtgaacgcttggcatggttttgctctccccattgctatggctttagcttttatccctatagcattaggcgaaatagctttattgagatttctaaagaaaaagggaaagaaatatgtcattttaaactttatatttggtctccatctaattggatttccaattgggatagtcgttatgattatatataatatcgttgtaggcataaagtaaatgaatgagccaggattaatatcctggctcattctaaagacggcctgtcgttcacatggtcgaatggccgccaactgacgggggcgacgaaagacgggacggcgctgtcgttcgggtacaattcggacgggctgcggctgcacaagacggtggggacgagccggaccgactacgaatgggatgggtccgccctgctggcggaacagacgggaaacaacaagatcctgtacctgtacgacgggacggggctcatcgggttcaagcggaacggggtcacatatacatatgtgtacaacggactcggggacgtgatggagatccttgacaaggatggaaacgcggtggtaagctacctgtatgacgcatggggggcgccgatctcgatcaccgggccgatggcctcgacgctgggtgcccagaatcccatccgctaccgcgggtactactacgacaccgaaaccgggctgtattatctccagagccgctattacgatcctgtcgtcgggcggttcatcaatggggacggatatgtttccacgggccaagggattctaggccacaatatgtttgcatattgtgggaataatccgatatctcggaaggatcatacaggtttattttgggaagaaattgggaacttttttaaaggcattggagatgggattgttgatgtagcacaatctgtaggcaactttgtttcaaatgtcgtacaagactttatggatgattatagttatgaagttattgagcttaatatggagtcggcaaagaataaatataatgaatctacagtaagcatcaataatcaaaatcctgatgcacctatacaggttacgattgatgctaaacatcctgatcgtatcgatagcaaaaaagtcaatcctaatttcagtgtaactgattcccataaaataaaaaataaatatgagatggaggctattcttaatgtagtgataagtagcccagaatatgatcctacagtatttacgcgaagtaagagttcatatattgcagaatggagaggacataatgccttatatactatagatatatttggcctttttaggagcaggactggaggtgtagactttaatgaaaatccatatcctgaagactttttgtgggcgttatggtaattcgtttttttatcgatccaaatggatggttttactatattcattaggactctatttattatctgatgctttactatttatattattacgatcgtttttagtggaatacctttccttttctgtttttgttatagcattgattccagccatactacttgagttttgtttgatgccaaagatatttgtagtgacctttaaaagacggatttctatatatttgttgttaatcatgtattccatattacatggccttcttactacattaggcaatgtggatgtatcagcattaatagtcccagtttttcgaacaattatctttggaattatctccttgatcatcatatttgtcttatttattttgcagaaagtctaagatcattacagaatgaagagaggtatgctagaatctgtatacctctcttcattaatatcaacgcaggcgatcgcgtacgactgggtgaagaacccgctgacgtggcgcgacggcctgtcgttcacatggtcgaatggccgccaactgacgggggcgacgaaagacgggacggcgctgtcgttcgggtacaattcggacgggctgcggctgcacaagacggtggggacgagccggaccgactacgaatgggatgggtccgccctgctggcggaacagacgggaaacaacaagatcctgtacctgtacgacgggacggggctcatcgggttcaagcggaacggggtcacatatacatatgtgtacaacggactcggggacgtgatggagatccttgacaaggatggaaacgcggtggtaagctacctgtatgacgcatggggggcgccgatctcgatcaccgggccgatggcctcgacgctgggtgcccagaatcccatccgctaccgcgggtactactacgacaccgaaaccgggctgtattatctccaatcgagatattacgatcctgtcgtcggacggtttttgaacgcggatggattgctcggagccaatggcgacttgatgtcctataaccccttcgcctattgctccaataatctcaaaatatagccgactcttttataattgagggaatatatgtatacgaattggaatttagtgaacagtgtttgggataccggctatatcgctttagtacgcaatattctggatgcctttacaatcgctttcttattgtttatcacgattgcgtccattatgaatctaaaaagcagaacgatatattatggagtgggcctgtttgtatcttggatgccgttatttgtagctgttatgatgcccctagtattttctgctgttttctttcttttatattttggggtatttattgtcctatgctattttcatcattttgaaaaagaactggagaaggtcgaacgtcgtgggatcctatctgcaaaggcgaaacatcaaggtatagaagagcgtcgtttccaggcatttagttctgaagaaaaagagcaatgggtgtctgtgctaaatcgcaaaaataagtgctcgcgcagaacctttcgaatcatgagcatctgtacttgtgtgtcaagttatgggctcggtgtgctgttgttatttttacagatacaagcagcgacggcatcgggagccgtctgagcccagccgcacaagagagcggcagttttcttgtgttccaaagcaacggatcagctgcgcttaatcaaggagggcttgtctgactacctgtgtaaaggcttgattgcttacggcggtgattttgtgtcgtttgacatattaagctatcgttaaaaaaccacactaaacgccggtgttgagcccccggcgtttagtgtggttacaaagcgatatgtttcacgcggcagggaggcggaagcggccgtgcgtcacacttcgtccagatcagagtacgtgttatagtctagcatagcagagggagtggcccgcaggccactccctttattccgcgcaaggttaatcctgcgtgtatatttgaattctcggctttgcggaattccacaatagtgtcgccggctcaggggtatgcggatataggaaccgggccaatggctgcggcccccggataggtcaaccagcctcatcaataacagggcagcgtcacagggggcagagcctattcgattaaaatcccgcgtgatactgcacacccgcgtataccacctcattgcgtgcggcgagcagttccggcaccgtcacgatggtgtatccgtcggcaatcagcctgtccatcatccggacagcggcgttcagcgtggtctcatacacgtcgtgcatgagcacaatggcaccgtcccgtattccgtaatttccgctctgaaaggcggtttccagaaccttttcggtattgcggctctgccagtcgcgtgtgtccaccgaccagttgaccagcgcgaggtgctggtccttgagcacctttttgaccgcatcgttgacattgccgcccgggcagcggagcagatacggacgcacgccgctggcgttttccacgatatccgcacaggcgtcgatctgctggagcacctcactttccgaaagcttggtgaggttcttgtggttcatggtatgattgccgatcacgtgcccttcctccgccatacgtttcagcagggcgggatagtgctgcgcgttctgccccaccacgaaaaaagttgcgtgcaggcccctggctttcagttcgtcgagaagccgttcggtgtatttccccgggccgtcgtcaaaggtcagcgcgatcagcttggtccctgcttcatagacgggtttttgaaactgcagcaccacatcccccgtttccgtgaccgaggcagcgggggtattgggagccatgccggaggatgcgatctgctgctcgagttgcacaattttcttctgggcatcttccagtttggctgtcaattcctctttttcggctgtcaggctttcggcctgtccggacagcgcatcgagctgcttctgaaggtcctgcatctgtgcttccagagaggcggcccgctccgccagcgtccggttttcctcggccaggcggtccgcttccgccccttctttctgcattcgatagaccgacataccgcctcctgccaaggacaggaccaacaccacggaaactgtcaaaagcccgacgaaaagccgccggctggtgcctttcaaattcctcatctatatgtacccgctttcctttaccgcttttttcattttagcatacccctttgaaaaaacaagtccgatccccgttttgtaatgatattgtaatcttttcggttctatgatatactagacaggtatctggtaagattttgcggaacggaggtatcggtacttgagtaaaaagacggtcctgtgcgcagacagcacgtgcgacctgggggacgagctgcgcgaaagataccatgtgcagtattttccctttcacgttattctcgacggccaaacctattcggacggggtggacctggttcccgacgaaatctatcgggtttaccgcgagaaaaatatcctgccgaaaacggcggccatcaacaccgccgaatacatggaatttttcaaacagttcaccgatcagggctatgaggtggtgcatctcaccctcggctcggggttgtcggccacctataacaactgccgtctggccgccgcggaaatgccgggtgtctatgccgtggatagccgcagcttatcgacggggtccggtctcgccgttctcgaggctgcggaccgcatcgcggccgggatgccggccgaacaggtcgcccgcgaggtgcaggagctgaccgcccgctgccatgccagttttgtcatcgacaccctggaattcctgtacaagggcgggcgctgctccgccctggccatgctgggggccaatctgctgcagctcaagccctgtatcgaggtcaatccagccgacggttcgatgaacgtggggaaaaaataccgcggttctctcgacaaggccctgtcccagtatgtccgggacaagctggagggatgcgccgatctgaagaccgaccgggtattcatcacccattcgggcatttcgcaggaacgcatcgacatggtgcgcgacctcgtcaaacagtacgcggatttcaaggaaatctatgtcacccgcgccggctgcaccatttcctcccactgtgggcccaatactcttggcgtcctcttcatgaccaacagctgataggggactctccaccggaagcccttcgtgtaaggaacgggtagaatactctgaagtaaaaggcagcctagtcggccgactaggctgccttttcccatatgcggctaggcttcggtcaccggcagccaaacctcataataccgatttttccggcgtgtatcgtggtctgtccaaagatgcagtacctcaatcatcatgtcctgcgtttgcctatacccggaagtcggaagccaggagtcccatatcagctcgaacagcttggggaattcctcccacgccagtccgccgcacccggttctgaaagcggcatatgtcccggcgggaatcgtgcgcttttcaagagcgccgttttttgtgtccgccttttcacgtgcaaccatgtagctgccgtcctgccaaataccgtaccatatgccgtcatatgcgtgattcccgggctggttccaacgcccctcgcaaatctgcccgggaacatcgccggcatcgtccgcccacatcgtgtgccgcagctcttctcttgtctgatacccctgtccgtcgaatggttttgcaacgccgcaaacctcggtgtccggtaactccagcattcgaaaatccatttccctggctcctttgatcatgatgtgaaaggaaacgggcggatagactttcagcgagccgccgaaacgctgaaacgcagtcggcgtgatgccgtgctgctttgcaaaggcccttgaaaaggcgtccgcgctttcatatccatattttatggacaggtctatgacccttgccgtactttgcttcaggtcgcaggccgcaagcgtcagcctccttcgccggacatattcgtgcaacgttatccccgtcatataactgaaaaagcgcatcaaactgtctcgggtaacgcaggcaattctcgccgcttcgtcaaaatggacgtcgttgcacaaattctgctcgatatagaccatggcggcgttgagctgtttgagcatatccatccgtttcaccttccgcgtgcagtatatcaaagaggattttgcgatgcccgactttttgggggcggaagcggtattatccggatatcccgacatggtctgcataagcgtccggtgatacggaaatacggccccgtatcgtatccggcgggaaagaaacaggtttcccgccggggaagccgccaaacccgccttgcttttaaaaagtaggcgggtttttcgattacagtatctccggccgaggccatcgttgtagcagcatatatccccggcgcccggatccagcctctgaagcacaacacggccgtccgcgccgtgagcgagagcgtactgtttacacagccttccacgcttcgtcgcaaaagccctcgggcttcgtgtaatccgcatagagggccttccgggtctggccaccttatcgtatgcgcagccacccacttttggcccgagcttcagctcgtagccgcaacagcattgttcgggaaccgaacgctgcaaaaatatttcagggcggttgccgattttctttcctataaatgaggcgatgacgaaatctcttgagacggcgtccatacaggagggccgaggcctccggatgtctggacggtcgtcaatccatgaatagccccataacaatgccggatcctaatcggccgccggctccgcttccggaaccgcgggggccgccaggccttccgtatccggcagccgccggatggtcagcacataggcggtcgtcaacgggatgagcgctccgaaccaggcgatcgggttggacaggcacacccctgcgtatccccagatattggcgagtaccagcgccgcgagggtccgcatcagcagttcggccacccccgcgatggtggggaacaggcttttgccgagtccctggagagtgtagcggaaaataaagagcagcgccaacaaaaaatacaaggatgcgttgagaagcaggtaggtctgcacataatccagcacctccggctggtccgcccccacaaacagacccgccatgggctttgcggccaatatcagggcgccgccgcacacgatgctgaaaccaaccgacatcaggatgcatcggcgcacaccggcacggatacgccgcatgttgcccgctccataattctgcgcagcgtaagtggccatggtgatcccgaaggacatcatcggctggttggccaactgatcgattttctgcgccgcgatgaatccggcgatcgctgttgagcccagccggttcagggcgatctgcaggatcatggcgccgatagcgataatactcatctgaaagcccatgggtaaccccacccggctctcgtttaggagcattctccgctccgggatccagtcccgccgctgcaggcgcagcacaggaaaacgccggaacatgtagaggagacagagcccgccggacaccagctgcgaaaaaactgtcgctacggctgcgccggccacccccatcgaacaccacaggatgagcacgaaatccagaccgatattgagcacacaggcggcggccagaaacaacaggggggtgcggctgtccccgagagcccggatgatgttggacagcaggttgaacatcaccgacgccccgatgcccgcaaagatgaccgcgatataggcgtgggcatcgtcaaggatatcctccggggtctgcatcagctccagcaccggccgtgccagcggtacgcttaccgccgtcaggatcacggtaatccccgctcccaacaggatgccagacgtcacgcttttgcgcacgccgtccatatcacccgccccgaaccgctgtgcggtgatgacggcgaagccggaggtcagtccctgcgaaaatccgataatcaaaaaggaaatactacccgtggcccccaccgccgccagagcctccaccccgatcgtccgtcccacgatcatggtatccgccatgctgtaaaattgctggaacaggttgccgatgagcagcggaatcgtgaaaaacaggatttgtttggctgggctgcccctggtcaggtcgttggtcacggttgtcgtctctcccgtcaggcggggggctgccggataggcaggctccctgtttcatctggtcgccggccgccgcataccgcggcccggcaatcgctagagtaccaccggtaccccctgttgtcaagcctattttatcctcaccggccattcccacggcagagagcgagaccgcccttacggttccagcaaaaaccggaaaatctcctcctcgccgcccatgcggtgcttagccgcccgccgtcatgttgtcccggcttagcaaaagcatcgtgatgccgatcagacggtttttccgcctccattgatgaggagccctatccccggccggacagcacccggcaataccggttgtgcagcatgttttgatagtcccattttccgaataggcgccggctgtcgggattcccgcaggcgcgggccatttccgagatagggactgtcaggcgggtatgctgggcgagggtgcggttgcccgcgtagttcatcaggacggcccggaccccgtccgttttcaggtttcccagcctgtacgattccgacggggtttcataattcgggtagacgtcgaaatgccggtccacataaaaaacgggggtatccgtgaccagattttcggtggtatggtcgagaagcagctcctcgaccagctctccttccggtttacccagcacctcttcgagcgaggcctttccataatgccgcagcgtccgccgagcgagcgccggcgggatcgcgcggatgtcctccggcgtgatccaatcgtcgtagaattgttcgttctcgccatcgcaggagccctgatgcagaaaaaacgcgaactcccgcccgcaggcggaacagcggttttccagatccagctcgtctatgagcttttcgatatggggcagctccccgatgttctgtttatagatgaacgtctggatccgcggcgcgatcccgttttcaagaaggcggtcgatggtctccaggatttcacggtacacccctttccgcccgaaaaacaggtccgtcgtctcttctccgccaaacagtgtcaactgggcagcccggacccccagggagcggagccagggaatatagttggagtcccgcaccgccctccagatactgaggttttcaaaatgcggtgtcttccggtcggacaacgcccctgtcagttcccacattttctgataatcgtccccataatccggttcccgataccaatccatgacctccagatcgcgggtgaacggccggaaggcctgcgcgacaaaccgaaggtccggttcctccagatgtccattcggtgtgacaccgagccagcaatggcggcagcggttaggacagccgcgcatgtcgagacacacagttatctgccggaatagcataggatccctcctttttccaacgccgccggacgtctctcagccggacggccaaaaatccggtatcatagaagattctttatatgctcaaaggagcctgcggaccgttctttaccaagagtctgtcctctttcacgcaaagtaagcccgctttcgtcgccccggccatcgtatccgcaccgtttatgaggaatatcgatgtctccccgcaaaagggaatgagaagggcgaacggacgcgttcgttcgcccttcttaagactagccggaatgttgccgggcagaatccgggaaaccgcgagccccatttgcgcgaaacggaaggctttacgtcacccataaacccgacagttttcttgttcgggcttgctgccgccagagcggcgggaggggcctcgccccgacagcgcttcttccagaggaaacacgctgtg

SEQ ID NO: 4122 - DNA, 4195 bp, Unknown
  16S sequences of unknown bacteria
atggttatcatggcagtgggcgtccgtccggataccgctctggctaaggatgccggtctggaactcaacaagcgcggcgcattcgttgtcaacgagcacatgctcaccagcgatccggatatctatgccgtaggcgacgctgtggaagtaaccgactttgtcaccggcgaaaaggcttatatcccgctggctggtcccgccaacaagcagggccgtattgctgccgacaacatctgcggcattcccactacctataagaataccctgggttccgctgtcctgaagatcttcgacatgactgtggctaccaccggtgtcaacgagcgtgctgccaaggctgccggcctggactacgacaaggtctacacctattccaacagccatgcttcctactatccgggcagcacaggtatgtccatcaagaccctgtatgagaagggcaccggcaagatcctgggtgctcagatcgtgggctttgacggcgtggacaagcgctgtgatgtactggcaaccgccatccgtgccggtatgaccgccaaggatctcaccgagctggaactgtgctacgcaccgcccttcggctctgccaaggacccggtaaacttcgtgggctatgtcatcgagaacatcctggctggccgtgtgaagaacttcttctgggacgatgtggcaaagctgcccagagacggcagcgtgaccctgctggatgtccgcaccgacctggagcgggagaacggtcagtatatcgaaggctttatccatattcccgtggacgagctgcgtgcccgtgccaatgaactggataagtccaagcctgtttacatccactgccgcaccggtctgcgcagctatgtagcctgctgcatgctggctggcatgggcttcgactgctacaacctgtcgggcggctggcgtctgtatgagtccatcctcagcgagaccaagtctcctgagcatggctgctacgatcccaactgagtttccatttcccctgagagcagctggaaaaacgcctgaatgggttcggagaggaacttgttccggtgatagaccagattgaatgtacgggagagctccgcatcctggattggcaggatgcggagtttttttatggggagggcctgttctgccagacggcgggagatcaccgaaagcccctgtccccgggccacagcctccagaatcgagtcggcgctgtggcagacccatttggcacggacatggatgccccggtgctccagttccgcttcgaactgttcccgggtgccgctgcccggttcccgcagcacaaagggctcgccttccaggtctgccatggtgatccgagtccggctgcagaacggatgcccctcggcacagatcagcaccagttcgtcccggagcaccgggcgggagagaagatccggctcggtcacatcgccttccaccaggccgaagtccagttcactggagaggatcttttcctcgatgacccgggtgttgtccaccagcacctccacggtgtccgatgggttttccgcttcgaaccgggctaccagcgcgggcagtacgcagctgcccacggtgatggtggcgcccacccggagggtccggttccgggaggcgtagtgcaggtcccgttccatctcctcaaataaagcggtgatatgccgggcataatccagaagctggcgtccttcccgggtgatgtagagccgccgggaaagccgttcaaacagtcggatgccatactcattttcgatttcggcgatcacctggctcacggtgggctgggcaatgtacagctcccgggcagcggcactcatgctgccggtctgggcaacggcgatgaagattttcagatgtcggaaggtcatgacagaacgctcctttgcgatatataagtaaaatactatcgatataatccaatattactattttaccaatagaaccgcaagaagtataatagcattgttatggaaaaaacaaagataaaaaaggggtattgaatatggcacttcaggaacaggatatcaagcgtgtaaaaggacagggcttcctgctcaaccggggaactgaggaattctccggacgcatcatcacagaaaatggcgtgctcactgcggcacagatgcgctgcctgagcgaagccgcggaaaagtacggcaacggcaagatcactttcacttcccgtctgaccgtggagctgcccggcatcgcctatgagaacatcactccgttcatcgagtttgtgggtcaggagggcatggttaccggcggtaccggttccaaggtgcgcccggtggtatcctgcaagggtacaacctgtgtctttggtctgtatgacacccaggagctggcccgggaaatccacgagcggttctatgtggcttatcacgatgtaaccctgccgcacaagttcaagatcgctgtgggcggctgtcccaacaactgcgtcaagccggacctcaacgatctgggtattgtgggtcagcgggtaccttctctctcggctgacaagtgccgtggctgcggcaagtgcggcgtacaggaggcctgccccatggcagccactgtccgggcagacggcaaggtgagcattgattccacgatctgcaacaactgcggacgctgcgccggcaagtgccccttcggcgctctggaaaccggcgagaccctctacaaggtctatgtaggcggacgctggggcaagaaggtacgcatgggcagcccgctccagaagctgttcacccgggaagaggtactgaatgtggtggaaaaggccatcctgctcttcaagagcaagggcgagagcggcgagcgcttcggtcagactgtggaccgtctgggcgtggagaaggtagagaagatgctcattgcggacaacctgctcaagcgcaaggaagagattctggagatggagaccatcggaggcgcaaaatgctgacaaaacgcatcctggctctgctggcagcgggtgtgatggcctgtactgtactggcaggctgtacttccgccccgcagaacggcacagaatcctcctcccagaccgcacagaccgaggcctattacaccttcaccgacgcactgggcaaggaggtcgtgctggaagcacagcctgagcgtgtggcagtgctgatgggctcctatgcggagacctggactctggcaggcggtatgccggtgggcgtcaccgatgactatatcaccgagcgtggtatggaggtcggcgaggacaccaaggtgatcggcactgtcaaggagccgaataccgaggaactgctggcactggacccggactttgtgattctttccaccgatgtggaaagccatgtgaatctggacaacaccctgacccaggcgggaatcccccatgcctacttcaaggtggaggcctttgaggactatctttccatgctgaagatctgtaccgacatcaccggacgggaggatctctatgaggaaaatggcctgaatatccagaagcagattgatgagatccttgccaaggtggaggcagccaagccggaggagcagcccacagtgctgtttatccgggcgctgtccaccacagccaaggccaaggcggatgacaatatgacctgtcagatgctggaagagctgggaactgacaacattgcagcccggcaccagtcgctgctggaggatctgagcatggagaccatcatcgccgaggacccggactatatctttgtcaccaccatgggcgactcccagaaggccattgatgccctcaaggccgggattgaatccaatcctgcctggggcagtctgtcggcggtgcagaacggacgctatctgatcctgcccaaggatctgttccactacaagcccaatgcgagatgggctgaaagctatgaatatctgggccggattctctatccggacctctttgaataaggagcggtccggacgccgggaggcgatcctgctggtgtccggtgtgctgctcctggttctggcagccgccagcatctgcatgggagcagtaccggtgaccctccgggaactggcagaggcgctcaccaccggagagaccgccacctccgcaggccggatcatctggtttgtgcggatgccccggactctggctgccatcctggccggatcggcgctggcagtatccggcgctgtgctccagaccgtgctgaataacccgctggcaagcccgagcatcatcggcgtcaatgccggt

SEQ ID NO: 4123 - DNA, 9522 bp, Unknown
  16S sequences of unknown bacteria
tttttgcaaaataaagatataatttacaatataatttgtctgggattgccccggcagataaaacattacggagaaactgaaaatggataaatattataaaactttggggttaagacccgaccggacggagcgggaagtccgccggcagtacaaaaaattggaaaaaaattacaacccggataactttgcggatccggggcaaaaaaagcatgcccggcaggcaatggaagaaataaaggacgcatatataaatatactcaattcttaccggggcagcgggtattcttcttacacatcttcccagcaatatcaacagcagacattcgccgaaagcgaatatacccgggaaaactacggaaagaacaccgccacccggcaggataggcaggaattttacgacagcataagaaaccttataaagcggggggaatacccgaatgccgtttcaatgctttcggcttacggggacacggaaaacgccctgtggaactttctcatgggtaccgcaaaatactacaacggacaggtaagcgagtctttggtttattttaaaaaagcaaagagacttgacccctataacgccgaatatcgggctgtggcagacagaatggagcagtcaagaaagggcaatattcacggcacatcatggaatggaaagggcaaccggacaaccgatgcaaactgcgacggcataggtccgcttattcggtgcggcatactgtcaaggtgcctgtaaggaatgcgccgatgaaaaaaacaaacgcaatgaagattgctttttgcggtataaccgccggcttgtgcaccgctgttatgcttatggggtacttgttcccttttgcaacatatgtatgcccggcaatggccgccctgctgcttttccccatagcttatgagtatggaacaaaaacatcttttacggtatatttagctgtgagttttttgtcctttttccttgtaccggattatgaacttgtgtttatgttcgttatggtctttggtctgtttacggttataaaattgcccatggacagaaaattcaagaaaaagacgaattatcttcttaaattcatatatgtaaacggcactttgtttctaagctactttattttgcttgtgattttccccgtgcaggctcttttgaacgaatttgccgagtacagcgtcggttttggcgccttgcttattgtgatgtttgacataactttttttctgtacgacaaagccatagaaaaaatgcttgtgatttacatttacaaattgcgaccgaaacttattaaaaaataaaataataaaacaaaaatcaccttgtaaaaatataatattacgaggtgattttttatgggttttaaacaatcgaaaacatttatgaatttacaaaccgtctttggggcagagtgcaaaagctttgccaaatattctatgtatgccgccaaagcaaaggaggacggctttgagcagataggggaaatatttgcccaaaccgcaggcaacgaacttgaacatgccaaaatacggtttaaactgataaacgaagccgatgatttaccttatacatcggacaatttaaaagaggcggaaatctgcgaaaattacgaaactcgggttatgtacaaacactttgccgctgtggcaaaagaggaaggttatcgcaaaatagccgatctgcttgaaaaaatagggcggacagaggctgcccacgaaagacgctttgccgcccttgcgctgaatatggacacggcaaaagtattttacaaagatgataaaaagatttgggtgtgccgcaactgcggatatgaaacctatgattggcagagcagggaaaaatgcccggtgtgcggggcagatcaaggattttctcaaataaagccggaaaattattgaacataacaaaagaatattttaattttgccgatacataataacttcggaacacaatccgcaaataaaacagataaggagtttgttgtgaaagcatttataaacgaagatttgtgtatcggttgcagtttgtgccggtcgatttgcccggcaatttttgttatggagaacgaaaaggccaaggtgcgaatgtgggatatagaacctatttatcaagatgatgttgaaaacgcacggcagtcatgcccatccggtgcaattataaccgagtaaaagaaaaaagccacggcaaatgccgtggcttttggctggggtactaggattcgaacctagggaatgccagagtcagagtctggtgccttaccgcttggcgataccccaatgtttaacgcctaaatatgataacacagaaatcggattttgtaaagcatttttttacaaaattttgcagccgggcaaaacgaagacaatcggcagtcaaaattttgaaaaaagttattttgcagaaaaggaaagataaaaacaaagccacggcaaatgccgtggcttttggctggggtactaggattcgaacctagggaatgccagagtcagagtctggtgccttaccgcttggcgataccccaatgcttaacgctcaaacataataacacacaatcggggatttgtaaagcacttttttgattttttgaaaaattatttcaatttttctgcccattccttttctttaaagccgataagcacaaaatcatcacctactaaaatcggccttttcacaagcataccgtcacttgcaagtaatcgcaatttctcctcatcggtcatattcggcaatttgtctttaagccccatattcttgtatatcaatccgcttgtgttgaaaaactttttgatttcaagtccgccttttgcctgccaaagtttaatttcttcttcggtgggattttcttctttgatgtggcgaccggtgtatttgataccggcatcgtcaagaaatttctttgctttcaggcaggtggaacacttgggatagtacacaaacaacataaaattatacctcgtttctttttcttattcagctacataataccacggaaaaagcgtataggaaacaacaatttttatcaaacgccgaaaaatcgacatttttcttctgtttaagccgaaaaaaacacaatttacttattgcaattatttttaaaagcagttataataattaacaaaagtgggtaaaagtgtccaatagtggttaaaaacacaaaatcggtgagaaaggggttgttcatatatgctgatgggcagatacgaatattcccttgacgctaaaagcagagtgaactttccgccgaaattccgtgccgaaatgggggacaacctgtatgtaaccaaatggtttgacggctgtcttgtggtttacggtgagcggcggtggcagagcttagatgaaaaatttgcccggttgccggttacaaaatcccgtgatttgcgccgtatcatatacggcaacgccaccgaggtacagccggacaaacagggcagaatcctgttgccgcagtatttaaaggaacacgcaaaaatccaaaaggatgttgtcgtcataggtgcaagggattacgccgaaatttgggacagacaagcctacgaagaatatgaaaaaacaaatgatttttcctcaatagagggaaaacttgacgatatggagttttaaattatgaccgaattcagccacaaatcaataatgctgaaccaatgtatagagggcttaaatataaaacccgacggtatatatgttgacggcacctgcggcggacggggacattcaaaggaaatcgccaaaaagcttaccaccggcaggctttacggctttgaccaagaccccgatgcggtggctgtggcaaccgaaaggctgcgggggttgcctgccacggttatacatgaaaacttccgcaacgcaaaggccgccttgcacaaattgggtgttgaaaaaatagacggcgtattgcttgaccttggggtttccagttaccagcttgatgcggcggaaagaggtttttcttacaacaacgacgcatatcttgatatgcgtatgagcaaagaaggaccctcggcggcggatttggtaaataccctgccgttgcaggatttgaccgatgttttgagaaactacggcgaggaaaagttcgcctaccaaatagcaaaaaaaattgtggctcgccgccgggatgaggagataaccacaacaaaacagctttccgacattgtaaacagcgcctatcctgcggcggagagaagaaaggccaaaaacccgtcccgcaaaactttccaggctttgcgcattgaagtaaacgatgaactgggtgctttggaggacgctttggacgaattttttgaaatgcttaatccggggggaagaatgtgcattatgacattccattcccttgaagaccgcatggttaagcagtattacaaaaagcttgcggtaaaatgtacctgtccgccggaatatcctatatgcgtttgcggcggcaaggcaaaagcggagattataacccgcaaaccgatagaggccgatcggcgggaacaggaagaaaacaggcgttcccgttcggcaaaactgagaatacttgaaaaactttaagtttctatgaatataacatacagagagggagaaaaaagatggtaaatcaaaacacggcttatgacctgtctttttacgaggcagaagaggaaagacaaattgcccgtaagcagacaaaagagagccgtttgataaaggccgagaggcgttattccataacgaagaaaatagccgatatagtaagcgttgcgcttgtggcagggcttttgatagctgtaattgccaccaatgccgcaattactgacacaacggttaaaattgccactgcaagagaggatatagttcaacttgaaagccaacgggattatttaaactttacccttgaaagcagaatgacccttgacgaaattgaaagttacgccgtgaacaacctgggaatggtaaaaatggactcctcccaaaagaagtatgtggaacttgaagatcaaaatgtgattgtaaaatacgatacaacggtatcatctaagataaacaaggctattcagccggttttgtcatattttatgccgtgataaaataatatttattgtaaattaggcggagagtaaagaaaattttgtattctgtacccttcgcctaaaatcgcaaattaaaagcatttgagagatttaagaaatgagcaaaaggataaaaggacagacaaatgtaacaaaaaagctaatcgggcgctcaaattttctgcttgtatgcatggttatgttgtttgtattggtttcagccaacttattcagaatacaaatactcaattacgaaaagtacaaggcggaggcaactcaggtacagttgagagagacacagctgtcggctaaaagaggtaccgtttacgattcaaatatgaaagttctcgctcaaagcgttacggtttggactatttttgtttcgccgaaagaacttgatgtgaacttcccggaagagcaaattgccggccttactaaagagcaaattcgggagaaatccagagaattggttgccgacgggctttcgcaaattttggaggttgataaggattccatacttgaaaaacttaaaaaaaccgacagctattatcaggttataaggcaaaaggtagataaacccttggcggatcgggtttcacggttctgccaagaaaatgatatagacggtgtaaatatagcggaggatcacaagagatattacccttacggcaactttgcatcaacggtcttgggattttgcggttccgacaatcagggcttgtccggtttggaaagctattatgatgaggaactcaccggcacggtgggcagggttatctctgccaaaaacggattgggctacgatatgggcaccgattacgaagttttggcggaggcaaaagacggttacagtcttgtgaccaccattgacgaaactatccagcactaccttgaaaaccggttgcggacgggtatagaagaaaacgccgttttaaacggtgcttgcggcattgtaatgaatgtgaaaaccggggcaattttggcattggcaagttatccgaactacgaccctgatgacccgtacacccttgttaacaccgatttgtacaacagtataacggccatcgaaaacccggaagaacaaaatgcccggatgagtgaggcaagacaaaaacaatggcgcaacaaggcggtaaacgatttgtatgaaccgggttcggttttcaaaatagtaaccgccgccggcgctttggattccggcgcagcctctcttacatcaacctatgtttgccgtggcgctgttacggttgaggacagggttatgcgctgtgcccaaacaagcggccacggcacggaaacatttgcccaggcacttatgaattcctgtaacccggcttttatagccataggtacggcaatgggcaaagatgttttttacgattatttctactctttcggtcttgcggaaaaaacgggaatagacctgcccggcgagactaacagtatttattacacagccgaaacccatacgccggttaccttggcaagttcggctttcggccagtcaaacaagataacacctatacagatgattactgccgttgccactgcggtaaacggcggcaatttggttacgccacatgtggttgaaaaacttttggattccgacggcaacgtggtaaaagatttaaccccggcaatacgccgccaggttataagcgaaagcgtaagtaaaacaatatgcagtattttgcaggataatgtaaatacagccgccggtcacggtaaaagcgcctatgtggcagggtacagagttggcggcaaaagcggtacttcacaaaaacttgacaacgccaacggttccgacagcgaatatatagcttcctttgtgggctttgcgccggcagatgacccggaaatcgcaatcctgataatgcttgacacgccaaccggccaaaacggttactacggcggttacacggcaggccctattgtaggtaaactcatgggtcaggtactgccgtacttaggggtagagccggtttactcggcaggcgaacaggccaccataaccgtaagatcggtaacgggagaatcggtttctcaggcaaccgaaactttgcaaagagcaggctttacggtaaaaaccgtaggcagtggctcaagcgttgtttcacagttcccggcttacggaacaaaaatgtccacaggcagcacggtgattctctacaccgaacaaggggagacaactatggttccggtgccggatttgtccggcaagtcggcacaaaacgcaagaagcgccctcacatcttcggggcttaatattgaggaaaccggcgcttacgccggctcaggcagcgttgtggtaaaatcccagtcgcctcgggcaggggacaaagtgccgcttggtaccactgtaacggtaacttatgtagacaacagtacatttgaataaacggaggtaaacaatgaatattcatcggttgttgcaaaatgtaaaatacacaggaaatccgggagattttgatacggattttgtcacggacgattccagaaaggtgcgagccggctgtgtgttcgtgcggagtaaaggcggcagttttgacggccacacctttgccgaaaaggcagttgaaatcggcgcaaaattgattgttgccgagagagatacaggtgttaaaaatcagattttggtggaaaattcaaggcaagcttatgcccttatgtgcggaaacttgtttgacaatccggcaaaaaaattaaaaatgataggcataaccggcacaaacggcaaaaccacctctgcttttttgattaaagatttgttacagcaaatgggcaaacaggttgggcttatgggcacggtacaaaatatgataggcagccagataataccggccaaattcaccacgccccagccatacgaactgaacgctttgcttagccaaatgtataagtccggctgtgagtatgcggttatggaaacatcaagccaggcattggcacaaaataggctctacggcataaaatttgatgtgggtgtttttacaaatctgacacaagaccacttggattatcacaagacaatggaaaactattttgacgcaaagtgtttgctttttcaaagcagtgaaaaaatagttgtaaattatgacgacccatacggcaaaaaggttgccgagagatttaaagacaaagaagttataactttttccgacagggacaacactgcggattacaccgccagaaatatagagtattcctcaaaaaatgtaaagtttttgatggttgcaaagggcagtataaacagagtggatttccctatgcccggtgaatattccgtccacaatgccatgggtgcggctttggctctcattgccttgggctttgacgaaacagatgtgtgcaccgctttaaatcatgttcatggcgtaaagggaagatgcgaaatacttgtaaaagaaccttttacagtcatatgcgactacgcccacacagacgacggattgaaaaatgtgctgtcatctctgcgcccatttgtaaagggcaggtttatagttttgttcggctgtgccggagaaagagacagcgcaaagcgtattttgatggctcacgccgtggcggactatgcggattatgtgttcctcaccagcgacaatccgagaggggagaatccgcagagcattatagacagtgtttccggttactttgatgagaaaaaagtaccttacactgcggaagttgacagaagaaaagctatcaattccgcccttaatatgttacaatataatgatacacttatattgtgcggtaaggggcacgaggactatcaggtgttaaacggcatcaccgtgtaccttgatgaacatgatatagtgaaaaaatttatggataattacaataaggaaaattgatatggaagcaattttactttcacagcttgtaaaaggttttgcaagcccggcaaatgactgctatataaccgatgtaacaaccgattcacgcagccggggcaagggcagtttgtttcttgccataaaaggcgaaagggtaaacggacaaaattttgcccggaaggcactgagccaaggtgcggaatttgttatcacagaagatttaattgccgatgtgcctgccgaaaaacagcgggttgttgcaaatgttcttgacgcaagcatcaaaatgggtgcaaatgtcagggcaaaatacaatcttgatgttatcggcgtaaccggcagcgtcggcaagacaacaacaaaagattttatttatgcggcaatttcgccttttgcccctacggtaaaaagtctgggcaatcggaataacgaactgggtatgccaaagacaatctacacatttacaaaggcggataaatttcgggttttggaaatgggtatggaaaacttcggcgatgtacacaaattgtcgatggccgcaaaaccaagagccgccgtaatcacaggtatcggggtttctcaccttgaaagaatgaaaacccgcgagaatatttttaaagcaaaaatggaaatatgcgacggtatgagcgatgacggggttcttgta

SEQ ID NO: 4124 - DNA, 3977 bp, Unknown
  16S sequences of unknown bacteria
ccgagcagggcctcgagccccctgccgcaggtcgcgaaaaactccatgggcacccctagttgttcgagaagaagccgtcgatgggcggaatgccgccaccgccaccgggcctgccgtcatcgtagccaccctcatcgccgtagtacccgtcgtagccgtcatagccgtcggggccgttcaggccgtcggccagcgcccagtcgagcccgtagttggcgcaggtctgctcgtcttcgtacaaaagcgcgatggcctggatgttcatctcgtcgccgcccacgacggagagcaggtcgtagagctggtaggccgtctccacgagcggcaaggtgatgcccagctgctctgcggtgtcgagcgcgacgtcgagggcgtcgaggaactcggagacgttgatgttgcccgagtagtcgtgcgcgagcatacgcggcacgtagtcgataagcgcacgggaaccgcccgacgtcgatgcgagcgtgctgatggccttgctgtcgttgaagcccgcaatatgcgcgatggacatggcctcgatggcgcccatcatcgagccggcgagcgagatgtaggcgatcatcgcggcaaactgcccctcgcccacgccggactgcgggtacaccgccggcgccaggtatgggaacagcgcggacaggtcctcgatggcgtctttgttgccgccgacgaacacgcacgcctgctccttctcgccgaggttgacgacgggagcgtcgagcacctcgatatccgagatagccgccatggcggctatctcgcgggcgagttgcggcgtggaaaagctcaggtcaacggcgtacatgccgggttccatgagctcgagcagcccgttgtcgcccagatacaggttctctacctcggccggcgtgcgaaacgaggtgatgacgacctgcgagtcatcgagcgctgccatgcggtcggagaccgtcgggataccgacctcgcgcagcaacccggcctcgatccggtgccagcttccggcgacgacgtcgaagccggctttttgcagctttacgattgcctcggtgacggcgggattgccggagccgccaaagtacgtgatgcgcgtgtcagagggactaatcatgttctcacccaaacttacgtgaaagcggtgccgcagctgcctcgcagctcagacggcaccgcatggttatgacttgctcgtgttattcgtcttcggagctcagacggtttgcgatgcggtctgcgatggaggccttcttgcgacggtccggaccccagatggcgattgccaccatgcccggccccacatggctgccgatgacgggcccgatgtggcaacgcaccaccggcaggctcccctcggggcggcgcaggtgctcctcgacccacttcgcgtcgttttcggcatcggcagagcctatgaggatcgactcgtccgagctgccgccgtccgcatgcgtgtcctcgtagaacttcacgatcgatttgagcgccttcttgcgtccgcgcgccatgcccgtcatggaaagcgtcccgtcgaggttgaagctgagcatcggcttgatgttgagcttgtcgccgatcgttgccgccgcgctcgggatgcggcctccgcggcgcaggtggtcgagctcgtcgagcgtgaagtagctgttgacgtaccagcgcgcctcttcagcccagctggccagctgcttggcgctcaggccgcggttgcgctggcgaatggcctcataggcgagcaggccttctgcgatggaggcgagcttggtgtcgaccacgtacagctcgaactccgggtgcttctcgcggacgcctgccgccatgcgctcgaccgtctcgaacgtgccggacagccccgaggaaaacgcgaggtagaccgtgggcgtacccgtctcggctgccttctcgagcgtctcctcgatgacggcgatcgggatctgggccgtgcccgagacctcgccgccgcgcaggcggtcgtagaactccttgggctgcatgctcgcccacatatcgtcgctgtgctcgccatcgttcatcatgaacgggaagcggaagaactcgacgcccgcctgctccatcagctctttgggcaggtcgcagcaggaatcgaggatgaggttgcagcgtatcttgctttgcatggcagtgcctttctacgcgtcaggacacgtctatctgtacagttcgccgagaccgcgcgtctcgatgacgatggaattgcgcttttcgaacaggttgcgctcgatgccgcaggggtactcgtgcgggttgtggaaacgcttgatcgagtcgtccagcttggacagctgctcctggcagcgcgcacgtccagcgcgggcgctgatgtcgacatcctcgacctggccattcgtgacgagccgcttgaggagcgtctcgaacttctggccttcgtcgaacttgcggcgacgcgcggcgtcgagcgggtcgacgatgaccgcgagctcgggaaccccgtcgttgacgtcgaagatgaggtctccggagaaccttccctcgctatcgtagtagcggcgcgtgtccagcacacccgggatggtacgcttgtagacctgctcggagatcttcatgcgcgggatccactcgtcggagcccttctccctgatggcggacagcttgtagacgccgccgagtgcaggctggccgtatgccgcggcaagatgcgtgcccacgccaagcgccgtgtagcaggcaccttgctcgttgagcgattggatggtgtattcgtcgaggtcgttggaaagcacgatgccacagtcctcgaagcccgcctcgtcgagcagggcgcgcgccttcttggaaagccaggcgaggtcgcccgaatcgatgcggatgccgcgcagcttgtggcccttctcgcgcagctcgcgcccgacggtgatggcgtttttcacgccggtctccacatcgtaagtgtccacgagcagcacgcagttgtcgggcatcgcctcggcatatgcgcgaaacgccgtgagctcgtcgggaaacgacatgacccacgagtgcgcgtgcgtgccgccgatggggatatcgtacttcatgccggcgagcacgttcgcgaccgacgcgcagccgccgacgtaggcagccctgctcgaggacatggcgccgtcgggcccctgtgcgcggcgcagcccgaactcggacaccggcctaccctgcgcggcgcggcacacgcgcgcggccttggtcgcgatgagggtctgaaagttgaccccgttgaggatggcgggctcgagaatctggcactgcagcagcggccccatgaccctgacgagcggctcgcgcgggaacacgaccgtgccgtcgggcacgatgtcgatcgtcacgtcgagcttcatctcgcgcagatacgagaggaagttcttgtcgaacagcggcgttcccgcgggtgagggaagcgacgcaaggtatgcgatgtcctcgtcggtaaagccaaagccctcgacgagctccgcgacctggtcgcagccgcagaagatgccgtagcctccctcgaacgggttgtcgcggaagaacgtgtagaagcacgcttctgtctcgagcttgccctgcgcccagtacccctgggccatcgtgagctcgtagaggtcggtcagaagcgtcatgttgcgtgccatagctattcgcctgctccagattcgcccgaagtgttcttgttgggggcacccgaggcgcccttgttaccgcccgaccggcgccgacggcgcttgcggggtcgattgttcttttgctcggcgggcttgtcggtgcgtgcggcgtcgccgctcaccgtcgaggaatgctgcccggggcgcggtttgccctcgggcctcgaagaattctgcttggcgccgtcttgcctgtttgcgccctcgccctggcccctgccatggccaccgcggctgcggcgtcggcgcgagcgctgcttttgggagtcgtcggaacgcgcaggcttggatgcgccttccgtacgctccgtctcgtgcttttcc

SEQ ID NO: 4125 - DNA, 10269 bp, Unknown
  16S sequences of unknown bacteria
gcagtgttctctgcctgctcttccgttgtttccaattcctccgctgacgtctgttccggctctgccggttcctcaggctccgttgccgcctctaccacctcgtcagtgctgtccggctcctgcggcccgtcatcctcatcgtcgggtccctccggactgtgcggcagaatcgactccacttccatatgaggacgcggaatcacatgtacgctgatcagttcaccgacacgctgcgctgcagctgcaccggcgtcggtcgctgccttcaccgcgccgacatcaccacggaccattacggtcaccagcgcgcctccaatatgctctttgccgatcaaggtgacgttggccgctttaaccatagcatctgctgcttcaatcgagccgatcaaaccctttgtttcaatcatacccaatgcctgcatcctgtttcacctccatctcggctgtctttttatccggggggcagttttgtttccaaaactgccccatgttgtctctatccttatttctgcatcttctggcacagcgtgccgccgatggtcttgtggatcatctgcgagaataaattgatcaaatacgcaatatgaactttctgcgtctgtgtcagcatgtctgcgttctcatagtaaaaccgataggtttcccctctcagataatgcagcgcagcagcttccgtgccgtggtttgcaagaaggatcgcccgagtcatatgaaaacattccctatggggttgtttcagatcctctgcggtcatgccgctgcaagtacccggcaccaagatgttgatcgcgctgccctcttcaatgctgcacaggctgcactccatatcaaaaatctcattggcgaggatttgattttgtgcgtacagttccgtcgcctgtttcaaatacagcgcctggagcgcacaaaaacggcctttgagtttctcattgcagagattgggatccggtgcggcagtgtcgtcgcacaccggcgcggcactgggtgctgtttccttgggctcagcggacgtcggcgcatcagcgctgtattcctctgtcccatcgatccggatcgtggcggttttggacggtttcacgtccgccggatccacgatggaaatctgacggtccgccagaaactgccgggcaccgggcgtcagccgttctccctcaaccagcgtaaagctttcaaaggcttgcttgccatacaaatcacgcaggttctgttctgtaatgtaaatcatcggcatcctcctttcttcaaaaatcgctcttcccagatcgccttaatgcgttccgtcaaagcgtccattccctgcccactcaggacggaaatttcgtaataaggttcttccacacctgcagcccgcagctccgcacggcagtgctccatatcttcagcacccagatccgctttggtgattacacccagaaccggaatgcggaatactttcgaaaatcccggcggatagcttcgcttgcgtgccgttggatcacacaacatcaacatacaataggcgtcttgctgtgcggcaatcaaatgcttgtgcatatcgttgctctccacataagaaccgggcacatccagcgtattccttccatataccatatgcggcgtacgcttgggcggcgtgtcaatttcattgagataattggccaacagcgttttcccggattctctagcgcctaaaatcataatgcgttttttcttcatgtcttcgttaccggcacgacatcaaactgcaaaatggtcttcaatttctccgtaacggctttaagcgcggtttccacactttgcacatcgcccataatcacaacggaaccggtaaagcggtccagaaacccgatatccacatccgcagctttcactgcaatatctgcggctatcatagatgtctcatagggcgagagcgtcaggattccgatggcgccgccctcttcaattcccagcgattcataaatgctgggaattggagaggcaattacatgcgcaatcgtaacctgtttgccaggtacggattcttcaataattcgattaacggattccaccagagaggtcaccacccggcaactgctgcaacgggtgatctgctacatattgaacggctttggcaaacgcctcgccagcagcgcggcatgcggactgttcacccttgaggatgccgccgccgcagttggtgtaggtaggcggtgcccagaatgcagcaacttccacttccgccgccttcagggcggcatccatcgcatacatggattcgttgggcggcgcaatcacatacagcagtgcttcgccttccttcaccgtcgaaatctggggccaataggtcccggaacggctgatcacatgcgaaatataagcaatggagtcatcttcattgcagctgacaaaataggcatcgttttccacaacatgatgaatgattttgaaagcactgacgatatcttccggattcggagcggaaaatgcaccgtagaattcaccgctcagtttgaagctggcattcgcagcaccagcatacagcgcagtggcgtgtacgatctgaatgtctgtgctcttacttgcctcatccattccgatatagcagacatcatcgcagtccgctgtaaaaatgccaaggcttctgtgcccttccgggatggggaactgctttctgtactgttcattcatgttcgggataattttctcgctgaggatcttcgaccttaaaatatcgcctttcatactctcatcctcttatccttaaaactcgtatttcttgatcttctcgtgcacgatccagtgggtgtgcagacccttggggcagaagaacagatcaccgggacgaaccgtgacttcaccgccgggataacggagcgttgcgcagccatagataaccagagcggtttcattgtgatcatagtcaaaatcaaactcgcagggatcgctttcccaagtgatttctttgctgatatactcgatttcgccttcggtgggctttcttaccaggatttccagattttgcatagttctcttctccttttcagtcagatatcaatttcatgcacgctcttttttgacaatgtggatatgcgattgatccgtcattcccagagcattagcttcttccgtatccagatggcactccagtctggaattgttattggcgcgaatcacaacgtcgtggagcaaacccgcacgtgtgccctcgcactcaaggtcgacaatctctccgtccgtcacaccgaaccgcgctgcgtcctcgcaggtcatatggatatgccgctgcgcaatcataacgccttccgggatctgtacgctgcctttcggtccaatcagggtgatcccgggcgttcctcccagcacaccggacatgcgtacttcgcctttaacaccaagcttaaacgtatcgcccgccaagatctcgacctgtgtttgcttacgtaccggtccgagcacccgaactttctcaattgcccctttagggccgcagattgtcagagtctctttgcatgcatactggcccggctgtaccagatccttgatgttgttcagctggtaaccagccccgaacagcttctccagatcctgctgagacaggtgaatatgccggttcgagattcccaagggaattgcgccagggccgccgctttcattctgtacacggctcactgccgcagcgatcatgcgcagcaattcttcgcactgtacatccatcgtgctcttccctccgtttctcagcgcatgttcttagccacttcgtggatgattttgcgcagttcttcttcattgatggaaatgccgcccgcctggttcttgccggtgcagcagcccacgctgatcgcattctgtccgggcgtcgccagcacgctttccagcgttgcaccgccgcagcagctgctgcccttttctgctttgacctgatccagcagctctttgagcttcggattgacctgcaggatggaatccacattgcggataggatagacaactttcttgatattgatcaactgcaacggagtcacattctcagaggtagcgctgccgccgcaggtgccgcagcccaaagtgaacgcaggcgcaagaccggtgcacatacccgtaccgccctggctgccgccaacgttgatgaggatgcgggatgcaggcttgatggaaaacgccttcgcaacctccgggttctccgtatggacgctcatggtgtggccaatgccgttttcaagcagcttgaagctcagctcacaggcctcgttgcaatccttcaccacatagaatgccagcacggtagtcagcttttcataagagagcggataagcggggccaacgccatcctgcttacccaaaagcaccttggtgccgtcgggaactgcaacaccggcagcatctgcaatatactttgcacttctgccgacgaacttggcattcatggaagtaccgttcttgaagagcagcttgcataccttggccgtttcatcggctgtcatgaagtagccgccttgggcgcggaattcatccatcacctggttggcaatgcactcatccaccacaacagactgttctgaagcgcagatcgtaccgttatcaaaagtcttgctgccgataatatctgccacggactggcggatattcgcgctgcgctcaatgtaggaaggcgagttgcccgcgcccacgcccagagccggctttccggcactgtatgcggccttgaccataccaggaccgccggtagcaataatcatgctgacttcctttgcatgcatcagctcattggtcgattccatggtgggggtttccacacactggatgacattcttcggcgcaccggcttcctcggccgcctgggccatcagatccgcagccaacttggtgcacttgaacgcggaaggatggggcgcaaacacgatcgcatctcttgctttcatagcaatcattgctttataaattgccgtagaagtcgggttcgtggaaggcacaatgcccatgaccaagcccataggctctgccacagaggtgaccttgttggcagtatcctgcgccactacaccgatggttttcatgtccttgatatagttataaacgaactgccctgccagatagtttttaaagaccttatcttctaccttgccgaaaccagtctcttccactgccatcttggccaggataatggcattgtcaatggcttttttaaccatgttgcgcagaatacggtcgacctgctcttcggtgtaattcgcaaactgctgtgcagcaattttgccctgtcttgccaggactcttgcttcctgaatggactgtacgtctttatccaatgtttccagcttcatacttggtctcctttttctataaactcaaatttacatcagcgactgaatcaaaaccggcgagggagatgggatcacttcaaagtttaccatcaaacccttgctctgcacaatttccttgccggcgtccgtaccggattttacggccgccacatcacccgtataggtgaagaaagactttccgcccaaaccgttgcccagacgcagttcaacgccgtccagatccgccgccttaagaatcgcatctgcggtttccagcatagcagcaatggaaaacgactccatgattcccagggcattgatcccttcggtgcaggtggctccggtaatggccgggaacacctgaggatggacgttcgggatcaccatagagtcaatgtaatattcaccggcctcccgctctcccgtttcaatcgaagtcttcacagccgccacgtcgccatgcacaatggccacatactttccagggcaggatgtgcttgcggtaacgacttccacttcggagaccttgaccatttggtccgccgcataaatgccgcgcgcaatgctggaaaactccaccattccaatcgctctctgcatttccttatcctccaatctcaatatatctgtctgtaatgctcagcaccttgccgctgatggacgcatgaattggtgctcccagtttaccttcctggatctttccgatcatctggccggcttccacatggtcgcccaccgcaacaaccggctcgcacggagcgcccacacactggcccagcgcgatatgaacgttgtttaccttcaagtcggtatccaccatcggagccttgcaatcataggccgtcagacccaatctggccaccagacgtttgctcggaaccttccggtattcccgcgccgctctggtttcatactcttccgtcttgcgctcataacgcagcttctgttccataacctcgttgcggaagcgaagattattcaatctcggatgcaatcctgcagggcaggagaaatattcacagaggttgcactggcaacacaacagtgcattgagcttaccgcctacttcatcaatgttgtagccgccgatgcgcatcagcttatgcggctgcatatcatgccccagaagataacggggacacagatccgtgcacatgcggcactgctcacaggcggagcggttgacccgccgggctgcttccatagtgcaactcttcttctgaatcagcggatgatccttgggaagaatgataaaccctttgttctttttggtgatataaccactgtaatcggtcagcagcggtcccatcatcgggccaccgtcaatgaccgcataatcttcaaaattttcaatgccggaaagtttcagcacgtccagaatcggcgttcccaccggcaccttaacggtaacatggttcggaatatcgccagccaacgtgatatatttttccgttacgctttgtccgttggccgctttatatatattcagagccgtttccacattgcagaccacacagcccacattgatcgggattccggcttcgggaacgatacggcccgttgtttcatataccaaaacctgctcgtcaccagcaggatacatgtccggcaaaatgccgatcttcacataatccgaaaatccaagcgcctgaatgcgctcttccaaaatcgcaataacatccttgtgcttacccttgatgccaatgatcgcctgatcagcgccgaccaggcggccagccatttcaaagcctcgaatgacgtcatccggataaaactccatcaactgctggtccacccgcagcaacggttcgcactcggcaccgttgagcagaatataatccgctttggccgccagcttaacatgtgtcgggaatccggcgccgcctgcaccgataatccccgcatccttgatcatctctaacaattccatacctgcctccatctacataatgatttctttcgtgcagctttttgcaattcccagcggcgtcacaaacatgggtttttttgggggggataggtcgggatcccgacgtacttttccacaacatcttccactccggtcaggcagcaggtacctccgaccagataaatttcttccacgtcatgccccgcaacacatcgtttaatgatatctgccactttttcaatcgtcggtttcagaaccggcagcaattctttgtggtgtttgggatctcttttataatgctccgcttctgcaaaatccaaatgcaacgcaccagcaaccacaagcgcgaactaagttccgccggtaggctcatcgatcacctcggtcaccataccgtctttcaggatcgatatgccggtcgctccgccgccgacatcaacgacagcgccgtttttaatcttcagaatcgcattggcggccgtgggctcatccaacacccgggccaactcaacccctgccgcctgtaccacatttttaattacgccggaatccaaggaggcggttcccggtggaatagcagctgcagcataaagcagttccgttccaagcttttctccatttcccgaacgattcgaactgcaccaatatagtccacaaccataccgtcgcgaacgacatccgcatactggtatgcaccggcaaccggctgaaactgttcattcaaaacaacgacggccacacaggcagtgccaagatcaacaccgtataatatacctgagactttgccacaatggggtgctttgtaacgtcctcaaaggtatcaatcagcgcgtcacactcccgaaatctctcgtcggccgccctcataatgcctccctttggaatattcagcgaagggaaaatccgctggtcagtgtgcagcttctcttgcaggcaaaatcacgtgcggtcgtaataccttcgcccgtgacatttgcaatcgtaaaacttgccatttcctctccgttcaggccgatacctgccagagaggagccgttcttaataaaaaccgtcgtattcataatctttgcagccttgctcaaccggtcgatgcactgggagtgaaccatcgccgtatgacggtatccctgctccgtaaacagtgccgtttcgagggcttcctcaaagtctgccaccgccaccagcggtactacaggcatcaagcactcctccaacaccagcggatgcttagcaaaggtacgcaccacaaccagccgcaccgggcggttgggatggatccccgcttcctccaggatatccatggcgctcttgccttccatcttacggaccatcttcatatcatgattcaagaccgttttggtcagttgaagcatctctgtttcgttgtcgatgtaataaacgccgttttcctccagctgtttgacaaacgcgggaacgatggactctaccgccacaatgcacttctcactgatgcacataatgttgttatcaaatgaagcgccgtccgaaatatctttggctgccttggccaaatccgccgtctcatccacaatggctaccggattggcagggccaccggcgatgacacgctttggactgcacagcacatgactcatcatctttctgccgccggtagctaccaccagcgccacatcgggatgattgatgatttctgtgagaagatcattgcgggattccggcaatgttaccaccaggttttgaatgccgcaggcttcctcgatagcctcgttgatcttctccgtcaggaactgcgaagtttccatgcagcggggattgggaatgctgatcacagaattgcccgcggccagcatgctgatcacattgttgatcatcgttgcacacggattggtcgcagggtaaatcgcgagaacaacgccgtaaggagcctgctcgtgcagcgtcatgccatggtcgccagtgacaacttcggagagcagatcttccacgccgggcgttttatccagggccaaaaccaatttaatgatcttgtcgcggacattgcccatgcatgtttctgcatattcccgctctgcgatctcctgaagataaggacgcagcttgacccggatggcggcaataacatcccgcctacagttcaggctccgggaggaatactcctcaaaggcctgcaaagaggcacacacggccaaattcacgatatgtatctgcttatcctgcgcattgtaatccatagctgtgcctccatttactcctcaacgatccgaataccgaatttctccacatactcttttgcaagagctgtcagaacatctccggcatgaatctgaaattctccgccttgcggaacatcccgcagatcctgcatggtaataaacctcgctttgctctgcggtttcacttctgctttgacatttttgaaatgctggttacaggaatcctcatcttccacaaaacatatcccataagatttcacatcttgataataggaaagaatcttcttccgatatgccgccggctcttttccggtgaacatcggattctctttcttcatgtacacacgaagtccgccctcgatgcaccgtctgatccagccgccttcaaaatcctccgaaaggcacagtgctgttttgatcacacgatcccggcacggtatcgggaagatcgttatggatccctccgcgggagcatgcaagtcgccgtaaacggcgactgtgcatgctcccacattggaaaaacgttcttcattcgcatcccgctccggcagaacaatcactctctggtacttgccctcggcagccttcagcatcggcatgtactggctgtcctgacaattctgccaacctttcgggaatatgaaatatgcttttggcaaagatgatgaatccatgttcgaagtcagtgattctccctcgctgacgcggcgaagaacctcccggatgatctgtcgaatctgttgctcatccattgccgttcacctttctcagcctaagcttttctgcttgcagatacgccgttattcggacttgcccgctccggtgtagccgccgccgttaggcttggaaggcaaaatattctcgacctcaacatggggtctggggatgacatggacgccaatca

SEQ ID NO: 4126 - DNA, 3913 bp, Unknown
  16S sequences of unknown bacteria
tgcggttttttcttccttatgattgaatagaagcaaggaggctgccatggggaaaaaaatcctgccggaagaacggcgcttgagaatctacaacattgtgcaaagacggggaacggcaacgctgggagagatgtgtgcagaactgggcgttagtgaatcgactgtgcggctggatcttaacaagatggaacagcaggggctaatcaagcgcacacacggcggcgcagtactttcagagtcggcggccgtgaaccatgagcggcaatggatgatggagagtttatcggtcaaccggcgcattcagcaaaatgcagtggaaaaggacgccattggacgggcggctgctgcaatgatcaaggatggagagagcctcatgatagacggcggcagtacgacgccatatgtggccaatcatctgctggataagcgtgggcttaccatcatcaccaattcggtctttttgattccgactcttatggcaaacccagacgcaacgctatatctatcgggtggcgttatataccgagagatcgcagtttcggtaggggagaccaccaacgcatacctggggcagttttccgtggataagacaattcttggcatcaatgggttttcggtaaagcatggtttgaccgtagcggacgcgcgggagccggaggtattgtccgctaaaaataagatgatagaggcgtgctcggagctaattattgtatgcgaccatactaagattgggatggtctgtttagcgtcgttagggtttccacaggtaaagacctgcctggttaccgggtatgaggccgatgcgcaaagcattgcacagtttcgagagatgggcatacaggtggaactggtagaatacgaaacggagcaataagcgagcggccactatgccctttttacataagaaatgctgcgcgaaaagaaacaaaaaggacgataaacctttgcagggcagtatatttttggcggacgaagaaaatagacgatattagaaatatcaaagagccgactgtatttacagacggctcttttcagctgcaagataagtttaatgttttaggaaaatgcttggcaacctggcggtgtacgaggtataatgcccgtgtgatagacctggaaagaggatgtgaagatggtactagccgtagaaattggcaatacccatatcagtttgggcggctttgacggagacgactgcaaatttgtcgctccgattgcgacggcccccaaacgaacaggggtagagattgcctgggagctcaagggcgttttttcgctgtttggtttgcaagccaatcagtttcatgctgccattgtagggtcagtggtgccgacgatgacggcggcagtgatacaggcgctgtcgcttttgggcatcgagcaggtgttgagcctttcttccggtgtaaggacgggggtaaacatcaagaccgaacagccgagaaagctgggtagcgacctggtggccaacgcggcttgggcgctttccaacgcgttgtttccctgtgtggtggtagatcttggaacggcgaccacctttactgtactcgatcaaacgggcgcattgataggcacagccatctgcgccggcgtagacatttcgctggatgcgctgaaaaggcagaccgagcagctgacgcatgtgatgctgcagacgccaaaacacggcgtgctggggcataatacagaggaggctatcaaggctggtgcggtatttggtacggcttcgatggtggatggaatgctgttgcgctatacagaggaactgggtacgcagccgcatgtgttgattaccggaggcgcggccgagccgattgtgccatatctgcgcacgccgcatcgtttggagccgtatttgacactgcgcgggctccattggatttggaaaaagaaccaggcctaggcacaaatattgcgccgcacccaaaggggcggcagcgggaggcagaaaatgcaaaacaaaaagaacaagacgcgcaaactaacgcaaatggcgttgctgacggccatcattcttttgatggcgtttacgccgctggggtatctgaggaccggcgtagtggagatcacgtttatcatgatcccagtggtggtaggggcgattttgatggggcccggtgccggcgctattttgggcggtgtattcgggctgacgagctttatccagtgctttggcatgagcgcgctgggggcgatgctactgcaggtaaactggttttttacgttcgtcgtatgctttgtgccgcgcgttctgacgggttggctggcagggctgatcttcaaagcgctgtataaggtagataagaccaggctagtgtcctttgcggtggcaagtttgagcggcgctgtgctcaatacgatcttttttgtaggttcgttggggctgctgttctataacacggtattgggcatggcggcagaatccgggatctctgtattggcgtttttgttgtcgtttgtaacgctgaacagcgtgctggagtgtgcggcatgtctgattgtgggaacggcgatcagcaaggcgctgtataaatcgtttggaagtataaaggaacaataaaaaagagccgctatcagcggctcttttttattgcaaaaattcgtgccagcgggtgctacggtatcgaagaacaaaacaaatggcgcgcacggcccagtcaatatacatggcgaaccaaacgcccatcacacccatgccgagatattttgccagcagatacccaaagccgatgcggaagatccacatggaaagaatggaaatcaccatgctgaatttcacatcgttggcagcgcgcagcgtattgggcagcgtaaacgccaatggccagatcaaaatagccgcaatgccgtgcgataggatgatctgcattgcaatggtactggcaacttcggaaaggttgtagagctttacgatcaccggcatagcaacgactacgaggatgttggttacaagcatggatagataggtgattttgagcagttttttggtaaaataccgcgcttgctcataatcaccggcgccgatgcaacgtgaaatgacggtaataactgcaaacccaagcgccatgccgggcagcaccatgaatgtggctagggtattgcccactgcattggcggcaatggcggcagtgccaaacccagagaccagtgataacagcatgattttgcccagctggaacatgctattttccagaccgttcggtacgcctatataaagtatgcgcttgataagcccgccgttgaagcgaaggacgaaggggcgtttgagatgcaccaaaagcttgggattccgtagcaatgcaatcatgactactgcggccacgatgcgggaaaacagcgtggggatggccgcgcctgctacctccattttgaagccgtaaataaggatggcattgcccacgacgttgatagcattcatcagcagtgaggtatacatggagatcttggaattgcccatggtacggaataatgctgctccgccgttatacagagcaataaagggaatggaaagcgatacaatatccagataggtactgcaatacgccattacttcgggagagatctgtccgaatacctgatgcaaaataaagccgcgcagcagatacaccagcgccataacgccgacggacagcgccgcaatgaacaataccagctgattggcggccgagcaggcattgtcctcctcctttgcccctaaaaattggccggccacaacagcgcccccggtggcgatggcggcaaagatctgaatgatcaaaatcatgatggagtctaccaaggacacggccgaaacgcctgcttcgcctacgctggcgaccatgatggtatccatcatgccgacgagtacggttaagagctgttcaatgatgagcggccaaatgagcttttttagatccttgttgctgaataacag

SEQ ID NO: 4127 - DNA, 18119 bp, Unknown
  16S sequences of unknown bacteria
tggacagcgcccgccgtaccagcggcaacggcttctattacctcaagggtgatgtagcccgtctgcattccgcaatcctgtcctatggccgtgacttcatgatcgaccgtggcttcacctactatatcccgccttatatgatccgcggcaatgttgtaaccggtgttatgagctttgctgaaatggacaacatgatgtacaagatcgagggtgaggatctctacctcatcggtacttcggagcattcgatgatcggtaagttcatcggtcagatcctggagaaggacgaactgccccagaccctgaccagctattctccctgcttccgtaaggaagtaggcgctcacggcattgaggagcgcggcgtataccgcatccatcagttcgagaagcaggagatgatcgttgtctgcgagccggaagacagcccgatgtggttcaacaagctctggcagaacaccgtagacttcttccgttccatggagattccggtccgcaccctggagtgctgctccggcgacctggctgacctgaaggtcaagagcctggacgttgaggcctggagcccccgtcagaagaagtactttgaggtaggcagctgctccaacctgggtgatgctcaggcccgccgtctgggtatccgcatccacggcaaggatggcaactacttcgcccatactctgaacaacacctgcgtagctccgccgagaatgctcatcgccttcctggagaaccatctgcaggctgacggcaccatctatatccccgaagtgctgcgtccctacatgggcggcaaggataagctggttcccaagaagaagtaagtttctttccgcatctgaaaaagccccgctccggcggggcttttttgcgtgccggaacagaggcggggattttcggtgaatctgcgccttgatgccgtcgccgggaagggctacaataaaatcagaggcatagccatggaatggacaaggagggatacgcatgaagaaactgcttgcgggactgctggctgccgtgctgctgacggcgccggcattcggggacgatacggtctgggacagcctggaggaccggtactatgaggacatttcccagacggagactgacatcaccctgcgctttctggaggagggcgaccagctggactggagccgtgcggtgcgccggtaccatatggaggattccctgctcacccggtcgggtgtggacgccttcctgaccgccgtccgttcaggagagcttttgagcagccgcatttcctatgacgagcggctgatggtctttgtggagcaggcggacggctccggcggcacagcggtggtcaatcccgggaagggagagatggtgggctacctgcccggagatgagggcgaaatgtttgtgatggagcttaccggcggggtcaaggcggcgctggaggactcgggcatcgacctgacccgggccgagtgctataatctctgcacagacgggctcggctgggggattctctattccgatgggaaaaccgagctgtaccagccgctgagtgagactccggctttcctggaggagggcacaacctacaccctggaggagctggcggacctggtggaggaacacgccggagaactgatccggtatgaggggctcaacgccgatctcgacccggaaaagcccaatgttgtcaccggcgcccagcccgagctgtctccccagcctgaaaagaagaatgcggacacaggacggtagcgggtatcgccctatggttcaaggaaatgaggtctgttatgaaaaatctcagacacaggaatcttcgccgtctcttgggcacagcgggcgccgtgtgggtctgccatctgttcagcggttatgcagtgtgtctgttccgtttcagttcttatctggccccaaccctggacggggaaataactctcggattacaggactactgtttctatattatctgtattatgatggcagtctgtgcggtttggctgacagaacgcccggaggatcaagagcgggaggtgcagatgcagttgatttttccacggaagccgatgcgcaaaggaaccaaatttgtcctggctgtggcaggcggcgtctatgcggcctatgcagtgggaggaatatccggatttttcccgttccttttcctgaccgctgaagccaaccggattttttacttcactgccatactctgtgtggtgatggcggtctgcaccctctatgtgaagaacggaggggagctgttccggcaggaaaatcctccggagcagtctgaaccggaacaccccgaacacaggccataaaaacagaaaagccccgctctaagcggggcttttgttgcgtatagggtcaggtgcgcctgatgtacttccacagggcgatgcagccaaggacgatcagcgccagcacgccgatgaggattacgccgttgagtatctgccacagaccggcccagagcggcagtattttgagcagggtatgggacattctgtctacctcctttgcggatacgggggtcggggacttcttttctttatcatagcacagtgaaaaactgcctgtcaaaccaaaagccccgtctgttcccgggagaacaggacggggcttttttccgcgctggggcgtttttatacatcgtgcttctgcagttcgcttgccagggtatcggataccaccttgccatcgatgatccggatggctcgggtggcctgacgggcaatgtcattgtcatgggtgatgaggacgatggtgcgtccctcctcattgagctcgtgcaggatcttcatgacctcttcaccgctgcgggtatccaggttgccggtgggttcgtcagccatgatgatgggcggacgggcagcaatggcccgggcaatggcaacacgctgctgctgaccgcccgacagctcactggggcggtggttcatacggtgttccattcccacacgggtcagggcttcctctgccagctgacggcgctgttcggcgggcatgccccggtagaccagcggcagttccacattttcctgggcggtgaggctgggaatcagattaaagccctggaaaataaaaccgatctgtttattgcggatatccgagagttcatcatcggtcatacctgccacattgacgccatccagatagtaatccccggaagtgggggtatccagacagcccagcatattcatgaaagtggacttaccggagccagaatgtccgacgattgccacaaattcgccatggtcaatggtgacactgatgccatccagtgcccggacttcattttcaccgggattatagatcttgtagacattttttacttcgatcagatgattggacatagcttcatctccgtttctctactcctttatagtatcgccggaaccggaaaaatacaagcaaacattttattaacaatttttagttacagaaaaggcgggaggagaatgcgaacagtttgtaaatattgtgaattcattttttaacacttgactgaaactgaaagttatatgataatggaacatgtaacaactgtaacacacgctgcattggcagcatagtacagtgctgacagaaggaagcgaacttggaatgccaaaactcaatattgtgctggtagaaccccggattcatgccaatgccggcaatatcgcccggacctgcgcggtgacaggggcacggctgcatctggtagggccctatggtttttcgctggatgacaagcatctcaagcgggcgggactggattactggcacctgctggacatcagttattatgacagcctcccggatttctttgaaaagaatccggatggggccttttactatttcaccaccaaagcgcacaaggtctataccgacattgcctatcccgataacagctatctctttttcgggcgggaagatgccggcctgccggaggatctgctccggtcggattatgaacactgtgtgcgtctgcccatgatccgggaagcccggagcctgaatctgtccaatactgtggcagtggcagtctatgaagtgctgcggcagtgggatttccctcagctggagaacttcggcaggctgccggattgatctcctgaaaaaacaccagaaagaaagcaaggaagaaaaagcgtatggagaagattttgctgctgaccgattccgccagcgacctgaccccggaggacgaagcccggactggaatccgggtactcaatctgccggtgagcgtcgagggaaaggaatacaccgaccgggtggatctcaccccggatgagatgtaccagatcctgaatacctgcaaggaactgcccaccactgcccatctgaatatggtggactttgccgaggcattccagaaagcagcagaggaaggctataccgacatcatctatatgggcctcaattcccatggttcggctacctatcagtcggcgctgctgggcaagaagctgttctatgagcatctgccccagtatgcggatgtgaagatccatctgctggattccctgagctattcctatggctatggctatccgctggtgctggcggcagcccgtcgggatcagggtgccaccgcggcggaactggtggactttatccaggacttcctgcgccgccgggagctctattttgctatgtataccctgcagtttgccaagcggtcgggccggatcggcgcggcggcaagctttgtgggggagatgctcgggctcaagccggtgatgacctttgagggcggcgacaacatcaccgctgccaaggtgcggggcgaaaagaatgtagtacccaggctgtttgaatactataaggaaaaccatgaccccggctgtccgaactatgtgctgctccagggcgaggacccgcagcccgcacaggagctgcaggcgctcattgaagcctataacggacagaagccggatatgctgggcaagatgggtgtctgtgtggcgatcaatgccggcccccggatcgtaggcatctccttccgtgggaaggacgcctgccatgccgtaggcgaggagcagtgagcaccctttgcagggaggaaccgctatgcggaaggaatttgagatacacggctgcattgaagtacctccggagatgaccgaggaggagttctggaaccgttttatccggtttgtggaggagaacggctggagcttcggcggcgggatctccgagatccgggacggctggtatatcctgccggacgggagccggggcagtcatgtcctggatggggaatagaaacacaaggccggtgcccttcgggacaccggcttttctgctgcccggatttccggggagaattttggggaaaacaccgatggacactccccgccccgaccgggtacaataggggaaaaagagagtcccgcccccggggcagggactccggatgcccgccccaaggaggaaaagccatgcagagaaagattcccgtccgttccatcctattcctgtccctgatccagatcgggctgcttctgctgctgcttgcctggtggggcggtttctatcagttcctgctgccggcagcggtgctgggtcaggcggactggggaaccggcgcctggctggctgcggaactgctgctgatcctgttcgtcatgaaccgcttctttgaggggtcggtctgccgggagccgagcggttcccagacgctcttccaacgggccaaaatctggctgtatgcgacgattttgtgtaccatcggttccctgggtcagatcgttgactcattcagagagctgggggtggagcacctcccggcagaggtgcggctgcggtttatcctggcggctggtctaccgctggtgctgttctgggccggggtgatctgggttggctggcgctggggtgaacagctccgggcagcggaggagaccgccgatgcggacgagcagcgcagccttgccgaccggcgcatgcggtttgccctctccggagtgggacggtatgccctgctgacggcggtctggctcctgctctttgcggcagtgtggtgggtgcgcacccggttcttctcataaaaccccatacaaaataaaaaagccgggggcggactgccttcggcttttcttgtgcaggtctgcggggatcagagcggctgtttgcccagagaggccagaatcagccggctgatggcatcgtccccgggctcaaactcatgcccggcttcggcgatgtcccagagatagtgggcgtcggaggataccacggtgcggcggtgttcccgggcggcttccacatcggggaagagaccgtcctcatagcggggagaaacctccaccgtgtcaaactcctcctcgcactcgggcggaatggagcccaggatcgccaggacgctgttggcgatcttgtcgatgtgtgccggatagcagacgccgccgtattcccgcaccagagccggagcttcggtgagggggatcatggtggcgttgagcagcagggtctcctcttcacccaccggacggtccagctcatccagacggatctggtgcccatagatcctcggcttgttcttgaccggaggcagagcctctgccacccgccgggaaaaggcttcggccttatcacagtcagggaagaggcagatcagatgaatatcttcggcagtggaaagctccatgccgggaataaagcccagaccggcctgtcgggctgccatggcagtggctcggcagttcatggcggtgttgtgatcggtgagggcgatacaggtcagtcccttgagcttggccatgttgacgatgttgttgggggtcatatcgtcatcgccgcagggggacagacaggagtgcagatgcaggtcgcagtagagtttcataacagagcatcaatccttttcgcagtttcaaatatcggttcatcgcagcggtataccgcaaccccctcgtcagcggctttccggatacattcttcgggtatggcagcattttccgccagtacaatgcaggcggcatctgccagtgtggcaactgccactgtattcatattgcccatgaccgtgacccaggcacagtccgccggagcccgtgccatagccagactgagcagatcacagcaatagatcttccggatctcccggtcctcgtcgggaccgcccagccgagtaaagcccggcagctggtccagttgtgataccgtcatcttggttgacaccttctttactgtattcagggttttgcggtatggcgttcccgctgtatgtaaatgcagtcttccaccgctgcccgtcccagagcgatatcggtggcaagtgcccggcaggaaggcgctccgcaggcgccgcagtccataccatagagatcttgttcaatttcatccacccgggccagcagttccatggcagtggtcagatccctggcaaggctcagtacctcacagaacttgatggggtggtcaaagagcatcagccgttcatcggtcacttccggcggctgtgcttccggggacagatgtccctggatcttctgcagccgggtgcgggccaggaagggattttccaccgtgaggattccgcctacacagccgcctgcacaggcactgagctccacaaaatccacatcggtgatcttttcgtcctccaggtcttccagcacccggataatattttcgatgccatccgctgccaggacggtaatgcctgagagtcccgcggcttctccgccggagagtccccagcccacacccagactgccgctgagcggaccggcttcgggcaggtcgtcccgtttcatggctgccagcagcgccggatagacatccttgatggacaccacaatgtccacttcacttttatcaaacccaagggggtcccggctggcggtggactttgccggacagggggagaggaacaccgttcccacttcctcaggccgacagccggttttccggcagaaatcctgtttggcaagccgtgccgccacttccaccggcggcagaatgggcaggatatttccggtgagattggggaaccgggtacggatcagccgcaccaccaccggacaggcacagctgatcaccggcaggggcagttttttctcatccaggtactgctgggtcagccgggtgactgcctcagcaccccgtgccacctcatagaccgcgtcaaatcccagtccgtacagcccccggatcaccggggcggggtcggtgagatgatggaactgtccatagagggacggcgccggcagggcaatggtataccggaaccggttggcatctgccagatggtccaccacagcggatttggcatgatgcggacagatatagatgcactggccgcagtcaatgcacagttcccgcaggatatgcgctttgccgtcctggacccggatggcagcggtgggacagcgcttgacacagttggtacagcccacacagagcccgctgtccagttttaccgagtgaaaaaaggattccatctttcttctgtccctccttccggaccgatgggtcagagcagaacggtcatacggactgtggtgcctacgcccacagtggattcgatctgcatggtatcggtgtattttttcatattgggaagtcccatgccggctccgaagcccaggctccgggcttcttccgaggcagtggaatatccctcctgcatggctttttcaatatcgggaatacccttgccatggtcctccaggatcatatccacccggtcggggctgacggtgaccgtcacttccccgccgccgccatggatcaccatattgatctccccttcatacagggcgatggaaacccggcggatggcttcagggcttactcccagccgtttgagccggttcttgacggtactggaggcctctcctgcccgggaatagtcgtcccccggcacctggaaccggtagcagagcccgctcacaggccgctgccgtccagtccggcggcatacagcttgccgcaggccgagaacatccgctcttcggtactgatcagcacaatgttgtactcacttgccagctggatcatggcgtcatccggacgcttgccccgtacaaaggcaatgcacaggaaatccatcatttcagcggtacggattacctggggattcaccagaccggtgagcagcagggactgatccttcacataggccagtacatcgctcatcagatcactgccgcaggcgttctgcacttcccgttcgcagagtttttcatcgccccagatcacttcagcggagagaatctggatcacttcggaaattttcatcatgtatcctcctttggatggatgggtggcttccggtctgccggcagcatcatgggtttcacagccggtcagacgcgatattgatactattatatcagtcaaaatctgctttatcaactatgggattcaccatttgcaatgaaaaaatagtgactgtgcataaaagaatctttgcaattttagcaacctgacaactgcaaaacaaaaaaattagtaaaaatccataggaaaatcccgggggatttctctggcaaacgaaaaggctgataattttttgacaaaaccgctatggacttttccttgtggattttgctataatttatggtgatttaaggggtaagatagttgttttatactaaaagagtctacttgaatcgcattttatcacagaccaaggaggtttgatttcagatggccaacagaaagtcagcgatcccgttctcgtccacaccggaacaggatcagaagctggaggaagtactccaggaactccgggggactcagggcgcggtcatgccggcgcttcagaaggcacaggagatttatgggtatcttcccattgaggtgcagcagcgggttgccgcgggactgaatgttccgctggaggagatatatggtgtatccaccttctattcccagttcaccctcaatcccaagggacagtataaagtatcggtctgcctgggtactgcctgctatgtaaagggctcgggcgacatttacaatgccctcaaggaaaagctgggcattgacggcggtgaatgcacagcagacggcaagttctcgctggatgcctgccggtgcatcggcgcctgcggactggcaccggtcatcaccatcaatgatgaggtgtatggacggctgatcgtagacgatctggacgagatcctggcccggtacaagtaacaccggaccggacactccggaacaggaggggaagatggaagaactctcgctgcacattctggatattgtggagaattcggtatctgccggcgcaacgctggtggagatccgcattgagtaccgattcggggagaaaccgtggctgaccattacagtccgggacaatggacggggtatgagcccggaagttgccggacgggtaagcgacccgttttataccacccggaccacccgcaaggtgggactggggacagccctgttccgtcagacagcggaactggcaggggggagcttccgggtgtggtccgagccgggcaagggcacagaagtcactgccgagctcaatccgctgcatctggacgcggtgcccatgggggatctgggcggcacttatggagtgctggtccagaccagtcccggggtggaactggtactgcacgccgtctgtgacggacgggagttcaccgctgatacccggcagttccgggaaattcttggcgatgtgcctctggatacgccggaggtgatcgcgtttctcacagagttcgtacgggagaactttgcggagatcctgcggggaagcccgcttgcatgaaacagattagaatggccaccgctggctggcggcaacggaccgaatcagggacgcccgtgcaggccggcggcatctgaaagtgaaccggaaattcacagacaggaatcctgttttataaagtatgataaacggctccggcccgaacagccggaaccggtacccggagaaacagcatcgaaaggggtaacaagagcatgaaaagtttggcagagcttcaggcgctgcgggaccagatgaaggatcagatgggcatccgccatgacgccaaggacaacattcgggtggtagtgggcatggctacctgcggtattgcggcaggtgcccgtccggtactgcagcgcctcaccgaagaagttgccaagagaggccttaaaaatgtcaccgtagcccagaccggctgcatcggcatctgtcagtatgagccggtggtggaagtctttgaaaacggcaaggaaaaggtgacctatgtgaagatgaccgaggataagatcgctcaggttgtggcagagcatctggtcaacggcaatcccattgtggaatacaccatcggcgcggcgcaggccgaagccaaggactgattggagggacggcaaagagatgtatcgttcacatgtactggtgtgcggaggcaccggctgtacctcctccggcagtgaccgtattgtacgggcactggaaaacaacatcaagagcgtagggctggagcaggaggtcaaggtcatccggaccggatgctttggtctgtgtgccctgggccccattatgattatctatcccgaaggcgcgttctactcccgggtgaatgttgacgatgtacccgagatcgtggaagaacacctgctcaagggccgtgtggtaaagcgtctgctctatcaggagactgtccaggaggacactgtcaagagcctggaccagaccgacttctacaagaagcagatgcgtgtggcgctcaagaactgcggcgtcatcgacccggagaacatcaacgagtacattgcctatgacggttatgcggccctgggcaaggtgctcaccgagatgacccccgaggaagtcattaagaccgtgaaggattccggcctgcgcggacgcggaggcggcggcttcctcaccggtcagaagtggagcttcggcgccgcttccaaggctgaccagaagtatgtggcctgcaacgccgatgaaggtgaccccggcgcattcatggaccgttccattctggaaggcgacccccatgtcatcatcgaggccatggccattgccgcctatgccatcggcgcaaaccacggctttgtctatatccgtgctgagtatcccattgcggtacagcgtctccagcacgccattgaccaggcccgggaagtgggtctgctgggcaagaatatcctgggcaccggcttcgatttcgatatggagctgcgtctgggcgccggcgcctttgtgtgcggtgaggaaactgccctgatgacctccatcgacggcaagcgcggcgagccccgtccccgtcctcccttcccgactactgccggtatcttcggcaagcccaccgtcctcaacaacgtcgagacctatgccaatatcccgcagatcatactcaatggcgctgagtggttccgttccatcggcaccgagaagagcaagggtaccaaggtattcgctctgggcggcaagatccacaacaccggtctggtggaagtgcccatgggcaccaccctccgggagatcgtggaggagatcggcggcggtatccccaacggcaagaagttcaaggcagcccagaccggcggtccgtccggcggctgtatccctgccaagtatctggatgtgccgattgattacgacaacctcatcgagatcggttcgatgatgggttccggcggtctgatcgtcatggacgaggatacctgtatggtggatattgccaagttctatctggaattcaccgtagatgagagctgcggcaagtgtacaccctgccgtgtgggcaccaagcgcctctatgaaatgctcgacaagatctccaagggccagggcactatggaagacctggacaagatggaggatctgtgctattacatcaaggaaaattcgctctgtggtctgggccagtcggctcccaacccggtgctgagtaccctcaagtacttccgtgacgaatatattgcccatatccaggacaagagatgtccggcgggtgtctgcaaggaactgctgcagtatgccatcgacccgcagaagtgccgcggctgtaccctgtgtgccaaggtctgcccggcgggcgccattaccggcaccgtcaaggaaccccatgtgatcgatcccggcaagtgcctcaagtgcggcgcctgcatggagaagtgccgcttcggcgcgattgtcagaaagtaggttgtgtgatagaatggatatggtaaatgtaaaaatcaacggcgagcagtataccgtgcccgccggcagcacaatcctggaggcggcccggtatgccggaattcatattcccaccctgtgctatctcaaggagatcaatgagatcggcgcctgccgtatctgtgtggtagaagtcaagggtgcccgcagcctggtagctgcctgcgtttacccggtagccgagggtatggagatcagcacctccagcccccgtgtattcgaagccagaagaaaaaccctggaactgatcctctccacccatgccaagaagtgtctgacctgcgtgcgtgcaggcagctgtgagctgcagaagctctgccgggaattcaaggtggacgatgaggagtactatgccggtgagaatatccagtatgaagtggatgactcggcagtacatatgtaccgggacaacaacaagtgtatcctctgccgccgctgtgtggcagcctgctccaagctgcagggcattggcgtcatcggccccaacgaccgtggcttcaagacccatatcggctgtgcctttgagcagaacctgagtgaagtagcctgtgtatcctgcggacagtgcatcgtggtatgtcccaccggcgctatcgccgagcacgacaacaccgatgaggtgtggaaggctctggcagacccgcagaagcatgtcattgtacagactgccccctccatccgtgtgaccctgggcgaagccttcaatatgcccatcggtaccaatgtcaccggcaagatggtcactgccctgcgccgtctgggctttaacgctgtctatgacaccgactttgccgctgacctcaccatcgtggaggaagccactgagttcatcgaacgggtgaagaacggcggcgttctgccgatgatcacctcctgttcgccgggctgggttgagttctgtgagcactactatcccgagtttatccccaacctctccacctgcaagagccctcagcagatgttcggcgccgtggccaagacctggtatgccaagaagatgggcattgatcccaaggatatctatgtggtcggcgttatgccctgtactgccaagaagttcgaaaccaagaactccgagagcaatgcggtggaagggctgtatgatgtagatgtagccatcaccacccgggaacttgcccggatgatcgagcgggccggcatccacttcaccagcctgccggacggcgaatttgacgcgcctctgggtatgtccaccggtgcgggcagcatcttcggcgccactggcggtgttatggaagctgccctgcgtaccgcggcggactggctcaccggcggtgagatgaagaagctcaacttcgaggaagtgcgcggcgtagctcccatcaaggaagctacctacaagatcggcgatctggaactgcatgtggcagttaccagcggtcttgccaatgcccgcaaggtactggagagcgtcaagagcggcgaaaagcactatgatttcatcgagatcatgggttgtccgggcggctgtgtcaacggcggcggacagccggtacagccggcagaggtgcgcaactttgtggatctccgtgccatgcgtgcagccggactctatgcggatgatgccggcaaggccgtgcgcaagagccatgagaacccggcaatccaggagctttacaaggacttcttcggcgaacctggcagccatctggcccacgaagtgctgcatacccattatagagagcgcagccggttctgagttccggtgcgcccacactggaaaggagcttttatgttcgagatcgaaaaagtcgatatggaacacatcgaccggatcagacccctctgggagaaactgatccaggcaaacgcagccaattccccttattttgcggattattacgggacctttgagttcgagatccgcaagggcttcctgcaggaaaagctggacaacggcgcagccatgtataccgctgtactggtggaccgggaaaagaagcaggacgccggatttgtcactgtgacctataaccgggatacttccttcggagagattgaaatgctctacctgctggaggagtaccggggccagggcatggggaagaagctgttcaagatggctctttcctgtctggacatcaactgcatccgggaccggaaactctgtgtgacctacggcaacgaggcagctctccggctttatgagagcttcgggttctatccctttaccatcgactgcctgcagaagcgcagctgatccggctcctgccggaatagaaaagaccccgccatcgtgcggggtctttttgcgtggcggaaaggtacctggcgtgcagagcgggggagagtagcgcccggaagaaactgccgtgccgtgccgcccatagcgggaccgcatgctgcgaagaaagcagctccggagaatttcatggaagcggtcgggggagtgggcccccggttcgctgtgactccggcggggactggctgcaccggcgcagtgcggcgtcactccggcggcagagggctgcccccaaataaaaacccccggcggtgagccgggggtttttatttgcttgggagagcttttgtctatgagaaaggatgggtttctatgcgggatcaatagcccttgatgagctcctcgttcttgggctcgaagcgtccggtgaagaagcgcagcgccttgggctcatatacccagcgcagaccgctgatgtcatggcgcttcttgtacagctcgattaccgcgtcagccacatagtccaggtgcgcataggtgtatacgcgtctgggaatggtcaggcggatagtctccagcttcggcacatggtcctcgccggtgacattgtcacgtccggccgagatgatgccgcgctccatggtgcgcacgcccgagatctcatacagggcggcagagagtgcctgagccgggaagtcggtggcctggtccagatgatccaggaaggcacgggcatccacaaagatcgcatgaccgccatagggctttaccatgggtacgccggctgcatccagcttttcgcccaggtaacggatctggtttacacggtggctgatgtactcatagtccatagcctcccgcagaccgattgccatggcttccatatcccgtcctgccatgccgccgtaggagggcataccctcgaactgtaccaccatgccgcaggcccgggtatacagatcctcatcgttcatgcacaggaaaccgccgatgttggtcaggcagtccttcttgccggacatggtgcagccatcgccgtaggagaacatctcatggacgatttccttaatggtcctgtcctcataacccttttcccttgtcttgatgaaatacgcgttctcaacacatcttgtggcatcaaacatcaccttgatgccgtgcttgtgtgccagttcggatactgccttgatgttggccatggcaaccggctgtccgcctgccaggttaacggtcaccgcaaggcagatatatggaatcttatcagcgcccacttcgtcaatcagggcctggaacttattcaggtcaatattgcccttgaaatcaaggattgcattggggtcgtgggcctcgtcgataatgacgtcgcggaaggttgcgccgttgcgttcctgatggaaacgtgtggttgtgaaatacatgttgccgggtacataatcgcctggcttaatggtaagtgtggaaagtatattctctgcgccgcgtccctgatgggtgggtaccacatacttgaatccgaacagctcctgtaccgttgcctcaaggtggtagaagttcttggaaccgccgtaggcttcatcgcctaacatcagtcctgcccactgcctgtcactcattgcattggtcccggaatcggtcagaaggtcgatgaaacattcttctgatttcagtaaaaaggtgttatatccggcttccttgatggctgccttcctctcttccttgttcaggttgcccatgtgctccaccattttgattttaaatggctccggtgcgaaattcatcatatccatatttaaatcctccttattttatataatgattttttcatttctgttaacttttttgtctttcatcatgtactgttgctcataatccctgagggctgaaattgcctggcctgaaaggggtataatggcaagcatgttaaagattgtcattaatccaacccctaaatcccccagatcccacacaaatgtgtatgcggcaaccccgcctataaaaagcattgccagcgcaaacagcttatagccagtctgggctttccaggtatccccgaaaatataagccacattacatcttgcatagtaaaggatgccgataaaggttgaaaaactgaacatgaacaggatgatggctataaaaacaaccccgaacttgcccatatgataattcatggccgcctgcagcagatccattcccaccagtccctcaatggcctccccgggagccagcagcatgatgaatgcagaacagctgcagattaccagggtatcgatgaatactcccaatgactggatcagtccctgtttcacaggatggctgacttctgcagcagcggcagcacagggtgcggaaccgcttcctgcctcattggagaacagacccctttttaccccattcatgaccactgccccaaggccgcccccaacaatgggctttaacccaaatgcctgtgaaaaaatgttattaagcaccaccggcaaataagtaatattttttaagataataaacagtgttatggcaaaatacgcgcaggccatgaccggaaccactctatccaggacctttcctgagtacaatcagtgcagacatgacaaccaggacaatcgtggtagccagctgaggaataccaaatgcatttttaaaggaggatgttacggaattggcaaccacctggctgattcctgcccagcacagaaggccggaaaatgcaaatgccaggcccaggaatgtgaatttgcagcctcttgtataataggtctgcttgtcacttgcaacata

SEQ ID NO: 4128 - DNA, 32759 bp, Unknown
  16S sequences of unknown bacteria
atggtcgaaagaccttccggctgagtgttacaagcgccgcaaataagcggcgctgtatttggcgtggagcgaagaatttgacctttactatcttattacttcacgaaactgtactctcatagcttccaattgagattttaatgtactgttttcttcctttacttccaaatatttctccagcaaaaagaaaatattggctatcagaggagtcgataatgaattcagctgattagcaaaaaataacgatcttgtaaatgtatccaaaaaagaaatattatgataagtgtctggcaattgatagtccgcatctgtttcttctttatgaagtcttaaaaatcctaaaaaaagctcccatgtactcataaaagccaactgttcattaatcctggctgcagatgataatgaaaaactattgtccgtttctatatctccgcttaccaatctaaccttagtaatggcaaccgtcatgcaggcacaaaccttatgtctgtccaataatgatctattttcgccatcctttttttcatacaaagtcctgaacattgttttttgattaagatactcttcatataaagaatgcggattatcacagaaatgaaactgttcaaattcattttccaaacgttttcccaacgtttttactacgttattataaaattccaaaaaaattgttttgtccattatgctcttatccttgcgtcacctggcaattctattttttttatagctttactgacatcataatctccatttccatcactgcccgtaccagctaattttactcttcctatactatttatatagcatccgtataccagttttaatgcccttttctgtatgtccttatatttctccattgcatacatgttccataatttacatactacaaatacaaatacaataaacccaataacaattataatatctttcatcatatctaaatctccgatttattctctttatctacatttattctataatcattatatacaactatcagcggtatcgttattaaaaaaatcgccatcagttttatccaaatagactgcatcacatcatataattcaagcaatgcaactatggatacaatgatcgccgtaatcgcagaaagtataataacaatagattctcttcttaccatagttgtatactttttattgtctgtgaatgaataaaaatcatacatattattacacgcctgcactaatatcgtcgtatagcatgacttataatctaataacgatgccaaaatactgataccaatagtaagtactaatacaaagatttttaccaaagcctcattggaagaaagatatatcacatctcttttcccttccatgtttctcccctcaccgtttcattataaaaaaaattgccctgcatcaccacaagacaaccttcttacactgcctccacaggatttatgaatatctgaatatattcacctgtttctcaggccatctttcttaacggttttattattatatcatttcaggatactaatatgcaagttttattttcaaaaaacacccctcagcacacagccaaggggaattcctgattattcttcttctttttttcttcgttttgcaattactacgataccgatcagtgccagcacgatcagtacgatcagcatcagtaccggctggtcatcacctgtctgtggggaacgaagggaattcagtgtatctgctccctgtgctcctgccgttgaactgtttgaatcagatgatgaagaggatccatgatgatgtgatcctccggatggcttcggatgtctgatggtaaacttcagctccggagctttgttcccgtcactgcgctttacacctgttctgataataatatcatcattaccattctgcagtacataattctctatggtatagacctgtttgtcataatcctttttatcggaagtgactacctgtgataactgatatttataagtatctaccgtattataagtaatgaccagatccttactttcgtttccatttaatgtaaaccggtaactgtccccgctgcttccttccggcatgggaattcccggcgtcaatgcttttaattcatattcaaatttttccgaggtaccattcgatgtacctgtcactgtctgtttcactgtcagagtcgcatctttttccaggcttgcagcatccactctgccagggacgaatccacataataaaattgctaatgccagaaacagcactgtttttcttcctctgtattttctacttctcacatgcatacccctgtcagttctttcgtctcgtatttcttcctgttctcatcaccgcgatcaatatgagaatactaatcagcagcaataacataacacctaaactttttgcactggtcttccagaagaccttccaatctatccggtcaacctgctggacttcttttttctccgggatcacctgataagtatcctcatatgtctgtgaggtcagtctcccgatcaaaagatgtcttccattcgtaatgttctccgtacaggtggacatgaccaccagccggtcttcctctgttacatcaatatcgcgataccacatggctttttcgcgaatctcctgcagatatctcattctggcatcggacgtatctaccggtgtcacatacagatctgtattgtatgcatctacttccagaaatgcaaacaactccaatccataatccttgccatctgcataaatatttccatagagatggctgtcggcaaacggatcactcagatatttatccagatcgccaaacattgctccgccatccatatgatgtccatataaaatggtattaaaatctgtaaattctctctgattgacacagtccataaatatagaaccggacatcctgtaattgccttcaggatctctcatcagatagacactgttgtcagcaccgcggaccaccggataatccacatgtgttccgtagatggtgatccagccacacacatcgctgttcttcgcctgaagctcctcaaaactcagagaatcttcttctgtggggcgatatacttcataatgctgcggcatagcatcctgttccagcacataactgtccccgattccatacgttccgtagcaaaacaaacacaccagaatgaccatcagaatccagctcagtatttcattgcaaatatctatgacccgatacacagtcgcatattctgtcttctgacctttcatcctgccgttacttccgtctccttctcctgcgtctgtaaaaccactgatctgccagacatatcaatgtaagcacaaacaacagtaaaaataatgcggtcttccagccgggcagaagatctctccagccctttgccttgtctgctgatccataatccggctgcgccggatcctccaccgcataagtgtcttcatagacctgatctgtgagtctcgccaccagaatatcccttccgttggtggactctgctgaacatgtggacaacaatacaatcctgtcgtcatccgccaggacaagatcacgcagatacactgcatgatcgcggatggcttccagataggattgcctgcccgcttcccctacaccagtctgaaagatagaactatcataggcgtctgcctccaacaatccgaagatctccagaccgtagtctcgattctgtatatacatattgccatatggatgactgtcaaagaaggattgctccttgaattccttgatgcttccaaacatcacgttcggaaccatattgtggccatacaggatcgtgttaaaatcctgaaaatccgggtcacaggaagcatctgcaaagatcgcccctgtgagggaataggtaccttctgcactcttgttgatgtactcccagttgtcctctccctgtaccaccggataatcaatgggtgtgccatacactgtgatccagccaatcacatcttcattcagtgcctgcagctccgcaaatcccagcgtgtcctcctgcggcttatatacagcgtactgctctgccgtggcctcctgtgctaagttctgcgaatcccacagtgcataacacccataagcaagacccagaagcagcagcagaaccaatccattatcaagtatgctatttatcagtctgacagccctgctgatgcctctgtgttccttcatgctacttatctctcgttcattcttcttctgctcttaacagcaacgattgctacaaatgctgccattgccattacgatcatcataacgaatgggaagttgttaacgatgataccggttacagcgatgtctttgtaagtattaatatagtctactttgttcgggctcgttttaagatacttatcacttacttttaaattacttcccatttttgctgtatcttttgtagccgttgatacaccaaaagcatactcgactgaaggtgtccagtttgcttgccctttctgctctacatttactttcgttccaacataaccctttgtaaccataagtgattgtccgcttttaaggctaaacggtaattctactccataggttccttctccctcagaggtcttcgatgtacccgtaaaaatctgatatgtatatttagttgtaacatcatttaaatctgtcggtgcagtgagcgtcattttatactcaaactttacatttggatccttagcatcctcggccgtattagaaacttttaatgcataggatgaaggagtcgccggatttggagtatctgaaccaattacctgagtatactcatttacgaaagttaatttactaaactcagctgcagatccagttgtctgtgatgttcccggagttgcatcaaccttgctgttatcacccgctgttccatcatcttttgttgtcagtttaaatccagtacctttgatgtacaacgacccatcactagttttctgagcaacataaatatcaagagtatattcagcctgagacgctttaaatgtgcttggagctgacacactattggaaccagtactatctgaagtcaatttatattcatacgttccaacagccatatttgctttaccagtaccattcatataggtatagaactgctgaaggaaatcatctgtttgttttcgtaacacttttttctcagattccgtagtatctaatatctcatttgctcctgcaccgaatacaattgggttcactttcaactctggcatatagttcgttccaccattcggtccggatactttagtaaatgtaaagttcacagtattggctggtgtcgttgcatctttacccattttataaactacagtaatagcagcttttgcagcttcatcttcttcatacgtgtatgctccattctctaatggtgtctttgcatctaccgttgccacggttccgagactcattgcaccaacaagaaccaatgatgcaaaaagtctgctgaatttttgtaaggttttctttttcatcttttttctccttttttgtttttttatttaacatccctcgtaatgcctgtttatgaaggatcattaacagttttatcggatcagaatccccggcggcgtacgatggtcatgacttttcctaatgtgtcatgcacatctaccgcaccatatactcggctgtccgacgcattctccctgctgtcacccagcacgaagatctgcccttccttcagctccattggaaattccactcctgtgtcgtaccgttgggtctgttcatagatctcatgctcctgctgtagagctccgttgatcatcagaccttcttctgtaatatccaccacatctcctgcggtggctaccactcttcgaacctgctcatgcccctgatatctgagcactaccagatccgatgcggtatattccttctccaggcggtagtagaagaccaggtctccatccttcaccgccgggagcatggcattctccgaatatcggagaacgccaaatacaaatgtaaatacaactacaaatgcggccgcaatcgccacaatcttcaatagaagatagagaatctcgcgaaggacactacccactaccgattcttgtggaaccgatatctcttctggtgtccccatctatgatctcctccttctcttcaacatcagagcggaagctccaagcataactacagctgctgccagaccaacgatcggtaatgtcttactgttcaaaccatcggaaataccggtgactacgatattctgcgtatgtgtgaaaatcaacccatttgaagtttcatttatcaggagattactacttgtattatatcctccacctgtttcctgtaccacatcaaatccgcgtgtcttaggataaacattgataccatactttaatctttccacctttaactgtattgtctgatttggtttcaaagataatgtagcttctccctctgcatctgtcgtaatctgagttattgtaggtgccgaagcatctgaaccacttacagttcctggaacacattcaattgtcgtatttgcgattggattatcatcactttgatcctcaagtattgtaacaatatattcataactttgttccttgttaactccatcgcctttgaccttctgtgtaatagtgaacaccggattcttccacataggatagaattttgtcggtttgtttatcagtgttgtactcaagtttactgctttctttgctgaatctgacgcatcataccagtatctgaatgccgatgttgtgctttccaggaacggtgtcttcggtgtttgggacaaagtctcaccttttaaacacattgtatgtgcaaatgaaccaaatccgctaaaatatccagtagatccatccttatttctcgaagcatcgtatacaacaggcatgaattcatactttgaaatatttccatatgcatcacgtacaaaaacatacagtgtcttcaacggggaataggcataacccaaatctgcacttttcgccttcagcctatattttccatctgagccccttgttacttctgtaaatttcaccggattgaacgaatcccatggatttttgtcgctggtattccatcgaacctccgcataattcttatttgcattaatatattttgttgcatttgcaaaatacccgatattattaatgtctgaagttccatcatttactgctgactgttggacatcttcatactctgcatccacataatatgtcgcatttgtttcttgtgttgtcgcagctttgtctatatacgatagtgtctgcttccatgtctctttattaagtttcggtcctttcgtatccagcaagaacttactccagttaccggctatatctcttgcatatatgaagtaattcttgtttgaataaaatagtagctgcgctgtcctaatgtgtattatcggcgattcactggttgaactaatggtctgtccattgatatctgtaaatgtttcgcctgcgttaagttgattgtaagttatcaccgcagtagtattattcttatttaattgtttatcgccttcctcaatgttatacacataatcatagactccgtctttcttctgcacatcctgtgaactcagatacacctgaactccctccggatatgctccatttgatgcatcattgagtgtactaccttttttatcaatagcatcccgatcaggatctctcagataaatatctatacatgccatcagaccatctgttccattcaaactcacgccagaggatttcagctgatatacctgtggtgcatattcatctttaataagttcaatggtctgataatcactggttctgattcgcagataatatctctgatctgcaatccagttaaactgacttaattttgcattattcctgtcattaaaatgcaccagtgggtaagctactgttcctgcatgtgttggtcttaatcctgtagatattctcaatgcattatttgcagttaacttgctttgaatatataaaggtctgcctgttggagaagaggttccttcggtataatcatacgtaacagaaagttctgtatccgttgcatctgttgtcagactttgaatctgcctgtatatataacttgaatcagcccaatccagtacaaattttcctccatctttcaaatacacatttgcaagtctgttcgcacctgaactggtactttttcctccaatccgggcttcctgctttgttgctatatttcctaatcgcaattccggtgtatccgcactggcaatactcgaatccttttcaatataaatactatcgaaattataaatacctagcagcgtatcttcttttgtttttacctttccatacacatgtatttctgaagtaccagaagatgacagattagagccatagcaatcgcctgtcaaagttacgttgcctttcagataaaccgttgctttcttagtcgaaagaacttcaggcaccataaactgtacatttgaatcagtaactgttaagttatagtttccctgtatctcacgataatttctgtaaattggactgatattagccgtacagttttctactgtcacatttacatcgcctgtgtatttattactagaatccatcccgggtgttggcataattctaagcgttccttttgcccctgtacatgatataacagtaactgttccatttgctgacaccttagttccaagagtggaatatatggtgtccaacccacgacagtttttaacggttacattagtattccgtccttgtgctccggttccgcctccttcaatgcttgcagcagtaccatttccgaacacacaattctgaaatgtgattggtcttccgtttcctctgaacgtatatgaatcctttcctgtaaatgcatcacctctgaaacttaagtttttccaggtcagcgactgaaactgcggatatatattgctccatcgataactggaggactgtgagttcaggtttccaccagcaagccagccagctcctgctgccattgtaaccgtaacattcttattcgtaagacctgtagcgttattaaatgctgtcacatcatcgtccagcaacgtatagcattttcgaacttctataatataatttcctgcattctgacttcttaagcttgataaaatcccactgaatgttgcaccttttgcaacatatgtattggaattacttccttccttatataaagtcattgcataatcgccagaagtatcataggtcttcacatatgttccactggcagtaaatacctgcgtggaaggatccgcctgaaagcggttacttaaatatagtgcggagttactttgtgatgcaagttcatcaatcttcaaataggaagctgcattagtcagatttgtcgaaattgcagagaccgagactttcagtcttattttataagatgtgctcatagcagacaaactactcatatgcaccagattactggtctgagatattccattattatatacagcaacactattctttgcatccgaggattttacagccccaaagtattgcctactccaatacccggctttcacatcatttacagagtttatctctgttgtatatatataatctccagctccccctacgttctgattaatattaagatctggtgtataggtggatagtgcagcacctacacctgtcgcaccgactttcgtcatataattgtaataagatgagttatattgtatatgtccaaaattctgttccgaagaagttgaacagttatgcaactccaatctgttccatccaaaaatattcgtcacattgattttatctgcaactgcaccataagtcttgtttatgctgatagttcttttcttcgctgttgtattatttcctactgcggtatctgtataactgcccagattattaagtgatgcatttttgatgctaaaatacattgatgcatctccggaaatttttccttccattgtgtaccaggtaccacattgtgcataataattcccattaacatttatcgtaacatttccggtaacagccatatcaagacttccccagacagcacctcccgcggattccattgtacttctattcaacatattaggagtaccatacgcatatactgacgtgtttgttatcttcatcagaacattacctgtatgtgtattaccatttccatttgaacaaaaacctgttccacacaccgtaccataaattactgaatctgttatttggagtgtaatatttccgccagaattcacatatgccgatccaccatacacatatttcacgggagccgcttttgttgttgtcacatgatctaatgtgagagtataattttctgtagttgctaccccatttccaccaccattaatattcgttatcgttgaaacaacgtttacattcacaaagctggtgttatttccattcccattaatactttttctatttccgtatatatttatgcatgtaatataagcatcgaaatttgaaaaatatacatttccatttaatgttagtttattccagttttcataagatgttcccttctgataatttactgcaccagtaatgacaatcgttggtctggaggttcttttttgaatagaacctccaacagttgttcccatcgcatctctgtcggcatccgttgttgtataatcgtcaagaagagtgattttaaagctatctgaatctgtatccttattgattgcttcaaacgcctttgcaatcgttccataggcatgtcttaccgtacctgcggtatcggtcttgttcgtaccaccctgtaccaaaatagaccattttccattggttccagctgatcccacacgctgtaccacggtcatatcctgtgtcagtgcaatcagttttgcaagtgcacttgcatctatgctcatcaatgcaattccatcatccgctgccgcagcactgacttcgttgatctgatctgccgggatcacatcgccttcgttgatcttcgttccgtctgcataggacagtacaatacctgccagctttgctacctgccagccgatcagcggatcggtatcttccggatctgcttccgggtcaagctgcacatcatcgggcagggatactgccggtgctgccagggtatcgccagtcactgccatctgggtgtagctgacatattcttcttctgatacagcagactctgtcaatgcctgtgtatccactgctgactcatctgtatcagcagactctgcatccttatcagcctgttcgagaagcttctgggtagtctcatctgccattgcctgatctgtcactgccgcacgtgcttcttcctgctgttctgtatcggtgtactcttccggtgcttcgatcttcagttcctggaatttcggcagataatagctgatctccaccggcagaactgcatcagcagcagacaggttctcatctgtctcttccgtcagctgctcttctgtaactgtagtttccggatcctgctcggtcttgtctgcgttatctgtattgtcctgatcctgtgtactcccgtctgtagtatctgcattgcccggatcctgtgtagtcccgtctgtagtatctgcattgcccggattctgtgcagtcccgcctgtagtatctgcattgcccggatcctgtgtagtcttgtctgtgttgtctgtattatccggattctgcgcagtcccgtctgtgttatctgtattgcccggatcctgtgcagtcccatccgtagtctccggcttcttctctgtctctgactcgtccgtatgggattcatctgtattcgaggttcccgttgagtctgccgttgcatctgcactttcattttcagtcacagcatcttccttcaacgattccgaagcccattgcccgtctgaacttgctgcaaatacggatggttctatctgtgtagaggtaatcgccaatataagaaaaagtgtcactattcttttcacgatctgtaaggattttttcttttgttttttcatgttcttctccctctgcctcctgatctatgtaataaataaaatttttataaaaaaagtcaatttttttactttaatttacaatttttagggggggggtggaatggattattttgacttttatatggaatattttgacatatgaaaattgtgattctgctccgcaaatgcggagcaaaaatttgaattttttttgcaaaaaaatggcttcacagagatttttttctctgcaaagccatccactctacacatcttcatatatggaatccaatgtaagtaacaatacatcttcatctgtcagattttcaaaccaatctgtgtagcctgacagggaaaagaagatatattttgatattttatatttaggagatatcagttttccccgtctggtcagtgtctcataaatacctttatcaatcttttcattcttgaatttgcattctccgataacagcttttttatctatttctgatatgccgacaacatctatatcagccgattgcgctctggtatcaccatttttatctgtaatgttttctactccccaccaggtacctgtcgaagtaataaaacacccatattcacctgctattccatgtctcaatgtataatacctgcacatttcttcaaatacactgcccataaaagaatgtatcaccggtttcactgccttctgataatatacctcaccctgtcccatctcaatcacactggtcgctttcggaatgaattcataccagaacttgaacatataatctctcaaaacatactgtgttttctttttatttttctcatccgtaatacatttcttcttttcaaccaggccaacattcatcagtttatctatagaatacaataccgtttgttccttttcccctgttttccccgcaattgtattaagtgtattctctcctgatgcaatctgctcaacaatattattaacggtcgatatatctgaaaattcttgtgtcagaaggtttctggtctcatcatacagatatccatctgttctgaagaacagccttacaatgttatcatcaatgctcttctcaggatcaatcatggacaaatattttgcaacacctccggtgattccataacagattgctttgtcttcgcaggaataattcggaacaaattttgctgcatccagataattaaatgcttccagtctgatctgtgaatcccgtcttccaaacagaggacttttttcactgagtactttcttctccataaaactgagtgcagaaccacataatataattttcagatttttatcattccagactgtatcaatatatttctgtaaaatagacaaaagagcatcatctttttctgcccagtaaggcagttcatctattacaagaaccactttgtcgtctccaacattcttattaataaaatcaaaaaccgcctctgtcgtatgaaaactcatcccttccatgccaggcatcagcaaatctattacctgttttgaaaacaactccaggtttctgctctttccaacttttgtcgctgtataaaatatcgttttcttatctttgacaaattctgtaataagcgtagacttcccaatacgccttcgtccatatataattgtcaggccaattccgtctttatcgtaaaattcttttaaagatgccagttctctttctcttccaacaaacatttgcgccctcctttattcagtcattttttattcaaattgattttaacaaaattgttctgaataaaatatatcacaattttatgtgtgatgcaaatcaaaaaagtgcccctcaacatactgccaagggacactcctgattattcttctttttctgctttttatacccggttataattgatcaggcagcctttcaggatgatctggcgttcttcctctgtcatctcacctaacttcagcgtaaattcttttaagcctccgtcttttactacataggctttgatcttagatgctgcatgttttaccagatctgcgattcccggtacaaacagataatcaccattggtaaacggcaactcaccttcatcaatcaggaatggaagcataccccagttaatcagattggagcgataacgtttggtcgcatagctattggcaatatttgcccagcctcccagcactttctggcaggaagcggcctgctctctggctgaaccgtcacctggcttcaccgcaaagatcgtgcttcctactcccagatttccttttccagcttctggatatactgtatggatcgcatccatgaccggtttcagttcttccacagcttccagtgggcaggttcctgcctcaatcgccttctgtgctttctgaatctcttttgctcttcctacataagccggatctttacgggacagggtgaactctgccagtcccagcggattggaacgataggaagaggtctctccagacgggatcagctcatctgtggtggttaccggatcatggatctcagataccactttcaggaccagattctccggcagagcgctcatggccggccagtccttgatattcgggccaaaatggatctccacactcggatctgccacaccgtggctgtcaaatacgcgattctcatagatcttgctgtcgaagaaatatttcggattacggaattccacatccagatccgttgctgctgtcagataacctttattggctgcggttgctgcgatggatctggcatccatcagtgccactgatgcgatctgtccattctgaagcttggaaccttcccggttcgggaagtttctggtagaatggcggatactgaatccattattggacggagtatccccggcgccgaagcaaggaccacagaatgctgtctttaagactgctcctgtctccatgagcatagccgcagaaccatttttgatcagttccatgtagaccggcatagatgcaggataaacacttaaggtaaattcatcggatccgatgcttctgcccttcagaatatcagcagctgcgcagatattttcaaatcctccgcctgcacagcctgcgatgattccctgatccacatataatcttccattatgaactttatccttcagagaaaatgccaccttatctccaaggctcacatgggcacgtttctcacaatcatccagaatgtccataagatttccattcagttcttcaatggtatacgcattgcttggatggaacggcatggcgatcatcggcttaatttttgccagatccacaaggatcataccatcataatatgccactgctcccggattcagctctgcataatccccacttcttccatggatctcatagaactcctggatcttctcatctgtcttccagatagaggacagacaagtagtctccgtagtcataacatcgataccaatacggaagtctgcacttaagttctttacgccgtctccgatgaattccatgaccttattattcacatagccgttggcaaataccgctttgataatggcaagtgccacatcctgcgggccaacgcccttcatgggtgctccggtcaggtagacacctactacgcccggcatagggatatcataggtctggttcagaagctgttttaccagctccggtcctccctctcccatagccatggttccaagagctccataacgggtgtggctgtcagagccaaggatcatcttaccaccgcctgcgagcatctctctggcaaactgatggatgactgcctgatgaggcggcacatagactccaccatatttttttgcacaggtcagtccaaacatgtggtcatcttcattgatggttccacccactgcacacagactgttatgacagttggtcagtacataaggcatggggaatctggtcagtcctgaagcacgggctgtctgaatgattcctacaaatgtaatatcatgagaagtcagcttgtcaaagcggatcttcagtttttccatgttgtcagatgtattgtgggatctcaggattccatatgcgatagtctgcttttttgcttcttctctagaaggaacagctcccatcttccctgccaggatctttgccgcatctgctgtatcaggaatgatctcagttccgtttaatacatatgcgcctccatcatataattgtaccatcgggcacctccatattgttaattgcattattgtatacaatttctattccgtatttattttaacatgttatacacggatgtcaacaaaaaaccggcagtctccaaagcacttacgccagatatatttgttatacaatctttgcactaaacaatccggcggaactgcctgaccactcagacaattccgccgaatatcaattatatttatttttctgtcacatccacacacggaaacatgatcgtcaccttgaacagatctccatccagatagatttcaaactttccaccctgcaattcagtcagatcttttgcaatcgacaatcccagtccgctgccttctgtggtacgggactcatcaccgcgggtaaaccgctctgtcagctcctgtgctgagatattcagcggctgttctgaaatatttttcatggagactgccacactgctgccatccgttactacgttgagatagacacgggtattcggcatcgcatacttttccacattgcggtacagattctcgatgattctccacagccgtctgccgtctgccatgataaacagtggatgaggcgggcagttggtcatgagatgcagtcctctggccgcaaatttttcttcaaattctccgctggtctgcatcaggaattctcttaagtccagcttctccatattcagcgccacattgccagagcttgcccgggaagcttccaccaggtcattggtaagttgtttgagacgctgagatttctgatccaacacttccagatattcgtgtaccttcggattatcgatctgctcccgcttcatgagatccacataattgatgatggaggtcagcggggtcttcagatcatgagatacgttggtgatcagatctgctttcatctgctcgctctttacctgctcctgaagggcatttttaagtccctcacccagatcattgattgcctctgccatctgccgattgcctctggtcagatgctcggtatcgatcgtagtctcaccattgccatctgcaatggctctgactccatccagcagcttctgtctctgcagactctcccacagaagagctgccagtacggcagcctttccgacaatgatcaggatttctatagatctgctgtctccgaagatcttatgcaaaaccacctggatcagctcatatgccaggaagaatacaatgattcgtatcgccataggtgcgctttccatcatgacgtctgcaaggctcatcacggacatgatgatccgaacaatgacaagaatcaaaaggaacaacagtgctgcgcctgcaaaaatcattggttttaccaatggctgcagagttctctgtgcttctgtatagttcactgctcctgctgacagactgtctgtcaccggaaatgtagtgtcaattgccacatagaactgatattccccgctcagatgtgcttcatcctgatccagcagagaattcacattcatattggtaaacacgccggcaacattagcctgtctggtttctcctgtgcggctgtcatagatataataggtctcacaggatgtaaagtagtctgccagctgatcctgcggcgcatctactccgcgaagagttcctgcattggtgtagatctgtccgtttcccatatcatacagggcataacgtacattggtggactccatggcccagttcttctggtcctgctgataagcagtcacatcctgctgcagcttttccagggaatcctcaatctgtcttaccagcacattgtattcctcatcgtactgatttgcatattcctggatacttccaaaaaacaacggattataagcctcattcagcactttattggagacaatggcacctttcaggctccactggtaaaggtctcccagccggtagcaaagcccattgcctttttcgctctccggcatgtcgtcatagatagttccatcttccacataatcctgaatacggatgatgcggtccggatcgtatgctccgtctttctcaagacggctgcttctggctgctgcctccagtacgccctgcatactctgggctgctgtctgctgatattctctggactggagataggtttttccctccagtacatcctccatggtctccatagtataaccggcattcttcacggtaaaataaccagatgccagtatccatcctgcgatcacggcaactgccactgcgatcatcagaacaattgatcccaaacgtttctttttcatcatagtcctcctactcccggtcaatcttatatcccactccccagaccactttcagatatctgggctccttcggattgatctcgatcttttcccggatatgacgaatatgtacagctacggtgttatctccgcccagcgcttcctcgttccagatccgttcatagatctgagtgatggaaaatacttttcccggattctgcaccagaagaagcaggatcctgtactcgataggagtcagcttcaccggttctccatccacagtgacttccttgcgctcatcatccatcacaagaccgccgatccgaaataccgcaggcttgttctctgcgatggcacccagctgagtgtaacggcgaagcaatgacttgactctggctgtcagctccagcggattgaacggcttggtaatataatcatccgctccaatattcagtcccagaatcttatccacatcctcggacttggctgacaggaagatgatcggtacactgctggtctcccggatcttcatggtagtccgaattccatccatgcctggcatcatcacatccatcaacacaagctgtatctcattttcctgaagctttttcagcgcatccagtccgtcataagctttgactactgtatagccttcctggcttaaatagatctcaatggcatctacaatggcgcggtcatcatcacaaaccagaatattcatatccgtctctccttttatcgaatacagttatatcatttcttttttaagatgaaagaaacatttttattaagattttattaaagaactggttgtctaaaccagttcttcaggattcaggcactgcagggacggcaatacaaatctgccgtctttgcgtaccagcacatcatcaaaatagatctctcccccgccatactccggtctctggatccacaccagatcccagtggatggaggaaacatttccatttggagcttcatcgtaacagttgcccggtgtgagatgaatggatcccatgatcttctcgtcaaacaggatatctttcatgggatgcagcacatatggattcacgccaatagcaaattcacccacatagcgagctccttcatccgtatcaaataccttattgatccgctctgtatcgttggcggtcgcttttacgatcttaccattttcaaaagtcaggcagatattttcaaaggtaaatccctgatacacagaaggtgtattgtagcttatcgttccgttgatggaatcacgtaccggcgcggtaaatacttctccgtccggaatgttcatgcggcctgcacaggggatcgccggaatatctttgatggaaaaagtcagatctgttcccggtcctgtcagatgcactttatccgtccggttcatcagatccaccagcgcacccatggctttctccatacggctgtaatccagattgcatacatggaaataaaagtcttcaaacgcttctgtactggtaccggaaagctgcgccatggcatcgttcggataacgtagtacgacccagcgggtcttcggcacacggatcccatgatggaccggagtcacataatatttctcataaagtgccatctgctcggcaggcacatcggaaagttccgtgatgttatcgctgccacgcactgcaatatagcagtccatatgggacatttccaggctgtccacttccgccatcagctccatctgttctttggtacagtgcatcagctgtgcacgttgaagctgcggatctgtaaaatgcacaaatggaacgcctcctgcctcatatactttctttacgatctcctttgccagcggtcttgtactatcgcctgtgtaatgtacatataccttatctcctggttttacctgacaggaatagttcaccagattttctgccagagttgtaattctgttatccatcgttttactccttctctcatgccttatggcaggcaggtataaaatacatttcccgcctcttcaaacatagaagaactgtcattcatgccgcctttggtcagatcattgctgcctggacggtaataaatgatgttctgtgcatcatatcctacgatcaatacggctccacccgggatcaatgccaccaccggggaaccctgacttacatagtaaagagccatacttaagctgcagcctggaagaagacatgcatcttcccctaactcctgtgtcagaatctgccagatggcagttccctgatccagttctgtctgtacatctgtatagatctgtttttgttttaataacaactgtacacactgcgcaagatcagatccgtcgcctgccagcagactgctatcgtcataaccattcaactgtacctggctctttctgccgccacgacaccagtaacactgatccgcactgtaccagacagatcccatgccattgtacgcatactgcactgcctctgtcagcgtttcaaatccttctgcacttccgtcatagcggtatgcaagatactgtttcacagaggcatctcctgcatcaacgattctgcttccttcataaagcaccagacgtacattgggctgcttcatagaaccctttcttatattacccccataggtcagcacatattcatttctgcgcacttcgtcatagacagtcgaaagcttcaacagattcgtatgtgtctcacttgtataggtgatgggctctgacaatgcttcctgccagcttccatccgaagcttttgctacacatgtcaggtcgatccggttctctacgatcgttacaccgctcacatattttcctttggaagaatattcaaactgacgtacatccttgcctgcctgatcacggatggtcacacagtagagcggctgcatctcttttcctgcctgatccgtatagatatcagagctgtatcctgctccgtagatcagatcctcttccataaatccaagagtctttaacacttctccatcgccggcttcgattcttgagaccacaccggtggaagtattgagaagacagatatcaccgctgtcctcatcattccatgctgtcagaagtccgctgtcagatacctgcagatcagacgcatttacatttctggccagtattgtcacagaatggtcatctaaatttatctgcagaagatttccctgccagcaaagccatgccttaccatttccattctgaactgccagatctccgatatcttctttcattgccgcataagactgatcagacggaacaaagaacagttcctccaccgtattcatcagtgcatcataatggcagaacatgaccccgcttctgccttcataacgaccgcggttcatatagccatacagcagaaaatccatacttccggtatcatctactttcaacagacggaaatcatgctctttccagtcagctctgccatcctgtccatctgtgaatccatagaccagactcagacggttctggccataatcataactccacagctgcccctgctctacaaatccaaccacattttcttctgtattcttcatatagaccggttcgctgctctggataccgaaggacagttttccatcttccaccagctgacggcccggttccaggatcttgtctgtccagcgctcataggccagcagataaatcctggtggaagtatagcgcagacggtatgcttctcttacctggtactgctcactggtctctgtgttggtcacctgatattccatggtcagagcggcaatgtcgctctcaagctctgtgaaacgaaggctggtctctccagtctcaaccacctgcatgtccccccaggtcacagggccggaacgggagtgaatgttaatatatcccagattctttccatccatacttccatcctgctccagataattcaatacaccatccgaatcaccggtcagcgtcatctcatgaaaccgctgtgcaaaatccacgcagtcctgcacatgattcgttcccagataagtcagtattgaatagaaccgtaccagatcctgatcttcggtctgtactttcaataccagaagatattcttctccctgggtcagaagatcttttagtgtcagcgaaacatgcagatactttccatcgtcttccgcctgcagatcgtctccaccttcgatcagacgactcatgtccagacttcttacttcgtaggacaccgatttgatctgtgcattgtatttttccagtgccagtcccactttatgatcctctgacacaccgatcacactgtcccgcatactggctccgtccatgtcttccacgtagccgtgcatttcattatagaggactccatcctgttccgcgtagacgaccggcaactgtgcctgtgccatatcgccggtcatatcccgattacccatacgggtcatatatgtcataaagatcatgcctgccagaaatgcaagcacaacagtggtatattgtatgattgttcttttcatgtctctctccatctatcgaaaactgttatgcccttcattctagcagtctttctccggtgggtcaagcacccgcagccagtctatctccggcgttttttcttccttctcaccagcatttcctgcagcagaagaacgccaatcagatcacggatctgttcccaactgggattattttcaccaaaattttcccctttctgcgcccgttcccacacttccttagacttccgaagcaatgacagccgatctggatactcgtcgtacatcatactgccttcatactccagccggtcacagcattcctccacataaggctgaagtcgtcttgccatcaacggatacatttccatgatccgcttcttatcctccacatcttccatctgttccggatcgttccacaggctaatgtaatgcctgccgcttccataaggatacaaccacgggtaaaactgctccggccgatacaggctgcaggacgcaccaatatagtaaggattccattcctgaatttctttcatgaacacctgctccattctcctatcatatctgtaatatatatatgcagtctgtcaggtgcaggtgaaatacaataaaaattccacaaaaaaagccatccggggaaatccccggacagccttttacttttttcccagtcgactaatcctgttcgatctcgacagcatagcctgcctgtttttccttataatgatgggtctgttccagcatcatatccttcaccttcatcagacggatctgcgtagaacgttcattctcgtccagcttcatggtgatgtatttaatatgctcctgtgcctgcggaatgatcacatgctccagagcatttacacgacgacgggtcttctcgatctctgccgccatgagctggcatgctttctccgtctcagccagcttcagcatatccggcaaaatgtcagccaatgatttgactgcatcatccagatcaccggatgtataagcaaaaccataagaatagatgtcattctcgtcagcggttctggtcttgtactcaaagaccgggatatccacactcatgacattcttcttgtctgtctccagatagacttcctgcttgggagccatcagagcagtatgaagagtttcctcagacatacctgctttggcaatgacaaaattcttattggcagccttgatacctgcttccactttctggcgcagtgccatgttttcccgtaccagatccaggaactgacgcatcaattcgtcccgcttgtccttcagaagcttatgacctttagtggccgtcaccagttttttcttctggcgtgtcagctccattcgggtggggttcacctgtgtagatgccacgtgcagtcacctcctactttccgtagtactgatccaggaacttatcgtcaatacgtttcagctcgcttctcggcaggatggacagaagcttccatccgatgctcagtgtctcttcgatatcacggtctgcctggaatccctgagatacatactgtttctcaaattcatctgcaaattttgcatagatcaggtcgatatcagagagtgctgcctcaccaagaatggtcatgagctcttttgcatctttacctcttgcataggctgcaaacagctggttcagtgtattggagtgatccgcacgggtcttgccttcgccgatacccttatccttcagacgggacagagacggcagtacatcgatcggcggattgataccttttctgtaaagctcacggcttaagatgatctgaccctctgtgatgtatccggtaaggtcagggatcggatgcgtcttatcatcctcaggcatggtcaggatcgggatcatggtgatggatccttctttacccttctggcgtcctgctctctcatacatctgagcaaggtccgtatacatgtagcccggatatccacgacgtcccggaacctctttacgtgctgcggagatctcacgaagagcatctgcgtaattggtaatatcagtaaggataaccagaacatgcatgtccttttcaaatgccaggtactcagcagcggtcagtgccatacgcggagttgcgatacgctcaacagccgggtcatttgccaggttgacaaacagtacggttctgtccagagcaccggtctcgcggaagctctctacgaagaaattggactcctcgaaggtaatacccatagctgcaaatactacagcgaatttttcatcttttcctcttacctttgcctgtcttgcaatctgtgcagcaagctgtgcatgcggaagaccggaagcagagaagatcggaagcttctgtccacgaaccagggtgttcagtccgtcgattgcggagacacctgtctgaataaactcgttcgggtagcttcttgctgccgggttcataggcagaccattgatatccagacgcttgtcaggcaggatctcagggccaccatcgataggacgacccataccgtcgaatacacgtcccagcatatcttcagaagcaccaagctccatacttcttcccagaaaacgtactttactgttggacaggttaataccggtagaactctcaaagagctgtaccatggcatcggtaccgtttacctcaagtactttacaacggcgggtctcgccgtttgccagctcgatctcacccagttcatcataggtgacgccttccacgccctgcaccagcatcagcggtccggctacttcctgtatggttctatactcctttggcatttagaagtcctcctttccgcatacatcagcaatctgagtatccagagtatccagaactttctggtattctgcatccagattctcttccagtgtatatttgtaacgtccgatctgctcacgaacaggaagtttgatcagatcctgtacgcctgcaccatttccaagtgcttccacagatttatcataatatgcaagtaccagtctcatcatgaggagctgtttcttcagagaagtatacgtatctacctcatggaaggagttctggtgcaggaagtcctcacggatagaacgggcagcttccatcttcagacggtccggagcggacagagcatccatacctaccatctgtacgatctcgttgagctgtgcctcatcctgaagcagggacatcatttcctggcggccgctcatccagtcttctgcaacattctttgtaaaccatccggcgatgttgtccagatacagagagtaactggtcagccagttgattgccgggaagtgacgtttgtaagccagtgcggaatccagtccccagaataccttaacgatacgcagggttgcctgagataccggctcagaaatatctccacctggcggggatactgctccgattacggacagtgcgccttctcttccgtcttttccaaggtttaccacatgtccggctctctcatagaactgtgccagacgggaacctaagtatgccgggtaaccttcctcaccaggcatctcctccagacgtcctgacatctcacgaagagcctctgcccaacgggaagtggagtctgccatcagtgctacggaataacccatgtcacggaaatactcagcaatggtgataccggtatagatagatgcctcacgggcagcaaccggcatatcggatgtattggcgatcagaacggtacgctccatcagtgattttccggtcttcgggtctttcagttccgtgaactcgttcagaacgtcggtcatctcgtttccacgctcaccgcatccgatgtaaacaacgatatctgcttctgcccattttgcaagctgatgctggataaccgtctttcctgaaccgaacggtcccggtacagctgcaacaccgccttttgcgattgggaagaacatatcgacaacacgctgaccagttaccagaggcatggtcggcggaagttttttcttgtacggacggcctttacgaaccggccatttctgcatcagagatacttctttgtcaccatctttggtcgtcacaactgctacggtttcatcaacggtaaaatcgccgcctttgatctccttgatggttccttcgattccataaggaatcatgattctctgctcgacaactgcagtctcctgaacggtaccgatgatatcgcctgcctctacctcatcgcctgcttttgcagtcggaacgaaggtccacttcttatcacgcttcagggaaggaacttccacaccacgctttaagttgttgccgcagagtttcataatatcgtccagcggacgctgaataccatcatagatactggtaatcagacccggtccaagttctacggacagaggcatctctgtggactctaccggttcacccggtccaagtcccgcagtctcctcatatacctgaatagatgcctgatcaccgtgcatctcgatgatctcaccaatcagacgctgctcgcttacacgaaccacatcgtacatgttggcatcccgcattccctctgcgataaccagaggtcctgccactttctttatcgtgcctttactcattgaatggattcacctgctttctaatcatttccgaacaggatatcagaaccgactgcctgttctaccgactttttcactccttcgatacctgcgcctgtatttccggccacgcctggtatctggatgattgccgggagaacctgctcccggtatctggctatctcatgagggatctgcgctgccagctcttcggtaatatagatcacggcatactcgccggttgccagtctcctcagtgtttcttctccctcccggatatcggatacaggatgaatgtccaggcccagtgacgcgaatccatagatactgtcatatgcgcccattactgcgatcttatacatacatctcccttaccctttcccggatggaatcgtctgataagccattctgcttacaggtaagaatgattctcaccgtttttatttcattctgtcttgcgatcacatatgccaccagcggtccaacagaaaacggattggtcttctgcggctggatcgtctcgatgatccggttgtcgcaccaacgttcaaatgcggacggagattctttgagtgcctctgcagcctctgcataacctgcaccattcagatattccatcacagcatccagaccaaccagtgctgcatgtgccagccgctccacattaagtgttttgcacggagccatggcacgtttcataaactccagcgacttaccggtcttacagcatctgactgccactttgatgttggcaactgccactgttgactctgcataatcgcggatgatcgctgcttttgatttctttcctgctgccaggatcgcttccatggtcgcccggtcgatgattacatcacatagctgaccgtctcccgaatgaagcagcgtgtccactgcctcgctggcagcttcccgcatattctccggtaaagcctgataatctttttcccggatgatccttgtcatttcctctttggaaatgggtgtaccttcaaaatagatattggcgccgctcttgccggtacatacttccttgaccgccgccttcaggttgtggaaccagttgggataagagaggacatcaaatacacccatgtccacctgcatctccctgatggtctcccagattttttcctgttcccttgtgagaattgcatccgcattcagtggaacatccacaccgccccagccatgttctgtcagaaatctcagacagctctcatggtctttgcaggcaatgagctgctcaatcgtagatgaggaaaacagggatacctccaaagcacggattcgcgcaaccgcgtaggtatactttgtatcagacaatgataaccctccttctatggcgaatctgcttttttataaaaataacatctcgttgacccgatcctgaagctgatctttcttcgcatcaaacagtgctttcagcgtacagttctcttccacgcctccatagaccaggataaaaccatccgggatttccttcggttcttttttcagagtcaggcttccgccgttctcctgtgcagccgcttcgatttttttctcaaagtcagccggcatgcgtccaaggtctgcagcggaaaaatagatctctcctttatccgccagcgcataggtctttactaatttttccattgtcaggaaataacttgccgtatcctcttccttcagagtctggtaagcacttccgatgatctctgcaatgatctcctgctttgctttcagcagtgcggtcttgcgtttctgctcagctgccgaatgaatccggccatcctgtacagtcttcagagcggctgctttatcagaggcttccttctccattgcctcacatgctgctttggcatcggcaaggatctgttctgcttctttctgtgctgcttcgatccgctcttttgcagaggcttcggcttcttcctgaatctggcttgtaatcttatccaatccggtcattctaaagcttccctccttacattcctgtggttattatacggtcggaagtgcaagaatggaaatcagaagagccagaattgcgtaggtctcaaccattgccgggaacagcattgctttaccaaactgatccggtttctttgcaacgattccgatagatgcaactgcggttttaccctgatgaatagcagatacaagaccaacgattccgatcggaaggcaagctgccattaccatcagtccggttgctacagagagctcagaggaagcggcacccagaagtccatatctggaaagtgcaacgaatgctaccagcagaccgtagataccctgtgtaccaggaagcagctggataaccagaaccttcgcgaatttggaaggatcttccgtaacaacgcctgctgctgcctgtccggcaacacctacaccatatgcagaaccacatcctgccaggataactgccagtgctgctccgattaacgcccatccattaccagtaatactgcttaacataattatttttcctccttgatatccacatatttggttttcaatttaaacggctggaacggttgtccaccgccttcgtaaaattttccaaagaactccacatactggagtctgcaggtgtgtacatacgcacccagaaggttgatcgccatattgaatgtatgaccgatcacaaatacaacgataaagagaatcactcctccgatgctctttccgcccatgcttcccatctggttgactacggaagcgataactccggttgcaaggccaagtgccagcagacgggagtaggaaagtacatcactgagccagcctgtaatgttgtacaagtcataagcacccagtgcaatgcgaagagccggattcttgctggaacggccggagaacagtacgattccaactgcacccaggatcgcgctccattttgctgctgcattgagagctgccgggaatacgatctgttttcctgcaatgcctgcaaacatgctggacgggatcagaataccgatcagtccaagaagcagcatgtaccagaatacaacgtcacagataaaatccatatatttgtgatctctgatacacatatatccctttaatgcaagtccggtgaacagatggatcacaccgaacagcatggaatacagaagcattctcatcggctcattcaacggtacaaaccacaatgccgggatcgatatcttgtgaccaaagaaggtctccgatataacatccagcgcgtctccaaaataaccgccgaacagtatgccccataccaatgtggaaataccacaccagaagaataactgaatggattttcttaaattctcctcgatccgcgggaatttcagaagaacgattccgcataccagcgaaacgatcaatccataagctgcatcggacaacatcagtccgaataaaaatacataaaaaatcgatgtaaagaacgtggggtcgatctctccttttgcaggaagaccgaaggatgcaagcacaccctccacagactcggaaaaccgattgttatgaagcagaaccggagcttcttcatcctctgcgatctcttctgcttctgctgccgcaccatatctgtcggtcagctctttgacgattgcctctgctttctgtgccggaacatagccgcttaccgcaaatgtactctttgtctgaggaagctctccaagaatccgatatttttcggctcttgtctgatagtaatctgagatcagctccagatcctgcctgcttgcagcataagagacgatctcacgccccagctcctctgctttgctttgcgcttctttcatctctgtcagaagctcttccttgtactgtgccggtatcttagaaacggctgatgacggctttgcaaatcccgccgtccgaagtgcttcctccactttggatgcatcctgtctgagacatacaacagccagataagtaaaatccttatctttggatatcagttcgacatttactgcctcgatctccggtgctgcgtctgcaagaatcttcagcacactctgctgatcctgctgtcctggtaatgtaccgatcagaaatgctgtacttctcgttcctgagaagtttaccggaactgtcagaccaagccatggtgtaagcgtttctgcctgattttccagtttctgtgctgctgcctgactctcagccacctgcttatccaacattatgatcctggttgcggtctgcataaaattgtcctgctgcgcagcagcttttgcaagagactccttatcaatcagcggctttcccgccaaagagtccagcattccttttttctccggtgcatactcatccagtatatggagtgcctggtccgcagtctgggaccttctctcgaaagtcgatctggaactgcttacatcctgtttctcacagagttcttcatcttccagccggatatcgacttccatggctccgagttcctgcagacgttccaggatcgctttccgattcttcttcaatgcacagatattgatccgctgcatctgcacgattgccatatgcacatccctccttttctttttttcaggcttaaactaatgacgcgatcacagcttttactgcatctgcccgtttaggctcgataagctgtttcagtgcatccacttccttgagggcctgtgcctccgcgtctgacaattgtgtttcgttgtcttttacaaatgcatcctctgcatcctgtctctgagtacggatcctgttctccgtctcagctttcatggttttggctttcgcctttgcttcctccacaatggatcccgatttttcctctgctttctgaagcactgccgccgctttcgcctcggcttctttgactgacttcaaagtctcgtccagcatcttttcaccacctttgttttcagatttttcatcagattctttgccttttcttagcattgtagcacaatcatttagtcctttcaaccaattcgttaaaagcttgacaatttaacatataatgttttaacaagagtttactgtctgaacctactaataaataggaaagtttaccctgttttttataaccaagaaggccatcgtaaactacgacagcccctccttactcacacctttaattcaagaattcttccgttactcctgtacggagtcatcttcacccctgcagaggtaagcatccgtctggatgccagattcgctggtgtcccattatatttatcatccgcgtagaccagttctgcgattcccgcctgaatgatcgccttggcgcactcattgcacggaaacaacgtaacataaagcttcgttccttccaggcttccacctctgtaattcaggatcgcgttaagctcactgtgcgtcacatacgcatatttgctgtcgcacagatctccttctctgttccacggatactcatcatcgtcacagccctttggaaatccattatatcccatagacagaattttattctcctggcttacaatgcatgctcccacctgggtattgggatctttggaacgcatagcggaaagctgtgcgattcccataaaatactcatcccaggaaatataatccgttctctttccgctcatagattcctcctacttggttccaaaaatacggtcgccggcatctccaagacccggaacgatgtatccgttctcattcagatgatcatcaagagcacccacatagatatctacatccggatgttcttctttcattc

SEQ ID NO: 4129 - DNA, 32759 bp, Unknown
  16S sequences of unknown bacteria
gttgaagcgggtgcgcgatttttccgccgtgggcggcaacgaactcgtgaaatacgaggacgcgcgctacgcactgaaaaaaatggagatcgacgacttgggactggatgagaccgaccgcaatcttctgcgcgcgatcatcgaaaaattcaacggcggccccgcggggctggaaacgctcgccgcgaccatcaacgaggacgcgaacaccatcgaggacgtgtacgaaccgtacctcatgcaactcggctttctcgcgcgcacgccgcgcggccgcgtctgcctcaaaggcgcatacgagcatatgggcgtaaagatgtccgacaaggtgcgcgcgcaaatttctatgttcgatgaataaagcggaaatactgaaaatcgcgctcgcgcagtctgcgatcgactgcgcctgtttgcccgaggattttttgcgcgggaattatgtgatcggcgaggcggcagaaaacccgtccgcgcgcgtatatatccgccgcccgcaggtttgcgacatggtttcctacggctccaacgtcgtggcggcggcgcgcaccgatctgtttcccgctctcgaaaaatatctttcgagcgtcgatgcggcgcacgctttcgaaacgccgaatctattggcgttcaacgaacttgttgcgcccttcgggttgaaagtctgttttatggcggaatactttttgcccgatcccgataaattgcccgccgtcgactgcgggttgcgtatccgcctgctttctccgcgggaatttgcgcacttgtaccttcccgcatggcaaaacgccctctgcgccgaacgaaaagaatacgacgtgctctgcgcggctgcgtacgacggcgacactctggcagggcttgcgggttgttcggcggactgctccgagatgtggcagatcggcgtggatgtgcttcccgcgtaccgtaaaaggaacgttgccgcggcgttgacttcgcggctggcgaaagaaatattgcaggcggggaaagtgccgttttattgtgctgcgtggtgtaatctgccctccgtgaaaaacgcgctgaaatgcgggttttaccccgcgtggacgcagatgaccgccatgcccgccgaatttgtcgaaaattttttaaacggtcaggataaacaatgctgaaaaaaagcgattattattacgatcttcccgaagagttgatcgcccagacgcccgcagaaccgcgcgattcttcccgccttctggtctacgacagggcgacgaacaccacagaacacaggatattccgcgagatcaccgaatacctgcgggcgggcgacgtgctcgtcgtcaacaatacgaaggttttgcccgcgcgccttttcgcctttacgaaaaacggcggcagggtggaaatccttttattgaaacgcctcgatctcacgcattgggaagtgctcgtaaggcccgggaaaaaagccaaaacaggcgtcgaacttttcatttccgaggaactttcgctcgtcgtgaaagaccgcaccgaaacgggcgagcgcatcgtggaatttttattcgacggcgtattcgaggatatcgtgtcccgcgcgggcaccgtgccgcttccgccgtatatccatgaaaaactcgaagatccggaccgctatcagacggtctactgcaagacggacggctccgccgccgcgcccaccgcgggactgcacttcaccgaggaacttttggcgaaaataaagggcatgggcgtagaggtcgcggaagtcctcctgcacgtgggacttggcaccttccgtcccgtcaaggaagacgatctgaccgaccataaaatgcactcggaattttacagggtggacgaaaaagccgccgaaaccgtcaacgctgccaaacgggaggggcgccgcgtcatcgcggtgggcacgacttcggtgcgcacgttggagagcgtggcggacgaaaacggatttttgcggccttgcagcggcgatacggaaatattcatttacccgccgtatcggttcaagtgcgtggacgcactcgtcacgaattttcatctgcccgaaagcacgctcatcatgctgatctccgccctgatggggcgcgaaaacgcgctcgccgtctaccgcgaagccatcgaaaagaaataccgctttttcagtttcggcgacgcgatgttcataaaataatcgtaaggataatacattggctgaaaaattttcattcgaaatcatcaagaccgatcccgaaacgggcgcgcgcgcgggcgtattccacacgccgcacggcgatattcagacgcccgtatatatgtccgtgggcacgcaggcgaccgtcaagggcgtcctccccaaggacttgaaggaggcgggcagccagatcgtgctcgccaacacctatcatctctatatgcgccccgggcacgaactggtcaaaaaggcgggcggactgcaccgttttatgaactgggacagacccattctgaccgacagcggcggctttcaggtgttttcgctcgcaaaactcaataatatcagggacgaaggcgtctggttcaattcccatatcgacggcagcaagcacttttttacgcccgaaaaggtcatggagatcgaaaacgcgctgggtgcggatatcatcatgcagttcgacgaatgcagcgaatacggcgtggacgaaaagtacgccgcacgcgcgctcgacaggacggctgcctggctggaacgctgcgcggcggcgcacgcgaatcccgaacaggcgctctttcccatcgtgcagggcaatttctttgccgatctgcgcctgaaaagtctggaatacgccaaacctttcgcgaaacacggcatcgcgatcggcggattgtccgtcggggagccgaaacctctgatgtacgaaatgcttgacgttttgcagcccgctctgcccgtagacgtgccccgctatctgatgggcgtcggcagtcccgactgtctgatagagggcgtgatgcgcggcatcgacatgttcgactgcgtcctcgccacgcgcatcgcccgcaacggcacggcgctcacgtccaagggcaaagtggtcgtgcggaacgccgtttataaagaggatttttccccgctcgacgacgagtgcgactgctactgctgcaaaaactattccaaagcgtaccttcgtcacctcgtgaacgcgggggagatgctctcgtccatgctgctttccctgcacaacatcacctttttgaacaaactgatgcgggatatgcggcaggcgatcctggacggaacgcttgcggaatttcgccgcgctttttacgcgaaatacggcgaaaactgaaacgggaatgtgttaaaacggtaaaattttacaacttttcacgattttacgtttgaaatacttgcaaaaaaggcataaacgtactaatatagtaattaacaaatcgtaaggagaataaaatcatgttgttcaacattctggcagaggaaggaggcaagaccaataactggacttcgtacatcctcatcatattagtcgtggtcgtactcgtgggatttttcgtctggtctgcgatttccaataagaaaaagcagaaacagttcaacgacacgatcaacgcgatcaaacccggcagcaaggtcaagaccatcggcggtatctgcggcacggtcgtttccatcgacggcgaagagaacactttcgttctgaaaacgggcgaagagggcagcgaatgctatatcaaattcgataagcaggccatctatcagacggacgcgaaacccgaacccgcgcaggaagaagcgcccaaggcggaagtaaagagcgagggtgcggaagaagtgttcgaagagagcaaggaagaagaaaataagcccgaagacgaaacgaaataagtttcttacggtctaaaaaacaaaacctcggcatagattgagagtatgaaatcttgcggaggtttttttatatgcagagatcgggattgaagggcggcgccgtcgaagtgggcaagagcgtggggatatccgtcatcgtgacgctcgcggcggttttgctgttcgcttttctcatcaaaatattttccatcggctcgtcggtcatcacgcccgtcaatcaggtgatcaaggcgctcgccatctttttgggctgtcttttgtcgctgcgcgataccaagggctggctcaaaggcgcgatcgcggggatactggtcattttgttcacctatttcattttcgccatcatcgcgggggagatctcgttcgggctttccaacgtgctggaatttttattcgggggcgtcgcgggcgccatcagcggcgtcatcgccgtcaatttgcacggcgcgcagcagtaaaaaacgcttgccttttttccgcggatagtgtacaatattggaaaagcgagaaaaaggagatgcattatgaataagatcaagacgatcgcccgccccgcggaaagaaagatcacgggctgcggcgaatgcagaagcacctgtcagtccgcgtgcaagaccagttgcacggtcggcaaccagtcctgcgaacggatttccagagaaaacgaccccgaaaaaaataactgatgaattttcgtttcaggagcagaaggtctgctcctgaaattttgtaaaaaggatatttccatggtacatgtttttcactatcaggacaagcattacatattcgatacgggcagttcttccctgcacgaatgcgacgaaaagaccgcgcgctgtctaagacacaaactcggcgaaagcgtcgacctttcggatatctccgaagaggaaataagcgcggcggaggtggactttgacgaactgaaacaggcgggacttctgttcgcgcccgaggaaaaggcgcgccccgtcaagagcaacgaggtcaaggcgctttgtctgcatatctgccacgactgcaatctgcgctgcaagtactgttttgcggacgaagggacttacaagtcgcgccgcgagttcatgtctttggaaacggcgaaaaaagcgatcgattttctcatcgaaaattcgggttcgcgcaagattttggaaaccgactttttcggcggcgaaccgctcatgaatttcgacgtagtcaaagagaccgtcgcctacgcgaaagaagaggcggcaaagcgcggcaaaaaatttctcttcactctcacgacgaacggacttttgctgaaagacgacgttgcggaatttctcaataacgagatggaaaacgtcgttctgagcctggacggcaggcaggaagtgcacgacgccgtcagaaagaccgcgaacggcaagggcagtttcgatctcgtcatcgaaaacatcaaaaatttcgtgcgcatccgcggggacaagcactattacgtgcgcggcacgttcaccgcgaaaaatctcgatttttataaggacgttctgttcctcgcggacagcggcttcgattcgatctccatggaacccgtggtcacggatatacccgacctcgccatcggcaaagaacatctcgaaacggtcgccgcgggttacgacgcgctgtgcgacgaatatctcaaacgctacgcggcgggaaaagggttcaactttttccatttcaacgtagatctggagggcggaccgtgcctttccaagcgcgtgagcgcgtgcggcgcgggcaacgaatatttttccgtcacgccgtcgggcgatctgtatccctgccatcagttcgtgggagatgcgcagttttgcatgggcaacgtgtacgaagggactttggacgaaaagatccgcgaaaagttcaaaaattcctgcctgttcacgcgcaaaaagtgcgatggctgtttcgcaaaatacatatgcagcggcggttgcagcgccaacaactatcactttaacggcgatatcgacgaaccgtacgggatcacctgcgaaatgatgaaaaagcgcgtggaaaacgccatgcatattctcgcggaaaaaaagaaactgcaaaaataaaatttccgccgtaccgtgaaggtacggcgtttgtctctcggaggaagtatggaacatcgcatcgaaaagggcgaaaacgtatttatccattcccgcgcctacgtggcgggcaacgtgaccttgggcgataacgccaacgtctggtgcggggcttgtatccgcggcgatcttgcgcccgtaaaaatcggcgggaacaccaacgtgcaggacaacgcgaccgtgcacgtggggtacaacgttccctgcgagatcggttccggcgtgacggtggggcacaacgccgtggtgcacggcgcgaagatcgggaacaacgtgctcgtcggcatgggcgcgatcgtgctcgacggcgcggtcgtggaggacgggtgtatcctcggcgcgggaacgctcgtcccgccgaacaaggtcattcccgcgggcagcgtcgtcgtgggcaatccctataagatcgtgcggcgcgcggacgggaaggatctggaaagcattcttttgaacgcaagcgcctatatcgaactggcaaaggcgtaccgcggcgagtgatttttatgataatccgataaaaaaggaaaaaaacataaattttacacttgacttaatcggtgatatttaatataatatttgagtatatttgttattttgcatttttatgcttaaaatcatctctaatttgcaggaggaagcaatgggcaagaaaaaatcggtggcgttgatcgttctcatttccctgatactcgccgtattattggcaatgagcgtcgcatcgttttcggttccgtccaccgttaagaactacaattcgctactcagcgtcatcgaccttgggtgcgatctcggcggcggatatcagaccgttatgtaccccgaaggcgtgatttccaaagaggaatatcagtctttggtcgaagcggacgaggcgagcgccgaggactatacggcatacaagggcgtgtatctttctacggatatctactcgaacaatgaaatttccgaaacttttcagtcggaattcgacacggcgctgaaaatcattcagagaagatacgagaacaaaggcttttccgattataaactccgcgtacaggatgactataccattatcgcggagatccccgatacggacgaagacgcggacaacgtgttcgaaaaactcgcgctttcgggcatgctcactttccgcagttccgcttccaccgccaactcccgcaacgttctgatggagggcacctccgaatatatcaagagcgtggaagtttccggcagcgacgagacctattacgtcgttctgaacttcacgaaagcgggccgcaaagaatttaccaagatcacgaccgaccttgcggcgtcgtcttcctccgattcgagttccggctcttcctccggcgcgtcgctgtacgttttcatgggcaccgaacagttgatgaacgtgagcgtcaccgaagcgatcgaccagaactacgtcgccatcagcggtttcaccacccgctccacggcaacttccgtatccgtggtcctcgataccgcgttgcatgaaagcgaccgtttcgatcttacctttacgaattcgggcgccgcgtcctttacggcgaccatgggcgaacacgccgccctttatatcgccatcgcgttcggcgtcgccgtcctcgcgatgatcgtggcgttcctcatccgttacaaggggatgggactggcccacgtgtacggttttctttcctttgccgtcatctatatcctgtgtatcgcgctgatagacggaatacagttgacaatgggcggagtgatcgctattctgctggcgtcggtcatcgcgctcgcttgcaacctcctcgcattcaaaaacatttccgacgagttctattcgggcaagacgctgaacgcggcggtcaaatcgggatacaaaaagagccttgcgttcaccatcgacattcatgtgatcctgctcatcgcggcgatcgtgctgtggctcatctctgcgtcggtcgtcaaattcgcggcgctcatattcctcatcggcatcgtgatttccgcgctgaccacgcttttactgacaagattctatctgtatctcttcttgtcctcggcaaagaataagattgccttctgcaatttcaagagggaggaactcgaagatgactaaaaacaataaatgcctgtttatctctttggctgtgagcctcgtactcataatagtaggcgtcgtcatgttctcggtgctcggcggctttaacgacgacggctttaccaaggacaagaccgtcatcaccgtgacgggcgatcccatcgtcaccgtgcgcgaagatttccgcaacgatctggacgaactgtgcaaaacgacgctcgaagacgcgggcgcgaaagtcggcggcggccgttatctggaaacgacggacaaggggactttcgaatacactttgaacggcagttacgacgaagcgacgctggaaacgtacgtaaaggcgctggaaacggcgatctccacccagaaagcgggcgaaaccgataagacgttcggcgagacctcctttatctacgtggcgcagcaccgccagaacaatctcgattattataagtatatgtggacgttcgccatcgcggcggcagtcgtggtcgtgctcgcgttcgcatactttgccatccgtttcaatctcggcatgggcatcgcgatgggcattgctggcgtgcacgacgttctgctcgcgcttgcgctcgttgcgctccttcgcatccccgcgggcgtcggtatcgcggcgatcggggcgttcgctttgctgttctcggtattcttgaacgggttcgtattcggcagaatgcgccgcgacttcaagagcgacgaatataaggaacttcccgcaagagaggccgtggagagatccgcgaaagggagccgcaaacccgtattcgtgactgcgatcatcatgctcgccgtcatcgtagtgctgggcgtgatcggcgtcgtcacgggcttcgatctgacttcgttcatgctctgcgccttagtagcggtgctcgtcaacacctattcttcactcgtgctttctccttcgatcttcgccgttttcaaagaaaaattcgatgcggcaaaagcgaaaaaagcgaaatacaatttcgatgcggagaagaaaaagcaaaaagaaaaggttcaaaccgtcggcgaagccaaaagcgaatcttaacaacaaaaataaaaaggcgggttttatttcccgcctttttttgcatttcggcaatcacataaatttccaaaggacacgcgatgaaacgactcatacgggattacgaatactcccaggaacaactgaataccatacgcgggctcgcaaacgcgtgcggactgaacgagatcaccgccaggatcctttatgcgcggggcgtggacaccaaggagaaggccgaacgctttctctcgccttcgcgcgcgcactttctctcgccgtttctgatgtcgggcatgcgcgaactcaaagcgctcatcgacgaaacgatggcggcgggcgggcatattctcgtgttcggagattacgatgcggacggcgtgtgcgcttcgtccatacttctcagcgctcttttggaatacggcgccgacgcctccgcgtacgttcccgaacgcgcggaagggtacggcatgaaagaggagtcgctcgcaaggctgatagacgagcgcaatccctcgctggtgatctccgtggactgcggcatttccaaccgccgcgaagttgaatacgtatgttcccgcggcgtgaagatcgtcgtaacagatcatcacgaacttcccgacgaactgccgtcctgcgtgatcgtcaatcccaaactgaaagacgattatccttacgacaacctctgcggcgcgggcgtggcgttcaaagtcgcctgcgcgctgctcggcgaaaaggcgtataaacttttagacctcgccgccatcgcgacggtcgcggacagcgtgccccttttgggcgaaaaccgcgacatcgtcagcgaggggctcaaactcatcaacaaaaaaccgcgggaggcgatctcgctccttgtcggttccaagggcgaaactctcagcgcccagtcgctcgctttcgtcatcgcgccgcgcatcaacgccgcgggacgcatgggcgacgccggctgcgctttgaggctttttacggcgcgttcctcggcggaaacgtacgaactcgcgtgcaaactcaacgaatacaatatcgagcgtcagcaggcctgtgacgaggtctacaagagcgccaaggaaaagatcgcccgcgagggtgcgttcggcaacgtcatcatgctgttcgacgaggagtggaacacggggctggtcggcatcgtcgccgcaaaaatttgcgaagagttcaaccgtcccgccattctcttcgtgcgaaaaggcgatttattgaagggctctgcccgtaccgtcgagggcatcaacatttacgaggctctgcgcgcctgttcgcagtatatcgaagaattcggcggacattcgcaggcggcgggcgtcaacgtgcgcgccgaaaatttcgaaaaactcaaagacgcgctcggcgcgtatctggaagaaaattacggcgaggaaacgtatattcccgccgtcagcgttgcggagaaaatcgaggcgcccgtgagcctgcggctcgccaaggaattcgagcgtctggaaccgttcggcgtgggcaataaaaaacctctcttctatatcgaggggaacaaactggaagtgcgccgcctgaaagcgggctcgccgcacctcggcatccgctgcgaatatctcgacctcgtatggttcggcggcgagcgggcgatgcccgtgctcggcgcggatatcggcaaaaagatcgtcgtggaatgttcggtttcgaaattccgcggcgcggagtacgtgcgcggcaccgtgcgcgaactgatcgcaggcgagcgcggcggctcgtgcgggctgtacgtgttccgcagcaaccttttgcggctcaaagagccgaaagtcggcgtcgggatcgaaaaaaagacggcggacgaacttcgcgttttcatcgaagaaaagcgcaagtcctgccgatacgggctgttggtgatttcctccgacggcgccgcggacgaatttgccgagagccttcgcggaatggaaacggacatcttcaatctctcctcgcaaaacgtgggcaacgcgtatctcatcgcgcccgcggccgacgcctccgtttcggggtatcgcgacgtggtgtggctggatacgcccgcggactgcaatatccgcgaactggcgggaaaacgcgtgctcgtcaacggggaaaaatgcggctatgacgatatcgccgcgctggaaacgtcgcgttcgtttctcgcggaattatactccgcggtccgctcgaaaaacctgcgcggcgagagcagcgtggaggcggcgctcgcgttcggggaagggtacgacgagaaacagacggtattcgcgctggaagtattcgccgaactcggctttattcggttcgaaaacaataaagtctgcgtcgcgcgtggcgtgcgcgcggaacttgccgattcgacgctctatcaagccgtttgccgcctgaaaggagaatgatatggacaccgtactgcaagtcatttacgaaaactacaaaggcgaagacagagaggtgctcgtgcgcgcctatcactatgcggaagaagcgcacagcgggcagaagcgcgcctcgggcgaggcgtatttcattcatccctgcgcggtggcgaagatcctcatcgaactggggctggacagcgcgaccgtcgcggcggcgtttctgcacgacgtgatcgaggatacgcccgtgaccgaagcggacatccgctccaatttcggcgacgagatcttagggctggtcagcggcgtcaccaaactggataagatcgtctttaagtcgagggaggaagaggaagcggaaaacttccgcaaaattttcgtggcgatggcgaaggatatccgcgtcatcatcatcaaactcgccgaccgcctgcacaatatgcgctcgctgaatttcctttccatcgagcggcagaagaaaatggcgcaggaaacgctggacgtgtatacgccgctcgcgggcaggctgggtatttcgcagatcaagtgcgagttggaagatctgtgcctgaaatacctcgaccccgaggcgtacgaatatctggtggaaaatatccaccaaaaactgtatgagcgccacaatttcgtcgatttcgtcgtcaaagagatcaaaaagattttggacgagagcaaaatagagggcgaagtgttcggacgccccaaacatttttattccatctataaaaagatgaaacagcagaacaagacgctcgaccagatctacgatctgaccgcggtgcgcgtcatcgtcaacaccatcgacgagtgttacgaagtgttcggaaagatacacaagtgctggaaacccattccggggcgcatcaaggactatatcgcgacgcctaagccgaatatgtatcagtcgctgcacacgaccgtcgtcacgaacttcggacagccctttgaaattcagatccgcaccttcgaaatgcaccgtacggccgagttcggtatcgcggcgcattggaaatacaaggagaaaaagggcgaggatacggcctttaccgagcgcctttcctggatcagggaagtgctcgattgggaagggggactgaaagattccaccgactttatgaagtcgctgaaaacggaattatacagcaccgaactactggtatttacgcccaagggcaaagtcatttccctgccgcgcgacgcgacgcccatcgacttcgcgtacgccattcacagcgagatcggcaaccattgcgtgggcgcgcgcgtcaacgcgaaaatggtgcctttgaactccacgctggaaacgggggacgtggtggaaatactcacttccgccaattccaaaggcccgtcgtgggactggctcaaaatcgtcagatccagcagcgcgcgcgcaaaaataaagcagttcttcaagcgggaaatgaaggacgaaaatatcaaactcggcaagtccatgctcgaagccgaggcgaaacaccgcggctacgttttgagcgaaattctgaccgaagagagtttcgcaaaactttccgagcgtttttcctttttctcgcaggacgagatgttcgcctccgtcggctacggcgcgatcaccgtcaatcagatcctttacaaactcatcgacttttataaaaaggaagtgcccaaacccattgtcagcaagagttcggaaaaacccgattcgagcggcgtgatcgtcaagggcatgagcgggcttttgacgcgctttgcgggctgctgcacgcccgtgccgggcgacgagatcgtgggcttcgtatcgcgcggccgcggcgtcgtggtgcaccgcgcggactgccccaacctgaaaagcctggaaacggaaggggggcgcattctgcccgccgaatggactgcgggaagttccggaaggttcgtcgccagtatcgtcattacggcaaaggatcagggcgtggcgctctccgttctcaccgccgtcgtcagcgatctgcacctcgtcatcaccaacgtaaattcgcgtttcgataagaataaagaggcgatcattgaagcgagcgtgcgcctgaacggcaaagaggacatcgacgcgcttatccgcaaaatcggcgctgatgagcgcataatcagcgtttatcgcaccgcatccaagggataatcgcattaaatcaagtactatgcgtgacataattcgcgttttttgaggttttgaatatgaagatctataccaaacccgcaggcccgatgggcgcaaacacgtatcttttgaccgaagacgacaagaccgcggtcgcgatcgactgcggcggcgaagaggtgtgggactacgccctttccaaggggctgaaaatcgaatacgtgctgttgacgcacgggcatttcgatcacatcgcgggctgtcccgcgctcgccgcaaagggcgtgaagatcggcgcggcgaaaagcgaacttccgctcttgcaatcgaaagcaaatctcgcttttgaattcggcgcggcttcgcccgaatttcccgtttcctttacctttgaggacggcgacgcgctctccctttgcggcatggaaatttccgtcatcgcaacgccggggcatacagcgggcggcgtctgctttctgtcgggcgaaaatctctttacgggcgacaccctgtttttcgagagcgtcggccgtacggactttcccacgggcaacgcggcgcaactgatccgcagcataaaagaaaaacttttcaccctttcgggcgatcgccgcgtattccccggtcacgaggaagaaaccacgcttgcgcacgaaaaacaatacaattctcttatccgataaagccatgctgaacaccaatgcggaatttttgaaaaacgaactgacggacgttgcgcgccttttcgatgggggcttgcaggcggatatttttcataactttctctacgccgaaaaccactttatcaacaccgtgatcatagacggcaaagaatacgattttaccgaaacgtacgcgcccgcgaacgaacttgaattcaaacgttacgcaaagcgtttcgcaaaactcgcgctctacgaggtgctctccgctgtttacgggaaaaagatgccgtggggctctctgacggggatccgtcccacgaaactcgcctacgccgaacgggaggcggggcgcgattttcgcgcgctctttgaaaagttcggcgtttccgaggaaaatatttcgatcgtcgaggatatcctctgcgaacaggagggcatctatcaaaaacgcgagggcgacgcggatctgtacgtgggcatcccgttctgcccatccaagtgcacgtactgttctttcatcaccgccgatatccgcgccaccgaaaaatttctgcccgattatctgcgcgcgctcgaaagagagatcgctgcgtgcagagaatttccgctgcgctataagagcgcttacgtgggcgggggaacgcctctcgtgctttctgtaaaggaactggaaccgattttgaaagccgtccgcgcgctcgttccttcggacgtcgaatttaccgtggaagcggggcgccccgacgttttcggcgaagaaaaactttcccttttaaaagattacggcgtcacgcgcatctgcgtcaatccgcagagtttcaacgacaggacgctcgccgccatcggccgcaggcacaccgcggcggacatttaccgcgcctatgagatgagtacgaaattcgggtttctcgtcaacttcgatctcattgcgggacttacgggcgaaacgctcgcggaattttcgtacagcatcgacgaggccgtgcgcctttcccccgaaaatatcaccgtgcacacgctgtgcctgaaaaagggcgccaaactcaaagagagcgagtcgcggctggaagtggaggacatcggcaacatgatcgcatattcccgcgaaaagttgtacggggcgggatatcttccttactatctgtaccgacagaaatatatggcgggaaactgcgaaaatacgggctggtgcagaaaggggacggaatgcgtctacaacgtggatatcatggaagagatcaccgataacgttgcgtgcggcgcaaacgccgtgagtaaaaaggtgatattcggcgaaggccgcatcgaacggtacggcgcgcccaaagatctgaaaacgtatatcggcaagacggacgcgattctcgaagaaaagcgtaaattatacctttaaacagtttacattccgagcggaatatggtaaaattatcacgatgcgcatacaaagccgtgcggttctcctcgccggactttgtatcgcgtgaataaaaatccatggaggataaacaagaatggataaggaaaaaaagacaagcatcatcaacgagtacaagagacacgacggcgacacggggtcttccgaagtgcagatcgcgcttctgacggagcgtatcaaccacctcaacgggcatttgaaggcgaatccgcaggataaccattcccgccgcggccttttgaaaatggtcggacagagacgcggacttttggactacatcaaatccaaggacatcgaaagatacagagagatcgttgcccgtttggatctgagaaaataagtaataataagggcggggcaggtgctcggcccttttatcaagtaatggggatgtttcggtgtcctcgcaaagaacaatcaaggagagtaaaatgacacagaatttcaaagtattcgaaaccgagatcggcggaagaaaagtactcgtcgaaacgggcaaatacgcggaacaggctaacggttcgtgcgtggtccgctgcggcgatacggtcgtgatggtcaacgtgacgatgtccgaaacgcccagagagggcatggacttcttccctttgcaggtcgatttcgaagagaaaatgtatgcggtaggcaaaattcccggcggtttcaaaaaacgcgaaggcagagcgagcgataaaggcatcctgatttcccgcctgatcgaccgtcccatccgccctctgttccccaaggggctgtataacgacgtggtggtcatcgccaccgcgctttccgtcgatacgaacgttcctcccgagccgttcgctatgctcggaagttccatcgctctgagcatttcggatattccctgggcgggccctacgggttccgtgcaggtagggctcgtagacggcgaattcgtcatcaatcccgacaacgcgcagcgcgagaagagcaccctttccctcgggctttcgggcaccaaggacgccatcatgatggtcgaagcgggcgcgaaagagatctccgacgaagagatggtcggcgcgatcctgttcggtcacgaagagatcaaaaaacagtgcgcgttcattgaaaaaattcagaaagagatcggcaaacccaagcgtgaaatgaacctgtaccacgttcccgaagatctggacgcggcggtgcgcgaatacgcttccgctaaattggacaaggctctggaggagtacgaccgtcaggcgcgcgaagaaaaacagaacgaagtggaggccgacgtgctggcgcattttgccgacgtgtacggcgacaagacccgcgagatcaaggacagcctctattatctgaccaaagaaaaagtgcgcgccaagatcctggaaaagggcatccgtcccgacgggcgctcgctcaaagagatccgcaagatctggtgcgagcacggcgttcttcccagagtgcacggcacgggcgtgtttaccagaggtcagacgcaggttttgaccacctgcacgctcggcacgctgagcgaggtgcagaaactcgacggcctggacgacgaagtttccaagcgctatatgcaccagtataatttccccggatattccacgggcgaagcgaaaggcctgagaagccccggccgcagagagatcggccacggcgctcttgccgagcgcgcgctcgaacccgtcattccgaacgaagtcgaattcccgtacgccatccgcatggtgtccgaggtcatgagttccaacggctccacctcgcaggcgagcgtctgcggttccacgctggcgctgatggatgcgggcgttcccatcaaagcgcccgtcgcgggctgcgccatggggctgatcaaagaccccgaaagcggcaaagtcgccatcatgaccgatatccagggactggaagatttcctcggcgacatggatttcaaggttgcgggtacggaaaagggcatcaccgccattcagatggatatcaagatcaaaggcatcgacgaaaatattttgcgcacggcgatcaaacaggcgaacgagggcagaaagttcattctcggcaaaatgctcgaagttctgcccgaacccaaaaaggaactttccaagtacgcgcccaagatcatttcctttaacatcgatcccgaaaagatacgcgaagtcatcggcagcggcggcaaagtcatcaacaagatcatcgaggagaccaacgtcaagatcgatatcgacgacgacggcaaagtctgtatcgcgacctacggcgaaaataccgacaacgcggagcgcgccaaagcgatcattctttccatcgcgcgagatcccgaagtgggcgatatgttcatcggttcggtcgtccgcgtgctttccaaagtgggcgcgttcgtcgaactcgctcccggaaaggacggtatggtccacatttccaagatgagcgacaagcgcatcaaccaggtggaagacgttctgaatatcggcgatatggtgaaagtcgagatcatcaagatcggcgaaaagggcatcgatctgaaacttctggaaaaaatcgaagcgtaaataaaaaaaggcttcctgcattgcaggaagcctttttaaatccgaacgccttccaattgcagaaggcgtatttttttatcggtcccgcctgcgtatcccgtcaggcttccgtcgctgccgagcacgcggtggcagggtacgatgacggatatcggattgtgccccacggcgccgcctaccgcttgtgcggacatatgcgaaagtcccgtttccgcggcgatctgcgcggcgatcgcgccgtaggtcgtcgttttcccgtaggggatcgcaagcaaaatttcccaaaccctttgacggaagggggaacccgaaagagagaggggcggcgtaaaatcgggtttttttcccgaaaaatacatatcaagccatgcgtccgtacattcgaatacggacaaaaatttttcttcgtgttctttttccagcgtgcggccgaaatacttttgtccgtcgaaccagagccccgtgagattttgcccgtcgcttgccgtcgtgatcgcgcccaggggcgacgaatacttatgtgtgtactgcattttcctccttgattttacagttcttcgtgatgactgcgatatcccaaaccgtaaacgtcctgcgcggcgctcacgatcataaaggcttcgggatcttcgtcgcgcacgatgtcgcgcaggttagggtagagatgctttttgacgacgcacatgatgatctgtttgttcttgctcgtataggcgcccactccttcgacgtaggtcacgcctatctccaattcggataaaatgcgcgcagtgatcttttcgggattgtcgctgacgatatagataaactttgcgccgttgccgccgtagacgatgcgatccatcaatacgctgtacacgatgacgctgacgcaggcgtacaggccgaattcaaggttcttgaatacgatggcggtaatgcccgcgatgagaaaatccgcgatgaggaagatcgaaccgacgcccagatagcgatattttttatgaatgagcatgacgacgatatccagtccgcccgtcgtgcccttgaaacggaacacggttccgatgccgagcgcggacagaatgccgccgaagatcgctgccaaaaacagatcgtttgtgaggggcacgatgccgaacttcgtgccgagaaaggtgatcagatcggtcgcgagtgataagacgacggtcgcgtagaccgtagaaaacagaaaatcttttccgaacacgatgagaccgatgatcaaaagcggaatattcaggatcaaaatcagaagacccgtgctcacgggaataaatttattgaggatgatggcgatacccgaaatgccgcccgtggaaatgttgttcgggttgagaaagagtgcgatgcccgccgccaggcataggcatccgatcgtgatggcgacgtaacgcacgacgcctttgataattttctgtctgtcgatcatattatctcctttcagcgaaatccattataacacggatttttgcaaatgtaaagggactataaactataaaaaaacacggcgcattgattgtaaaattccgccggatgtggtataatagaaaaagttgcttataaggaagaaaaacattgaattttaacgaactgaaactcgacggcaggatcttgaaagccgtcaaagcggcggggtacgaaacgccttcgcccatacaggaaaaggcgataccgcccgcgctcgacggccgcgacgtattgggctgcgcccagacggggacgggaaagacggcggcgttcgctttgcccattctcaataacttaaacgggaaaccgcaaaaccgtatccgcgcgctcgttctcacgcccacgcgcgaactggcattgcagatcgaggagtcttttcagacttacggaaaatatctgccgtaccgctgcggcgtggtgatgggcggcgtttcccagcaaaaacagatagaacttttgaaaaggggcgtagacgtgctcgtcgccacccccgggcggcttctggatctgcatgcgcaggggctcgccgacttaagcggactggaatttttcgtgctcgacgaggcggacagaatgctggatatgggctttattcacgacgtgaaaaaagtgatcgcgcttctcccgcgccgtcgtcagaccatgttttttaccgccacgctgccgcccgaaatcgtaaaacttgcaaaatcgttgctcgtcaatcccgtcgatgtggcagtcacgcccgtttcttccacggtggaactgacggaacaactggtctattttacagataaggcgagcaagatagatcttctcgtttctcttctgcaaaacggcgcgatcgcgggctccacgctcgtctttacgcgcacgaaatacggtgcggacaaactatgccgcaaactcaaagccgcaaagatcgaggcgctcgccattcacggcgacaaatcgcagggcgcgcggcagaacgcgctcgacagtttcaaaaggggaaagatccgcgtgctcgtcgccaccgatatcgcggcgcgaggcatcgacatcgaggatctgccctccgtcgtcaatttcgaacttccgaacattcccgagacctacgtgcacaggatcggccgtacggggcgcgcgggtaagcgcggcaccgcggtgtcgctttgcgatttcgacgagaaggaataccttgccgatatcgaaaaactcatcggcaaaaaattgaaagtcgtcgaagaaaacgaatttcccatgaccgtattcgtcaactcgccgccgaaagtaccgcagccgcggccttcccgccgcggacaggcgcagcaaaggtaaaaggctcccgaacggtgtatttcatagggaattaaaaaaggatttgatatttaatcaaatcctttttcttgtataacgaaacccgaagaataaaaaaacgaaaaacttttctatatccccgcgcgcttgctttacaaatgcgggcaaatcgtatataataaaagtaagcctacgctaacgatgggggtaaaaatgattaaatatcgagaatcggaagaaatgtatctcgaaacgatactgatattaaaacaaaaaagcgcgaacgtccacgcgataaatgtcgccgacgaacttggatattcccgtccgtccgtttcgcgcggcgtaaatctgcttgtcaagaaagggtatattgttgtaggacaaggcggcgaactgcaatttaccgcagcgggaaaagcgaaagcggagaatatctacgaccgtcattgcgtgattacgaaattgctcgaaaagatcggcgtcgaaaaggaactcgcggaagaaaacgcgtgccgtatagaacacgtcatatctcccgaattgtttgaagcgatcaaaaaattcgttaaaaatggttagcggctgctaacttttgcttgacaaaaaattacgtttggtataatatatattgcggagtaagaaattgctccgcaattttttgtcagtcggttagcaacgacttacgagcattcgccttgaaaggcattattttttgagttgaagttagcatattctaactaaaatgcgaggagtaagaaaaaagatgacggcatccgaattaagatatttagcggcgataaacgatttggacgatcaaggaaaaggagcgaggatggcggctatgtcacaaaaactcaacgtatccaaagtaagcgtatatagggcgatagaaagactgatcgcaagcggatatgtcgggcagaacggcaaacgggttttacttaccgataagggaagaaaggaagttaccgattatttgtcggtggttgaatttataggcgagaagttaataaagtactgcaatacgccgaaagaattagcgttcgacgaagcaataggcgcggcttgttcgctcggcggcgagagcagaagcggagtattggcgtatgtaaaatcgaaaacggcggagtgatatggataaagaactgaaagcgatggaaaaagaaaaaaaacttattcccgtgatgataaagaaatattgtaaaggcaagcataagcaagagcgtaaggcgcaaggcgtaaaacgcgatgaagtttgcgccgaatgcagagaactgaacgactatgcgttattccgattggaaaagtgtccgtttaaggcaaacaaaaaattttgctcgttttgcaagatacattgttataaacccgatatgcgcgaaaaaataaaagcggtaatgaaatattcgggaccgcgtatgctgttttctcaccccgtatttgctttctctcacgccgcgcagatgataaagtacaaaaagcaactgaaaaaggagagtaaaagtaatgtttgaacgggcctatcgaggtagaagggatgaagtgcggaagataacgtaaaacgcgaagaaatcgtacaggcaatttccgcgaaggattatatcgtcggatgaatggactgcaaccctcatgaaaaatgcgggttttggggagaaagaaatgatagacaaggaattattcaaactcataggtaagaataaaaaatacatattcattgccgttttgctgcaggttataggtttgatcgccaacgtaggaattacggcaagcatctgttgggcgatatatcttgcatttacgagatccgagtccgttatgtattcgtatccggcaatttgtgcattgataggaattatcgtccgttatataatgacaaggttgacgggagatatgaaagacgttctcgggcgtaaagtcaaaaaggatttgcgcgaacgtacttacaataagatagtaaaactcggcgttcgttctacggacagaatgagtatggcaggactgacgcaagtgagtatggagggcgtggagcaactcgatttgtactattcgagttacttgccgcaattctttttcgctatgcttgcgcccgttattttgtttctgatttgtgtgtggatagattggcgaaccgctcttgttctcttggtttgcgttccgctcattcccgtttcgatcgtagccgtaagcaaatacgccaaaaaaatatttgcaaagtattggggcaagtacacgtcgatgggcgacaagtttcttgacagcgtgcagggcttaaaggaattaaagatattcaaagcggacgcgaagcagcacgagaagatgaacgagagcgcggaggagtttcgcaaaatcacgatgaaagttctcgtaatgcaacttgccagtacaaccataatggacttggtcgcatacggcggtgcgggtgcgggaatcgcgcttgcgatctgcggtacggcgttttggggactcgcccccgtttacgcactgttcttatgccttgtcgcggtagagttttttttaccgcttcgcgcgttcggttcggcgttccacgttgcgatgaacggagtaagtgcgggcaaaaaaatcatatcgttacttaacacgcccgatcccgtatggggaacgcaagaagtgaacagtacatcgatcgaactcaatggcgttacgttttcatacgacggcacgcgcgacgtgcttaaaaacgtgtctatgacattccccgaaaagggaatgaccgctatcgtcggcgagagcggttgcggaaaaagtacggtggtcaatatgcttgtcggagcgttcagaccgaaaagcgggaatataaccataggcggcgttccgctcgagaacctgtcgcgcgaaagttactattcgcgccttgcatcggtaagttataacacctatatatttaatcagaccgtgcgcgaaaattttttacttgcgaaaaaatcggcaaccgacgatgagatttacgccgcgctccgctcggtcaatcttgcggagtttatacgcgagaacggcggactcgataaagttattacggaggacgcaaacaatatatcgggcggacaaaaacaacggcttgcgcttgcggtcaatcttgtcgcagacaaagatatctatattttcgacgaagcgacgagcaatatcgacgtggaaagcgaagcaatcattatgcggaacataaaagcgttgtcggatgataagaacgttatcgttatatcccaccgtcttgcaaacgtcatgcctgccgataatatttactttatggaaaacggcgaaattaaagagagcggggaacataccgcgcttatcagagataagcatggttatgagaaactgtttaacgcacagaaacagttggaggagggctacgcattatgaaagggcggaagcaaaagttacgcagaagcggcgcgaaaataatggcaagcctgatactcttgctcggaagccttgcgtatataatgattttggcagtcataaacggcagtatcggatttatctgcgctatgggcgttacggtgttcggcgcggtaggcgtggcgaaagcgctcggagaaacgattgcgctgtcatacggttggataataggacttgccgtaggttgcggactgttgcgcggactgttgcggtactttgagcagtacagcaatcattttatcgcgttcaaactgctggcggttttgcgtgataaaatattcggcgcattgcgcacgctgtgtcccgcgaaactcgaaagcaaacagaagggcagtatcatagcgatgataacgtctgacatcgaaactatcgaagtgttttacgcgcatacgatatcgcccatttgtatagcgatacttgtttcaacggcggttttcctgttcgtcggtttcgttttatcgtggtatctcgcgttcctggcggttgcaggttacttaatgatagggattgccgttccgataatttcttcgggcagactgaaagagagcggcgtaaaataccgtgcggagttcgcttcgttcaatgcttacttccttgacagtgtcaaaggtattaaagacatcgtgctgaataacgcaggcaaggagcgcgaacaagaggtaaaccgccgtagcgaactattgctgaaagaaacaaaaaagatgaagcataacagcacgcgtgcatcggcggcaaccgaacttacggtatcgctgtttattattgcaacgcttatcgcgggtatcgttctcgttcggttcgatatgctgacgatagggaaaatgattatcgccgtggttgcggtgttcggcagtttcggccccgtcatcgcaatatcggcgttgcccggaaatcttacccaaacttttgcaagcggcgacagaatattgaatttgcttgccgaagaacctgccgtaacggaagtcaaaaacggtgaaaatatcgaatacgaaaaattgaacgtaaccggcttgtcgttctcttacgacgggcaaacgcaagtattgaaagatattaaaatgcacgccgaaaagggcgagattatcgggatcgtaggcgagagcggatgcggaaaatctacgttcttaaaattgcttttgagattttggcaaaaggaaaaaggcgagatcgcgtataacgggatcgacattgaccgtatcgactcggataaccttttagacaacgtaacaatggtaagtcagacgacctatttattcgacgaaacgatagaagaaaacttacggattgcaaagcctgacgcaagccgggaagaactcgaatcggcttgccgtctggcatcaatacacgactttattatgacgttgccaaacggctacaaaacgcaagtaggtgcgctcggcgataatctttcggcgggcgaaaaacagcgcatagggcttgcgagagcgtttctgaaaggaagcgatctgatacttttggacgaaccgacgagcaacgtggacagcatcaacgagggtattattttaaaagcgctcaaagagcaaaagagtaaaaaaagcattatactcgtttctcaccgtgaaagcactatggcgattgccgacaggatttaccgtgccgataacggacaaatgcaagaggtaaaagtatgacaccgagagaaaaagcaatcatcgaactcgtgcggctgtcggaagaagaacagcgcggcgctgactttatcgcacaggaagaagcggcaacgggaaaaccgaaaaacaaaatttttcaaaaatatatgataaaggacgtcgtattccttgcgatcataacgtgttgcacgctcgttacgggcgcgattatgccgcttttggtcaatgtgccgctgttcggtataatacagttgggactcggattacagttttcgctgtttcccgttataggaatgatgaaagttaaaaagccgttcgctcttttattgcaatcggcgttcatctcgatatttcttgtatttatgttcccgcccatggtactattgattgcctgtgcgttcgtggcggaactattcacgcttttagtttttcgcggctataaaaacgattgggcgtgtgtgtttgcgggaacgttgtatatgccgttgacattgccgttaatgtatatgtactacaatgtattctatactgtaagcggcgatgaaaaagccgccgtatctatatttataggcggcggcaacgtcggtcttatcgtgggtatatcttttgccgtgcttgcggtttgttttgtaggttcggtgatcggaatggtgatcgcgcgtgagttgaagaaagcggggaagttgaagtaatggcgttttttaaatacaaaagcaatttatatccgttattcgcgatagcgtccgcgcttctcattatgatattcggactcattatggcgaaaacagttgcgtgttcgtattttctgatcggcgcattcgtatggctgctattattcggatgctgcaggcaggcgataaaaacattgccgttgtttgtgatcatcggcggcgcgttcgcgttgatcgcgtattattcgtcggggcaaaatcccggttccgcgcttgcgatggctaaccgtttcggcgcggtgtttcttgctctcgttccgggaatgagtattcaggcggtggcaatgacgaggaatttgtcgcagttacatatgccgcgcggcataacgctcggtatgctcataacgatgtcgttcattccagtgcttcgcggcgagataaagcgcgtgcgcgaagcaatgaaaacgaggggcgcgggcagtatcttaaatccgaaaatcttttaccgcgcgttcctcattccgcttgtaacgaggctcgtcgatatatccgatacgcttgcgctttcgatagaaacgcgcggctttacgctcggcaagtgcaaatataccgtttataagaaagaagttgtcaacgtgttcgatgttctgtatctgctcggactgatcgcgggggtggtgcttgtatgtatgctataaaagcaatcgaatttaagaaagtcaatttttcgtatgaaggttttgacgataaagttttatcggacgtggacttttacgcctgttacggcgaagtcgcgttactttccggtttgtctggcgaagggaaaagcacgctcatatcgattgcaacgagtattattcccaatatcgtcaagggcaaaatcacaggcgaagttctgatcgacggctatccgatagaaggacagaaattagcggctgtctgccgtaaagtaggtgtggtattgcagaacgccgataatcagatcatccataaaatcgtagaggacgaaatcgcgttcgggtgtgaaaacttcgctcttgcgcaggaaaaaataggcgcgcagatagacagggtttgcacgatcatggaaatagataaaaccttgcccacgcgcacgttgtcgggcggacagaaacagcggctgatcacggcttccgcatttgcgtccggccagaaaatccttttactcgacgagccgcttgcaaatctcgacgttgagagcgcaaaacttttaatggatacattgcgcaggcttgcgggcgcggggtatgccgttgtggtggcggaacacaggctcgatatggtgttgccgtttgtcgattccgtatggaatatctgcgcgggcaatgttacgaaaatagagaataaacaggaatatctgctttcgcagacggtaaaaatcgaagataacgcggctgaacacgaaagagggcgcgagattttcaaactcgatcacgtcgcgttttcggtaaagaaaaaagaaatactcaaagacatagacttgaatatttacgaggacgaaagattgttgcttctcggcgagaacggttgcggaaaaactacgcttttgcggcttatcgcaaggctgtataaaccgaccaaaggatacatagaacaatcgctcgatcccaaattcggcaaaagcagggcaagcaagaaatggtttaacagtataggcgtggtctatcaaaacccaaactatcaactgtttatgccgacagtagaaaaagaaatctcgtttaacgccgtaaataaagagtatgcggacgaaatgattgctctgtttaacctggagcacttaagaaaacggcatccgcaatcgctttccgaagggcagaaacgcagagtttcgatagcggcggttgcggcgggcgatccgaaagttcttttgttggacgaaccgacagtaggacaggactataaaggcttatgcgaactcgtaaagatcttggacgaattgcacgacaggagcggcaatacaatgatcacgattacccacgatatgcggtgcgcggaagctttgtgcgacagggcggtactcattgcggacggcgttattaaaaaacagggcggcaaagaactcgcatacgaatacttttttgatagaaacatatataatatcgaataatgctgtcagcatgatttcggtataaaggcaaggtggcatagcttttcgctatgccaccttgctaagtgatttcatgatcccttagacaaacgtcctttcgggagcctttttttcattacatttttcgaaacgccgatttgggctgcgagcagatggggcagcgccagtcgtcgggcagatcctcgaagggaatgttgccttcgtacacgtggccgcatacggagcagacgtattttccctcgtcgggcgattctttgatataggtaggagcgtttttgcccgttttgcctttgagtactttatggtaataagcatacgtcatgggggtgttctccgaagtcacgtccgcgccgatcacctcgcccagaaagaccgtatgcgtgggagaatccatcgtatcgacgactttgcagcagatatacgcgcaactgtcggaaacgacgggcagcgaatttttcaccgcatatgcggtttccgcgaatttatcgcgatcgcgcgaagattgaaagccgaaacgtccgatgatttcgggactgctgttttcggagaggatagagagggcgaaatggccgcagtcggctatacatttgttcgtataattgtccttattgacgctgaccattacggtcgcgggcgacgccgtgatctgcgccgcgcagttggcggtgcagccgacgggtctgccgttatcccaagaggtaacgatgtacacgccgtaagacatggcgtggaatgctttttcgttcatatgatctcccgatgacgaatgttctttttaatagttttccgctctcaactgaaaatatgcctgcggatgcgcgcatacggggcacacgtcgggcgcttttttgccgatgacgatatgcccgcagttggagcactgccagacggcgtcgccgtccttgctgaataccaggtcgtttttcacgttggataaaagtttcagatatctttcctcgtgctctttttcgatcttggcgacctgttcgaagaggaacgcgatatcgtcaaagccttcttccttcgcttcttttgcgaaagtcgcgtacatatccgtccattcgtaattttcgcccgcggctgcgtccgcaaggttggcggcggtgtcgggcatgccgccgtgcagtagtttgaaccagatcttcgcatgttctttctcgttgttcgccgtctcttcgaaaagattcgctatctgcacgtagccttcctttttcgccttgcttgcgtagtaggtatacttgtttctcgcctgtgattcgcctgcgaacgccgcctgcaagtttgcttccgtctttgtgcctttcagatttttagccatagtgaaattacctccgatttttattttttatttttgcaatcgggacaaatcccgataaactcgatgatgtgatcctgcgcctcgaatccgtgcgtgtcgccgagcgtttcttcgaggtgatccaaagttgccatgggcgcgtcgaaaatgcggccgcaggctctgcagcgcatatgatagtgcttgggcgtgttgaaatcgtaacggtcgggcccttcgctcagtttcacgcgccgtatcatgccctgatccgccataagatttaaatttctgtacaccgtcgccttgctgatattcggatgttcggcggaaattttcgcgaaaatttcgtcggcgttcggatggtcgcgcatcgagcgcacggtatccagaatgatttgtttttgaatcgtgtttctcataacctttttcttattaggaattattcttatttaatattatatacctttttaaatatttgtcaagaactttttcgaaatatttttgaaaatattgacaaaaacgccgtttgtgccttataatgatatcgcagatatctatggcggaacagggcatactatttgccggaggaaggaatgaattacgataatacagatctgcattttttacacaggcactgtatcaagaggtttggcgaagaggaaggggagaagatctatttccgtgcatccaaactctatgcggagttggtagtcacgaccgattatcagaacagcgcggaagcggaaagacaattgaaaatgctgatttttcccgtcatcgcctattacaaaactctgcgcgcgttcggctatacggaagattcggctttgggctacgtccgcctcgaaacggaaaaagcggcgagaaactgtgcggacgttctggccgatcagaaacgcaaactctttccctttcacgcgttcaagcggaacatcaaaaaattcatggcttccaagtttcccgcgcccgcctgcaaatatgccgatctttgcgtgcgcggcaaaaagatctcctttcagatcaaacagtgcatttattacggtatttccataaaattcggatgtcccgaactttgcacggtcttctgcgaatacggacgcatcgcctttgcgggtttgggcccgcacattgtcagcgagcgggggaaaaccctgacagaggggcacgatcagtgcgaattcgcctttgtcaaggggcgcaaataaagtataataaaaaacgcggcggcggatcgaaacgatccgccgccgttttatcagccgcaagttttccttatgctttgccgttggagccgagcacgtcgcagattttatgtttgacgatctctttgaccgccgctctcgcatcgcccaggtactgtctgggatcgaagtgggaggggttctccgcaaaatgtttacggatcgcggcggtaaacgccacgcggaggtcggagtcgatgttgatcttgcataccgccatcgacgcggcttttctcagcatctcttcgggaatgccgatcgcgtcgggcatggcgccgccgaattggttgatgacggcgactctgtcctgcggcacgctggacgcgccgtgcagaacgatggggaatccgggaaggcgcttgcccacttcttccaggatatcgaaacgcaactgcggcttttggccgggtttgaatttataggcgccgtggctcgttccgatggcgatcgccaacgaatcgatgcccgtcttttcggtaaattcgcacacttcgtcgggctgggtaaaactggcgtcctccgccttgacgttgaccgcgtcctcgatgcccgcgagttgtccgagttccgcctcgacgacaacgccgcgcgcgtgggcgtattccacgacctttttggtgatctcgatattctcggcgaaagaatggtgcgaagcgtcgatcatgacggaagtgaatccgccgtcgatggcgtccttacacatttcgtacgacgcgccgtggtcgaggtgcatgacgatgggcaggcccgtatcttcgacggcagcctccacgagatgtttcaggtaaacggggttggcgtactttctcgcacccgcggaaacctgtaaaatcaggggagaattacattccttgcccgcctctacgattccctgaatggtctccatgttgttcacgttgaaagcgccgatcgcatagccgcccgcatacgctttcgcgaacatttcttttgaagtcactaatgccataagagttcctccgaaattttatttccgcagtctattgtacaacaaaaggggaaaaaaagcaatttaattcgggaaaatacttgaattcgctttataatttttttcaacggtagtataatagataggtaagaaaaaagcggaggcaaacgcatgagagatcaaagaatagacaaactggcggacgttctcgtcaattattcggtacgatgccaaaagggcgaaaaggtgctgatcgaagggcgcggcatcgacgcggaactcataaaagcgctcgtggaaaaggtttacgaggcgggcggctttccctttgtggaagtggtggatctggcggtggaacgcgctcttttgctcggaacgagcaaaaaacactgcgaactgcgcgccaaatacgataaataccgcatggaggacatggattgctata

SEQ ID NO: 4130 - DNA, 23364 bp, Unknown
  16S sequences of unknown bacteria
gaacgctagcctgtcacgctagaggtcgacggttcgagcccgttccgggtcgccacatttgcctctgtagctcagtcggtagagcaagggactgaaaatccctgtgtcgttggttcgattccgaccggaggcaccatcccacgcggctttagctcatctggtagagcgccaccttgccaaggtggaggtagcgagttcgagcctcgtaagccgctccaaatgaaaagggcgtccggatacggcgcctttttctatcccatggcgacatagccaagtggtaaggcatgggtctgcaaaaccctgattccccagttcaaatctgggtgtcgcctccaaaagaaagggctcccacctctggtgggagccctttcttttgcggggagcgttccggatttgaactggggttcaacatctgggtgtcgcccttgataaggacggccgtgccgaaacggcggacacctctgcctttcggcacatgatgtagctaacgccaatgctgatggtgtgagcccgcgggcacatgggcgagcatcctgtcatttcacattcccttgccctcccaccgccgatatgctatcctatatccaaaagtggtgattctatggattttattatggattgtttagtagaaggatttcttgaattgtttggggaaggttttgtttatttgtgctcagcttttgttccaaataaaaatatctccgagagagcccatagaatcattggtatagtggttttatttgtgtctctggccctttttgttggattaatagttggtatttttctacttgttgaaacgaacggtcaaagcttttggggttggttgcttatttctttgagtgtgatatatattgtcggcggaattgctttaaaaatattttctcatatgaaaaaatagtatttgattttatgaaaagtattaaacggcagaaattattgaaaatactggctttttcgcagattgaggtactcaaaacagcaatgattttcgctttggtgcctaaatggtgcccggatttcttatggtgatataaaaccatacaagcagatataagggaataccatactattcgaggacgaaagcactcgttgctttcgccctcttgtctttctcataagcaggggaaaacgcacttgtcaatgtcgggcgaagcccgttcatctcgatcgttgacgagggtggctgactttgccattgcgcacggaacagttatgatagaaaatgaatgctataatgtataaatcgaaaatatgtggaggataagaaattgaaaattatagaggtaaaagacagaactacatcgttgatagaacagctactggtagtgtgggagagctctgtaaaggcaacacacctctttctatcagagaacgaaatagaaaacattaagaagtatgtaccacaagcattaaaagaaatacctcatttaactattgtagaaaacgacaatcaaattcctgtggggtttatgggtattgtagagcagcatcttgaaatgctctttatctctcacgaagaaagaggaaaaggattaggtaaagaattgcttaaatatgggatagaaaaatattcggttaatgatttagcagttaatgaacaaaatcctcttgctaaaggtttctatgaacacatgggatttgaagtttataaaagaacagagtgtgatgaacaaggcaatccgtatccacttttatatatgagattagattgataaactacgatttgctaaagggtttgggatattcccaataagtgatttttagcagggtttcgcaaagcgaaaccctgcttttttgtataggcgttccggatttgaactggagttcaagtaacccggctcctgattttgcaaatgcaaccgcctttggctttgcctcaaggggaacgggagcaccagtccccggagagaccgcgggagaatatgggttgaatctagagggacaatctgctatactatttgatatataatttgcagatacggatgtatgccgaacgcggatttgaatgcaaaggagcgccaagagatgcatgtgaccctgctgacctatacccctgatccggaacggaccgtagcctgtgcggcccgtctttgctattccccggccggcatcgatgaggtcatggacaagctgacggatgagaaaaccgcctctttcgtcgatatgctggcggaaatcggccacgagagccctatcgaacacgcgagcttcaccttcggtatcgaaggggtgtcccggtcgctgctggcgcagatcacccgccaccgcatcgcgtccttcagcgtccagagccagcggtatgttgcggagaaccgcttcgattatgtcctgccccccgaaatcgaggcgctgcccgaggccgcggccgtctatcgccaggcgatggaggaggaccaggcccattatgaggagctcacccgcctgctcaagaataaacataaacaagagctgctcgcctccggcatggaggaaaaggcagccgaccgggcggcggaaaagcgcgccattgaggatgcgcgttttgtcttgcccaacgcctgcacgaccaaaatgatcgtgactatgaacgcccgcagcctgcaaaatttctttcgccaccgctgctgtaaccgtgcccagtgggaaattcgggagctcgctgagcggatgcgggcgctttgcgttgaggcggcgcctcatctcttccgccatgccggtccgccctgtctgtccggcccctgcccggagggcaaaatgtcctgcggcaaaatgcgggaggtccgggaaaaatatggagtggcaaaggagcgttaaggcggatgggacagctcgtcgtgctcgacggcctggacggcagcggcaaaaccacacagctcgcccgtctgggcgggtatttgaccggccgcgggatacactataggcaaatcagctttccggattaccggaatccgtcctcgtccctggtccggatgtacctggacggcgcgttcggatcctcacccgatgcggtgggcgcttacgcggcctcctcgttttatgcggtggaccgctacgcgagctacaagcagttctggcagccggattacgaggcgggggccctgatcctcgccgcgcgctataccacctccaatgcgatccatcagatggggaaactcccgaaaagcgagtgggacgcttacctgcgctggctggagggctatgaatacggccttctcggactgccgcggccggatctcgtgatctttttggacatgccgccggaggtttcccaaaccctgctgtcggggcgctatgagggggacgaggcgaaaaaggatatccatgagcgggatcgggcttatctgctgcgctgccgggacagcgcgctttacgcggccgaggcgatggggtggcaggtgatatcttgtgccgatcagggccggccgctgcctgtcgaagaggtcacggtgaggctggcccgcttgctggacgcctgcacgataccaaacggtaaggaagaatcataatatgatgcaaaccgcagccaatctggatttccgatacccgaccgtcgaagacgccgcctgggcggcgccgctgctccgcaccgcgggcaggatgggatgtgagtattccttcaccaccatgttcatgtggcggtcgctttaccataaccggctggcgagatggggggataccctgtttatcagcgcgggggaggagtccccggtttatctgccgcccatcggcccttccctggccgacggggtccgggttttgctggaacggtcggccggacaggaacgccccttgacactggtcggggcggatgccaccgtggtcgaacggttggaggacgccttccccggccggttcgcttttacctctcagaggggcgatttcgattatatctaccgcacgagggatctggcggagctgccggggagcgcctatcacgccaaacgcaaccacatcgctggtttttcccggaaattcaactggacctttgagccgatcgatggccgcaatacggcggaggtcgaggcgatggcgcaggaatggtgccgccagaagggcaactgcaaggataagggcctgcgtacggagaactgtgccatccgggaagtgctgcggcatcgggaggccctgtccgtccggggcgggctgatccgtgccgacggccgtgtcgcggccttcacgttcggttcccctatcaacgacaaggtgttcgatattcaggtggaaaaggccctgccgtcctttccgggggcgtacgccgtcatcaatcaggcattcgcctcgaccctgacggcgtatccgtttctcaaccgggagaacgatctggatatcgagggactgcgcaaggcgaagctctcctatcatcccgccatggtcctggaaaaatacacctgcacccaggtgcggtgaggggacgggcggcggatacggctttgttccggcccgggagggggctctttggcctcctgcgccgcatggccccaatgaccctctggaaggggacgctcaagaatggatgatttcgtgccgcgttttgcccgtccggaagaccggccggccctgtcccggctctggctcgcctgttttccaggggacacgatggaaaccgtccgggcggtcttcggccgccttgccctggaaacggaatgcctcgtggccgcgccggacggcttttccgtttccatgctgttgctgctgccgcagcggtatgcggcggcggggaggagcctgccggtccagtatatctacgcggcggccacgctgcccgcttaccgggggcgggggtattgcggtgccttgctgaaagccgcgttcgaggtcggccggagccggggacaggcggcctcttttctgcgcccggcctcccaggggctggcggactactatacccagttcggctaccggcctttcttcggtttcctggagaggcggaagtctctctctaacgcgtctgtgcgcgtgcccggactggaactctttcccgtgcgggactacggggccgcgcgggaaagggttctcgcggacgggccgcctcatatcgtttgggaaaaacggtgggcggatctggcgctggagcaggccgaggcggccggcggcggaggtttttcctttgccgggtccgctgggtgcgcgctctgcgaacccgacggggacgcgctgtttgtccgggagcttctctgccccgcctctcagacagatgcctgtatgtccgccctgctgtcgcggttcggccggaccggcattgtctgccggacgcccgtccgggcggcagaaggggtgggaacggtgttcggcctttggcgtcctttggacgatgacggatgggaacagctccggcccgctgcgggggataaaccgtatatggggctggcgttagactgaaattggtggtgttgatacgacatggtgttggtttttttggcggatggattcgaggaaattgaggctttgacgacggtggatgttttgcgccgcgcggagctcgaggtcgtgacggtggggatcggcgacaagctgatccggggtgcccacggcattctggtggggacggatacggatgattcccgtatcccgacaaaggatctgcaggccgttgtgcttccgggcggcatgccgggcacgctgcatctggaaaaggcggacgcggttcagcaaatgatcgagttcgcgctcgtcaacggtgcgctgatcgccgcgatctgcgccgccccttcgatcctgggacacaaaggcctgctggaaaaccgcagggcggtctgttttccgggattcgaggaggagctgtgcggcgccgtctactgtgaccagcccgtcgtggtggatctgccgttcgtgaccgccaaaggggccggcgccgccatggatttcgccctcgaattggtttcccggctggcgtcgggtgagatggccgccaagctgcgcgcctccatgcaatgtcggtaggggatatccggccgatgaaggccgtcatgagggaacaatacaaagaataccggcggaagatggatccggaacggaaagcggcgttcgacgcggcgatccggaagcgggtgacctccctctggcagtataagcggaacgatctgctgctggcctatgtttcgacacccatcgaggtggacacgcacgggatcatccggaccgcgctggaggacggcaaatgcgtggcggtgccccgctgtgtcccggggaccaggcagatggaattttaccgcatcaaaagcctggaagacctggtgccggggaccttcggggtgctggaaccgaagccggatccggattttcttgtgacaaatttcgaacatggcttgtgtttgatcccggctctgtgttatgattggagaggataccggctggggtatggaaaagggtattacgaccgtttcctggcccatttcgggggagacatggtgggaatctgttacagcgactgcgtgcggagaaagcttccccacggccgtttcgaccggccggcgggtttgctggtgaccgagcggtatttgcgccggaccgtgcgctgaggtccctcccccaacggctttctaggaggaaaatggtatgacggacgatcaaagggagaaggatatcgaccgcctcatcgaggatatccaggcggagaaacaggcgcgcggctctgaacggccgccttctgtgcccggacagcccgggccaggcgaccagctgacggaggaacgaaaagccaaagtatcgggcttccgcctccagctcgatctggacgaggaatacggcgacccgcctcccgcggatcccgcgccggccgtgccggaggcgggaaatactcccgtggagcaggagctgcgggggacgcttcccctgacagcgcaggaggaggcctccgaccagccggaattggagccgctgcttccagaggaggagcccgaagaacagaaggctctctcgcagaaaaagacaaaaaagaaggtcaaggaccgcaccacctggggctgcatccgtggtgtcatatacgcttgtatcgtgctggcgctctcggttacgctcgcgtattttctcattaccggcggcatcgacctgaccgggctgaacaaatcggacgttgtagtggacgtcgttatcccggagggggcctcgaccgaagcgatcgcccgtatcctcaaggacaacggcatcatcgaccagccgctcatcttccgcctttattcaaaagtcaccaatgcggacggcaagtatcagccggggacgttcagcctgacgccgaacatggggtatcaggttctcatcgataccatgaagaccggcaagccccgcgaggtggtctcggtggtgatcccggaaggcttcacgctcaacaagatcgccgatcgtcttgaagaaaaccaggtctgcacccgttccgatttcttccgggccgccaatacggtgatgtacgagtatgatttccttaaagacctgccgaccgacgaggagcggatttatccgcttgaaggctaccttttcccggatacgtatgagttttacaccaacagctcgggagaaaccgtggtccgcaagttcctggacaacttcaacgcccgtgtggacaccagtctgaaagcggcgatcaaggcccgggggatgaccatcgaccaggcggtgattctggcgtcgatcatccagggcgaggccgcggataccgacaacatgaacaaggtctcccgcgtcctgcagaaccgcctcgagaatcccggtacctatccgcgcctggaatgcgattccaccagcagctatgccaagaatatggttcccggcgagggcggcggcgcggtattcgtcaaggcgtatgatacctatgagcgtgaagggcttccggtcggccccatcaacaatccgggcctggacgccatccgggcggtcgtggagccttccgaagacgaggaaatcaaacagtgctatttctttgcgacggcgtatatcgacgaggtcccgcattacttttactcgaaaacctatgcccagcataaaaagacctgcgaaaagtacggcatcggcatccacgcgaaatcctgacgggtgaagccgcctcgggaagcggatgttgtcgacgctcccagccggatctcgagagagatccggctttttcgtatgctcgaatggatccgtcccggccgtttcggattactttgcccggaggcgggcaatactacctccatgggtccgattctttcaaaggggatttgagcatgagaaagcggtcgctggtgatgttcgccgccgtactgttcgcgttcagcggtatcatggccaaggtatacaatttgagcggaggaagcctgtttcaaacagccgatcggcagtcgagctttaccctcaccatcgccaacagccgcggcacgatctacgaccggaacatgcagccgctgaccaatacggggaccgagcggcgtgcctgcatttcacccaacccggaggtgctggctatcctgtccaaatatctggacgaggaaacctgggcatcggtcagcgaccgcctgcagagcgggcgcccggtggtggtcagcctgcccgataaggcgctccctctctcggccggcctgtccatctacacggtaccggtccgccaccagggcgatattctggccccgcatctgctcggctacctgggcagcgacgggctgcatggcgtcaccggggtagagcaggcctttgacgaggagctcaatgccgcggcgggctctctgaccatcaccttccgggtagacggttcgggcaagcctctgcagggagaggtaccggccgtgagcgataccttggctaaatccaaagggggcgtcgccctcaccatcgacgcggagatccagaaaattgcggaggaagccgctcattctggcattgaaaagggggccgtggtcatcctggaaccctccaccggccgagttctcgctatggtcagcgtccccgattaccagcccgctcatctggcggactatcttgaggatccaaacgcgcctctgctcaaccgcgcgctgtgcaattacaattgcggttcggttttcaagattgtttcggtggcgacggcgcttggaaaggggatcccccttacgcaacaattcgcctgcagcggcagcctgccggttgggtctttgtctttcggttgctccaaccggttgggacacggggttctggatatgaccggcgggttcgctcaatcctgcaacccgtattttatccagctgatgcagatggcgggagggcaggcgctctataaccaagccgtcacccttggcttcgaccgccccatcctgctcgccgaggggatcaaaactgccagagcgaccctgccatccgagacggagctgcaatcgccgggtgtgctggccaatttgtcgttcgggcagggctctctcctggccacacctgtccatgtcgcgcagctggtggctacggtcgtcaacgacggtttgatggtccggcccaccatcctgcaggggatggttgatgaaaccggtacgctgaccgaacagagtaccgatcccccggtgcgcgcgttttcttccgaaattgccgcggaactccgccggatgatgatcgaagtggtggaaaacgggacagggaaatccgccaggccgctgaacggcggcgggggaggtaaaaccgggacggcggaaaccggttgggtggaggaaggcaccgcgctcgtacagagctggttcgcgggatttttcccggcggagaatcctcgctatgcgatcgccgtccttgccgaggataccaatcgcaccggctccaaatccgcgccggtgtataaggaaatctgtgaaaatctctatttgctggagaagacccgtcaggcaaatacggctgccggcagcgggacgagctctggtgacgggctctgaaataaggcgggcctaatttatgaatagagaacctgcagggggttctattcgaatatggacttgcatatacaggtggtttaaacgaaaaggctcccctcgtcagggaagccttttcgtttcggctggttatggattttggcatcaaaatccgacgctcgccgtacgtatagctatccagtaattttaacaaaaggcacccattgatgatgcaaagagcgcctccattatgaatgccattttttaaacggtttcaagcaaaaattgatgggttttgtaaatgctttgctctttgtttttttcgagaaaggttcatctaaccccctcgggaaaggttcatccaatacccacggaagttcgatttgcataacggaaattgtaaaatattcccctgtttgttcgttgggggacacaaaaccattcgtgataacgatgcttaaaaacagatcatcatatatatcaagttcatattcactcattgatccgatgcttccgcatacggtatagtccacctggatataatcgatgtaatcatccatttcagcactcattgcttcatccggctttgaaatgtcaactccgaattcacttaaaaaagcgttcagcttagggagtttgtctttgatttgtgcgtaataattccggcaacacacgcagtcgcagagagtgtgtgttttataatattctttcgttttttcaacgtcaacggaaaaaacatattcatccttttggatcgttgtcatcgttacacctcgccacaccaatattctgccacccatgagtaaagacagctgtcaaacagagtatccgtgatgaatcaaacaaggcatcttctttacagaggatgccttgtgagcgggagatggcggccggccttatacccagcgatttttagaattgtaaggcagtggaccgggccaggctttgaggatctcctgataccgtttgtaggccctggcgacggcggtatcccaggaaagatagaggttttgtccggcgttttgtccggttttgcgcagggcttgccggtcgctgcaggcttcgagcaataccttggcgcaggaatctgcgttttcttccgccagatacccgttttcagcatggactacaccctcggccgcgcagcttccccgtacgagcagggtggggcagtcgcaggcggcggcctccttgaccacgatgcccgaggtgtcgtaggttgaggggaagagaaagaggtccgccaggctgtaatatgcgcgcagtgcctcccggtcataaatggcgccggtgaaaacggcgcggtcctggaggccgcgggcgacggaataggcctgaatatcgggggcgtcatatccatccccgacgagaagtgcccggaacggtaccccctcctgctgcaggagggccaggctgtccaggatgagccggacgtttttgtaccacatcatccgcccgacgaacaggaagacgaactcgtcctcccggatctggtatttctcccgcaaggcgtttactgcggcatcttcggcccgcccataggcaaagtcggtgccgttttccatcacggtgtatccgcccttatagccgatgttgcgcagcgcccgcccgcagccttcggtcacgacccatacctcgtcgaccgcattgacgttgtccagcaggaagcgcatggccagacggcgcatgctgtcgagcggcacccgcttggcgatgtcgatatcgaacttggtgtgataggtgaggacggtgggaacgcggggacggcggttgatgttgcccaccagcacggacgaggcgaagggggcatggatatgcatcagatcgaagtgcttgcggcgcaggcggatgagggtttcgggattgaagggatttcccgcccggtatccgatgcggtggtcgagagggatggactgataccggaacacctcgaacggatactcgtcccgcactcccttgtactcgggagtgaccacggtgacatcacagtggttccgatgcaggacatccgcgtaatttttcacagcctgtgccacgccgtcgatggtgggcggaaaagaatcgttgaaaaggccgacatttagtctgtccataggtgtgttcctcctgatcgatacgcgccgcggccgcaaagcccccggctttttcattttacaatggaacggcatgggatgcaaggggagaaattctgtagaatttcttaaagcaaagggaagaatctggaaacacggtctgtcaaaggcccccctttgcagacctttggcggaaaatgcaaaaaatcctgccaaaaaaagtctgaaagcatcttttatcttttcccgaaatacggtatactaggcacagtcccgttataaaaaacggcgtccttccggcggcgcttccgtatgaacgggcggatgtcgggatgggatacggcatactatcgaggacgcggcctgcgtccggaaaggcggcggacagaatggcggtcacctattcggtttcgctctcgcagatcatcaaggaagtggggctggagacggttttcatgccgtccaatcctgaggagctgctggttacctgtagcgacgtcaaccgtccgggtttggcgctcggcgggtattatgactatttcgacagcgaccgcatccaggtcctggggaaaagcgagcacggatttctggaggcgctggccccctccctgcggacggtccggctcgagcagctcgtctcgcgccgtccccctgccgtcgtggtgagcaggcggctgccgatcctgcccgatctgcgggaggcctgcgtcaaatacggagtgccgctgctccatacggcggataccacctccggcttcatggcggcgctcattgcgttcctcaatgtccagctcgccccccgcattacccgccacggtgtttttgtcgaggtgtacggggagggaatcctgctggcgggggacagcggcgtgggtaaaagcgagacggccatcgagctggtcaagagagggcatcgcctcattgccgacgacgcggtggaaatccgccgggtctcggcaaaaacgctggtgggttccgccccggacaatatccgccatttcatcgagctgcgcggcattggcatcgtcaacgcccggcgcatcttcggtatgggcgcggtcaaggtcacagagaaaatcgacatggtgatccagctcgagcagtgggacagtgaaaaggtgtacgatcggatggggctggacagtgaatacgccgacatcctcggcatcaccgtccccatgctgaccataccggtcaagccgggccggaacctggccatcattatcgaggtggcggccatgaacaaccggcagaaaaagatgggatacaacgcggcgcaggagctgatgcacaacctgggtatggatgaccaggtgccgcccccccccgaggcccagaccgaatgggaacaattctgactgcgaaggagacccgcgcatgaacatgcccctgacccgcgtggtggcggatctgcattgtcataccgtcgcctctacccacgcttacagcaccgttaccgagctggcccgtgcggcggcggaacagcgtcttttagccatcgcttgtaccgatcatggtccgggcgccccagacgccccccatctgtggcattttggaaacatggatgtccttccgccttcgatcgaaggggtgcgggtgctccacgggatggaagcgaacgtgatggatttcagcggacgtctggatctgccggaagaacggtttttctcgctggatctcgttattgcctcgatgcacctgagtgtgctggagccgggcagcgccgaggcgtgtacggcggcgtatctcgccctggcggagaacccggaggtggatatcatcgggcattcgggcaccccggccttccggtacgattatgaatccgtgatcccggccttcggccgcagcggcaagatcgtggagatcaacgagaccaccttccgtgcccggtcggcctctgtggagaactgccggaggattgcggagctgtgcaaagagcacgccgtccggatagttttggattcggatgcccatttccacggacaggtgggccggatgccccgctgcctggagcttttgcgggagatcgatttccctccggagctcgtcgtcaacggcagcgaggaggccttttcccgttttttgaacgaaaagcacctaaccctctgaaaagcagccaacccggggccctgccccgtacatacttgaaactgggaggtctttctcatgtatacaatcggcatcgatctcggcggaaccaatatcaaggcgggtgtcgtggacagcggctgccatatcgtcggcacggccaaatgcaaaacggcgctgccccggtcggcggaggccatcgtcgacgacatggcccgcatggccagggaggcggcggctgacgctggcatccgaatggaggaagttgcatacgtcggcatcggcagccccggcacctgcaacgaggaaaccggcatcgtggaatatgctaacaacctgcgttttgaaaacgtccccctgcgccagatgatgcatgaccggctgggcctcgacatatacattgagaacgacgccaacgccgccgcgctgggcgaggcgctggccggggccgcgaagggtacgcagagctgtgtctgcatcactctcggcaccggtgtcggcggcggcattatcataggcggcaaaatttacggcggcttcaatttcgcgggtgccgagctcggccatatcgtgatcaatgtcgacggcgagctgtgtacctgcggccgccacggctgctgggaggcttacgcttccgccacggccctgatccgccagacccgccaggcgatggtggcgaatccggacagcgcgatgtggaggatcgccggaaccctcgacaaggtggacggccggaccgccttcgacgccatgcgggcgggggacgtcgtggggaaaaaggtcgtggaccgctatatccaatatatcgcctgcggcctgatcaacgttatcaacatcttccagcccgaggtgctgtgcatcggcggggggatctgcaaggagggcgacaccctcctgaagcccttggaggcccatatcgccaaggaacggtacagcaaattcagcacccatcagacccggctgtgtgtagccacgctgggcaacgacgcggggattatcggcgccgcaaacctgcgggatgcggtatcgggctgagccccgccatcttgtgaaggtaggagacatgcctgtgcaactgacacgactggcggaggcgttccgctccctcggctatcctgtggcggaaggggagcctatgtcccgacacacatcgttcaaggtcggcggcccggcggatatgttcgtcaccgtgccggacggcaaaggggccgccgctgtcctttacaggtgccgggaggccgggataccggtttttgtcatgggcaacggcagcaatctcctcgtcagcgatgagggaatcgagggcgtggtgctgaaaatcgagaccactgccccgccggcgtctggggaggcgggcgagattgtctgtcccgccggcctgccggtcaaaaagctctgcctctttgcccgggatcaggccctgtcagggctggagttcgccttcggcatcccggggacggtcggcggcggggtgtacatgaacgccggcgcctatggcggccagatggccgatgtgctcaccggcgtgacggtggtcacccggacaggggagacgcgggaggccgcggctgaagagctggagctcggataccgtcacagtgtgctgatgaagaccggcggcgtggtgacggaagcccgtttccgcttgacatcggataaacgggagtttatcgccgcccgcatggaggactatctttcccgccggagggaaaagcagcccctcgaatacccgagcgccggcagctttttcaagcgcccgcccgggcacttcgccggcaccctgatcgaagcctgcgggctcaagggaaaacgggtcggcggggcgcaggtcagcgagaaacacgcgggtttcctcatcaacaccggcggcgccacctgcgcggatatcctggagctgtcgaggcaggtccgggagatcgtgtatgaacgcaccggtgtccgcctggagccggaggttcgtccgatcgggcgggggattgccggggaataggaaaggaacggcctgggctgttccggcggacaaaatgtggaaaacaccctgtacggagctccggaaaagagaggatcgaaccatggaattcgtcattgtgaccggtctgtccggtgcgggtaaatcccgcgccgtggatgcgctcgaggatatcggtttttactgcgtggataacatgcctccgaagctcctgcccaaattcgcggagctgtgcatgcagtcgcagaacaagctgtccaaagtcgccatcgttatggatgtgcggggcggtgaactgttcaacgacctgttcgacggccttgacgacctcaagcgccagtgcggcgactataaaatcctgtttctggaatgcgacgaccaggtgctcgcccgccgctacaaggaaacccggcggcagcatccgctggccgcggcgaacgataactcggtcctcaaagcgatcgccgccgagcgcctgcttttgaaacccgtgcgggcccgcaccgattatctggtggatacttcccatctgtccacctcccagctcaaggaacggatcacctcgctgtttatggaggattcctctcaggcgatgaccattcagtgtatgtccttcgggttcaaatacggctatccggccgaggccgatctcgtcatggacgtgcgatgcctgcccaatcctttttatgtggatgaactcaagcgtcagaccgggctggatcagccggtgcgggccttcgtgctcgaccgggaggagaccaggggattccagaagcggctgtacgatctgatcgactacctgattcccctgtattgcaacgaggggaagagccagctggtcatcgcgatcggctgtacgggcggcaagcaccgctcggtcaccctgaccgaggagctggccaaacacattggggaaggcggacaccgtgtcattgtcaatcaccgcgacattgccaagctgtgaaaggcgggggatcccatgtctttttcgtcggatgtgaaacacgagctggccgggatccaggaggagcgggtctgctgccgcatggccgaagcctacgggctggccgagttcggccacgccttttccacccgcgcggtttcgctgcagacggagaacgaggctgtggcccgcttgtatgccgccgtcctcggggaggccggcgggattccgctgtccgtcacggagggaaagggcctgtatacggccgcggccgcggagcgggaggatcggctgcggatcctcagccggttcggccatgcgccgacggatgtgggggtgcgtctcaaccgggccaacctggaatgcgaccaatgcccggcggcctttgtccgcggggcctttttatcctgtgggaccatgaccaaccccgaggtcgactaccatctggaattcagcgtcccgtttctcaatctgagccgggatctcgtcactttgctgcgggagctgggcctttcggccaaacaggcccgccgcgccggcggctatgtggtgtatttcaaggaaagcgaaagcatcgaagactgcctgaccttgatgggcgccacttcggcggccctcgagctgatgggcgtcaaaatggtcaaggatatccgcaacaatatcaaccgggttaccaactgtgagagcgccaacatcgataagaccgtcgccgccgccgcggtccagagtgaggcgctgcggaagatcgagcggacggtggggctcgacgccctgccggaggaactgcgggagattgcctatctccgcctcgagaaccccgagctctccctgcgggagctgggggaggcgctcgaccggccgctcacccgttcgggggtcaaccaccggctgcggcggatcctggaattcgcagaaaagctgtaataccatatgggaggggacgaaccaccaggccccaggaccaagccgcccgaaaatttgggccggtccgaggcttttctctccggatctcccggttaaaacgtctgtggcgttgttccgtcgaatcgaccgggcccatcgaaacctggttttggaaaatcggggaacgcttttcccggcaagcagcaaattccgattcagggcgttgggaaccatattttcagtaaaggaggcgcgggtatgcagctgccgatatctgcgcagatgacccctcgtgaaggcgtgggatccctgtactattcttttgcgtcgtttgacgcggtcccgtttgtccggcacgggttttccacccggctgggcggggtgagccgagggccgttttccgcgatgaatttgagctttacccggggggatgaggcggcggcggtccgggaaaattttgccctgttttgtgaaaatctcggcatgaaagcggaagatgtggtggtttcggcccaggagcaccacaccaacctctacaacgcgacagcggccgaccggggccgtggggtgacgagggagcgcggctatgccgacatcgatgggctgctgaccgacgagccgggcgtggtactgtgtacgcagtatgccgactgcgtaccgctgtttttcgtcgatccggtccgtaaagttgtggctacatctcacgcgggatggaaaggtacagcggcgcggattgggcggataaccgtggaccggatggcacgggattacggctgccgtccggaggatatcttggtcggaatcgggccgtccatcggggcctgctgtttcgaagtggacgaacctgtggcttccgtattcgccgccatgggggaaggcgccggctgcatacgggagcgcggcgccggcaaatacgacgtcgacctgtgggaggtcaatcggcgggttctcgcgggggccggcatagaaccggagcatatcagcgtcgccggcttgtgtacccgctgccatccggatattttctggtcacatcgcgccgcgggggccctgcgcggcagcttggcggcgttcatcgcgattgcagaccgatagggggcgggagaatgccttacgggattgccgatatggcgctctacttttttctatacagctttctgggctgggcgcaggagacggtccagtgctccatcaaggagcggcggttcgtcaaccgtggcttcttgaacggccctatttgcccgatttacggctgcggggcgctgctgattttcacctttctgctcccgatcaagcgggggatcgcgtccccttttctcgcggtgccgctggtgtttctatgcggggcggtcatcgcctcggcgctggaatatgtcacttcatgggtgatggaaaagctgttccatgccagatggtgggattattcggataaaaagtggaacataaacggccggatctgcttttggatttcggtcggttgggggctgctgacggcggtttttgtgtttgggatacagcccgtatttgaggatttggcggcagggctgtaccgtttccagccccttctgccaaacatactggccgtgtctctgaccgggctgttcctcatcgataccgtcgtttcggtcaaagcggctctgtccatcgggaaccgcctggaacagctcgaaaagctgggcgctgtgctcaaggagcatttggagaatctggagctgccgaccgaggatatcctgctgcggcttgagagtgcgtatgataaaagagcggcgaagaagcgcgccgcccaaagcagtcgccaggcgcggctggatgcatggcgcaccctgacgccggaggaaaagaagcggcacgtggccgggctggtggcggagctgcagcgcagacaggaggagctgttccgctcccgtttccagcagcagcgactgctgcgcgccttcccgcgtatgcgccgtaccgacgcgggaaagggcacggggaaaaactgcctgctcgacgaatggcggaatcggctgaacaaaaaatgatataccgtttcaacacccggccatccgaacatcggacgaccgggtgttgcatatgggcgtaacaatatccgctcgccgcccagcggcggagcgtatggggctcttgcggcatgaacacaaccgttcaagagcgtcaatcgttgtggacgagggcgcggaccgtcacgacccgcgggccggtggggttgttctcgaaggtcagctggccggtgcagaagctgcacgccggttcaatgacgtcgccctcggctttcagttccagttcaaggcgcttctgactggcgatacaggcgcgctgctgtcccgtcacgacctggccatggccgcactggcatggcacgatcgtgacgggcttactttttcggtttttcatcgactgatagagccggggacaatacagcagatcgttctttgaaatttttccaggcgcagacatggcgaagtcccggacgacgctcagggaacatttaccggtgcgcagaaagtaacaggtggatttgctgaggttcagggtgacttcgacagtgcctttgataatgctcatacacgactcccattcgattccgaggatccgccgccctccaaagatatgagacggaccggcttctgctgccggatgcattcggccaccacgtgctgtgtgccgtgggaggcgccgtcccaaaaggccaggaccaggtccgcataccggacgatagcggtattgcggacaagcggggcctttttcccatattggtcaaagtcagggggaaagatccgcatcggcagaccgagcagggcggcgacctgggccgccaaggcatcgaccccctgtgcgccgccgctgacgatttcgctggcgttggcgggcagatagcgcaggatctgccgcacagcctgtccgtcggcctgccggctgccgaccacggctaccttcaagcggaccacccccatcaaaataaacatctgttcgtctttcagtatagcatatttcagcgccgcttcaactcttttttgtaaatttcttctgatattttccaaattttaaatagaatcgtgtactgcggggctcttttcggccattctccggaatcgtttccggaaaaccatgaccttttcgggtcaaattcctattcatactcatccgttccggtggaacagtaatacaggcaacgcgtgtccaaatcgcgcacagccagcatcatgagggacggaaggaagagtatgaaaaaatgtattcaaacgattagtgtggtttgcgcctttttatgcggcctggttctgacagccgtgacgatgctgtcccgctccacgccggagcagtttaatgtcgtggcaggggatccgctgcggctgccgggagcgatccgcgtgacagaccagaaaaacgcgacggggcagtcggtaagggcttccgcgctgtcggccggcagcacgtatcaggcaacactcaagctgtttgggctgtttccgctcaaagacgtcaaggtcaaggtggtggatcagccgctggtaatcccctgtggagtcccctttggaatcaaaatgtatacggacggggtgctggtggtatccatgtcggacgtcgataccgccacgggccctttcaatcccgcccggtcggccgggatcaagaccggggatgttatcgtgtccattgacggcgagactgtgacgacgacggagcaggtggcgtccattgtggaggagtcgggtggaaaaaccatgacctttcatatccgacgggacaatatcgccttcgatatccggttcacaccggcgctctcggtcaatgaaagccgctggaaggcggggctttgggtgcgggacagctcggctggtatcgggacattgacgtttttcgatccggaaagccaagtgttcggcggattggggcatgcggtttgtgatgtcgacaccggcgaaatcctgccgatctcttccggggaaatcgtacctgccaggatttacagcgtggttaagggcgccgtcgggacgccgggagagctgcggggcggatttgaggccggatcgctgggcagccttcgtaccaacggcgaaaccgggatatacggggagctcagcactgccccggccgacggccaggcggtaccggtggccatgaagcaacaggtgcacacgggtcaggcgcaggtattgaccaccatccatggaacgacacccaagctctacgatatccgcatcgatcaggtgcggtataacgattcggctcccacccgcaatatggtgatcgttattacgggcgaggaactgctcgaacagacaggcgggatcgtccaggggatgagcgggtccccgattttgcaggatggaatgctcgtaggagccgtgacccacgtgtttgtcaacgatccgaccaaaggctttgcgatttttgcggaaaatatgctcaaaaccatggacagtgtcgcgcaatccctggaacagcagcaaggagcggcatgagaatggaaacagcggttggaaccagagcgggatgactccacgcacggagtcccgctccggttccttcgcttttctttcatcaatctctatttttccccacaaggagaaaaaactttttccaaactattgcatttatttccattttatggtaatctatgagcgtcgcaaaaaatgaatggagggttttctgtaaaatggagaagaaaatcaaggtactgctggcggataatagcgaagcctttgggatcccctgcgcggcagccatgcgttcgcacagcctggatgtcgaaaccgtggaaaaagacggacggcagattatggacgcgatcacccatatccaacccgatgtggtgatgatggacttcttcctgccccatctggacgccatcggtgtgatgaaagggatccgggcgagtcatccagtccatgccccgcagttcatggtcatgtccagctatgacaatcccaatctggaacgcgaggccatgcaggccggcgccgattactatatattaaaacccttcgactctgaagagatgtcggaacggatcctggctctctgcggcaagccgaagcttgaggcgctccgtcgtcccgccccggccgtttcctccgggggaagcctggaaatccgggtgacggagatcatccatcagatcggcgtgccggcgcatatcaaaggctatcaatacttacgggacgcgatcctcatggcgattgaagacgaggaaatcatcaacgcggttacgaagcgcctgtatcccgccgtcgccaagaagcacgggaccacctcctcgcgggtggagcgcgccatccggcacgcgatcgaggtcgcctgggataggggagacgtggatgttctcaactcctatttcggctataccatccacaatggacgcggcaagcccaccaattcagagtttatcgccatgatttcggataaattccggctccaactaaaaatttcctgaaaaaaacggtgcggatttccgcaccgtttcctttttactcaggggggttcccgtttctttagagcatcaagcgggcctttttaaagaggaagagtgaaggggaaccatcggccggatccctcttctttgtcagtataatcatcaca

SEQ ID NO: 4131 - DNA, 9499 bp, Unknown
  16S sequences of unknown bacteria
tcttcctcgatgatgacgcgctgagaagcgatgatttcctttcttctctccgtcttgatttcgagcattctcaaacgaagcttctttcctacgtatttttcgagttcctttacgtaacccgaacggatttccctcgcggggacaaataccgtataggagccgagctcgcccgtcaagccgcccttattgtatcccgtacaggtgatggagaattctttgcctgcctcgatgtcggcaagcattgcttcctcttccttaactttcttgatcattttctgagaaagtttcacgggattcacggacacaaccatcagctcgatctcgtccccgattttggacgcgaaatcgtctttattgtaagcctcgcaatccacttcgtccttgtcgagcattacttccttcttcgcgaggggaagcaacaccgcaattcccgaatcgtccgccgacgaaatcgtagccgtaatcaactgacctttcttgaacttcggttgattgtccatgttcgcaacgacttcttccatcgttgcttttgcttctgtttccatttccatttttaagagaacctcctgagtttgcgcgttaggggtgctggcacccgtaacaatacctacctttttaaatcttttgatttttttataatcaaggtcgtcggaattccgcatccgaaaaacgtgcctgcaatacttcgcgcaaatgtcgtacaacttgttggtgttactgctgttcagtccgccgatcaccaacatagcgtcacattgctccgcaagttccctcgcttcattttgacgtcctatagtagtatagcaaattgttttaaaaacttcaactgtttttccccgtctatccttaataattttaataattttttcaaatttttcaccggaataggtggtttgagccaccacacagcagtttttgtcgggcaaaacggaaaaatcgtcctcttccgaggaaaagatatacgccgaatcctcgcaccagccgttgagtccgatcacctcgggatgcgtccgttcccccacgatcacgacggagtttccccttcgatgctgttcgtcgacgatcttttgcgtccttctcacaaattcgcaggtgcagtccaccaccttgactccccgcgcctcgcattcgtcgaatacgcgcttcgcggcgccgtgcgaacggatgaccaaagttgccccgtcgggcacgtccgagaggctctctacggtgacgatgccccgtgccgtgatggtgtctaccacctctttgttatgaatgatctctccgtaaatataggtgttttcggagtcgatgctcaacgcggtatccaccgccttttttacgccgtgacaaaatccgccgctcttcgccactaaaatttccatagtttccgcttattccgccttttttcctctctttttggacgccagaaactccgcgtgttccctccgcattcccaaaagcacgttgaggagtttttcgtccgcttccctgatatcttcttccgtcaactttctattatagtattcggacagctcaaaaggttccccgatgaggatatgattgagtctgaacggctttggctttttatagatcagcatgggaacgacgggaacttttgctttgatcgccatgactgccgcgcccgatttgaagggcagcatttcggcgtttgtcttattgcgggttccctcgggaaagagagaaattttttctccgtttttcaaacatttcagggagtccatcaccgcgcggacgtcgctgccgtcgcggttcacttcgatggcttttaagcttttgcaaaatcctttcataaaccagttggtcatgaccgattttttcgaaaggtaatggattccctcccatgtcgtacaggcgggataaatgacgtcccagatgcgatagtggttacacacgtatacgcacgccccgtcttttacctttctttttccgtaaaagcgaaacggaagacaaagccagaaaatgggaatgacgacgatgcgcaaaagattgagcatccccatgatatgcctgccctttttgtcggcgggcacggtgatcgtgcgccgttttcccttttgcttcttcgtctgcgttttctgcttttcttcacccttcgaagactgtatttcttccatgatcctgcctcagattttagattgaatgatagatttgatcgccgccacagcctgttcgatatccatttcggaggtatccaccacgaccgcgtccgcagctcgtttcaacggggaaaattcgcgttcggaatcctgtttgtcgcgccggacgatttctctgtgcagcgattccaattccacgttctgtccgcgctccgtcagttccttgaatcgacgctttgcgcgcaccttactgtcggcggtaacgtaaaatttgaatttcgcatcgggcagtacggcggagccgatatctctgccgtcgagcacgcaggacatactttccgcaattttccgttgcacctccaccattttttcccgcacggcgcgatgggcggaaatatcggatgctgccatggaaacggcgttttcgcggatgttttccgaaacgtcctctccgttcaaaagcgtgtgctgaattccctctttgtattccactttcagatcgagttttttcagcatctcttccaccgcacgcacgtccttgggatctatccccgcgcgcagagcgttgagcgcacaggctctgtacatggctcccgtatcgagatataagatatgatactcctcggcaagacgctttgcaatcgtactcttcccgctccccgcggggccgtccagcgcaatattgtaaacggcggatatatcttttctcaaaacttttgctccttttaaataaacgtgacgcgcggggcgcgcggcggaaaattcggcgaagatcatcgcgcggacgcaaagcgccagcccgcccctgatgtccggttccgtacaggcgaacagaggggcaaaatcataaccgcattccctcgcggctttggcgggatgataagaatggatatccgtcgtcaaagaaaagacgatgcagcgaatttccgttttatccgccttattctgcgcgaaaatttcgtccagaagttcttttacagccgcagaaatatctttcttacaatccgaatcgatcgtcgtcgcgccgcggataacagtcatgcgttttgccctcgctaacaattttatcaaaccccgttcgatgaacaccttgattatatcacgcaaaagccgctttcgtcaagcaaatatgcaaaaactttgcgaatctcccgccgtttttccgctcagcggatactcctgccagccgcgtatcccgtggaaaaagcgatttgaagattatacccgcccgtaaacgcgtccgcgtccaatacctccccgcaaaagcgcaggccgctcaccttcttcgcttccatagtcttgggattgatctccgaaagctccaccccgcccgaggttataatggcttcctcgaagccgcgcaatcccacaggtttcacgggaaactcttttaaggcattcaaaagccggaaacgctcttctttcgtgaggacgttgacgttctttttttcggaaatccccgctgccgaaaggactgtggcgatcatcttctgaggcaacagctcgcacatcgcgttcaagagctgtttgtttttgtactttttgaaatcgcgaagcagccgcctgtctagcgtatcgaaatccagtgcgggcttcaaatcgagaaagagcgtcaccccctttaagtccgaacggtttattacgctggaaagagagagtaccagcggccccgagataccgaaatgcgtgaacagcatctccccgaaactctgatataaaattttattttctcgttttgccgtcaacgaaacgttttttaaagacaatccctgcaaatccttataaaaagtaccttgcaggttgatgccgcaaagccccggtttcaaatcggtgacgaaaagaccgcagtccttcgcaaaacgatagccgtcgcccgtggatccggtggacggataactcagtccgcccgtgcacactacggcttcgtcgcaaggatatgtttgtttatccgtttccacccccgctatgtgaggcatagcacttatgtctgacgaagttctcaaagagatctttttgaccgtttccccgaggcggatctcgacgccgacggatttgcacgctctttcaagggttttggtcacgtcgctcgcgtggtcggaaacgggaaaaacccgtccgccccgttcggttttgacggataatccgtgcgactcgaaaaattccacgacctttttcggggggaaggaataaatcgcgcccgtcagaaatttggctccgtgcacgacgttttgtaaaaactcgtcgggcgggatatcgttcgtgatattacaccgcccctttcccgtgatataaattttttttccgagtttctcgtttttttcgagcaatacgacgcgatttccgttttccgcggcggcatatgccgccatcagtcccgacgcgcctccgccgattacgcatacgtttttcatggtcttgtgattcttccttctttatacgcaaagaatttcggcacatacttcccgcgccgaaattcttttgcattgagcgtattctttccctttccgtaaaaatccgcttttaaacgggatagacgtttcctttggcaagatccctgtccacgccgtctttctgcgcttctctccatttgaagaaattttcggcaacctgttcgaaaacggcataggagagaacgtcctcttccttttcataatagcccatttcgatgacttttttcttgacttcctcgtattcgggctttaaatcgtccgcgggacggtaggtgatcctctccgcgtcgccgagcacctttttcgccacgtcttcattgatgggcatgggaagtttgccgtatttccccgcaaataaatccttcgtttccttcgtgaccatcttgtatcgttcgcccatgatcacgttaagcacggcctgcgtaccgacgatctgcgaggaaggcgtgacgagaggcggatagccgcagtcttttctgacgttgggaacttccgcgaggcaatccatgagtttgtcttccttgcccgcctttttaagctgattgataaggttggaaagcatacctccggggacttgataaatcaacgtattaacgtcgattccctttaccttgtcggtgaggatgccgtcgtctttgagcctcttttcgaccgtcttgaaatgctttacgatcggcagcagcttttcaatctgaattcccgtatcgtaacccgttcctttgagagtagccacaagcggctccgtcgcgggctgagaagtgccgttgccgagaggcgaaagcgccgtatcgacgatatccacgcccgccaaaatcgccatcagatagaccatgtcgcccgtgcccgtcgtattgtgggtgtgcagatgcagttttgtttcggggcggagttccgctttcagcgccttgacgagatcaaacgtatcgaagggcagaagcagattcgccatatctttaaggcagatgttatccgcgcccatgtcttcgagttgttttcccagtttgacgaaatattctttcgtatatacgggacccgtcgtatagcagatcgtcgcttcgcacacgccgccgtatttcttgatcgctttcatcgaggtttcaaggtttctcggatcgttgagcgcatcgaacacgcgcacgacgcctacgccgttctcaatcgacttttcgacgaatttctccacgagatcgtccgcatagtgacgataccccaagaggttttgccctcttaaaagcatctgaatcggagtctttttgagatgagatttcaaaattctcagtctttcccacggatcctcgttgaggaagcgaaggcaggaatcgaaagtcgccccgccccacgcttcgagggaataatatccgatgtcgtcgagctgttccagcacgggcagcatctcgtcgaggcgcattctggtcgccgcctgcgactgatgcgcatcgcgcaggatggtttccgtaatcaatacttttctattttcagtttttatatccataatcgtgtttacctcttttatttaacccgccgttttcccgcttttacgcaaagagcgacaacaggaagcccgcggcgatcgcagaacctatgacgcccgcaacgttaggtcccatcgcgtgcatcagcaaatggttgttcggatccgactctcgtcccacgtcctcggaaatccgcgccgccatcggcacagccgaaacgcctgcactgccgatgagaggattgatttttccgtgcgacagtttgcacataagtctgcccatcaacaagccgccgatcgtaccgcagataaaggccataagtcccaaagcgacgattttcaaagtgctccaagtgaggaacaccgctccgaacgctttgcagcccacggaaacgccgaggaagatcgtaatggtattcatcagcccgttctgagcctgcgaggaaaggcgctccgtcacgcaggattctttgagaaggttgccgagcatcagcatcccgagaagaggaatcgcggcgggaagcaagatccccactatcaacgtcaccgcaataggaaagactattttttccagcttgctcaccgtgcgcagctgtttcatcctgatcgctctttcctttttgggaacgagcgcccgcatcaaaggcttttggatgatggggatcagcgccatatacgagtaggcggcaatcgctatcgcggagagcagatcttcattggtgaatttcgccagcgtctgcgtcacgtaaattgccgtaggaccgtccgcgccgccgataatggcgatagaacaagctgccgcgaggtcaaagccgaagactaccgctaagatgagagcgaggaaaatgcccagctgcgccgcggcgccgataaacatactcttcggattggcgatcaagggaccgaaatcggtcatcgcgccgatgccgagaaaaatgagcggcggataaatgacgttctgaactccgtaaaacagataccaaagaagccccctcgattcgggaaggacgttttcgtaagtatgaggcaacgaagtcaccttctcccacaacccggtcgcttcgttgagaatccaggtaggttccgattcggaaggatatctgccccacaatacgtcgtacgcgcccggcagattgattaaaaacataccgaaagcgataggcaaaagcaaaagcggctcgaatttcttgacgatcgcaaggtacatcaggacgaacgaaacgagaagcatgacgtaattctgccatgtccccgccgcaagtcccgacgactcccacaatcctttcagcatctcgccgatattaacgagtaaattttgcgtcatggaatctctccttatccgtttttaaccgatgacgaaaagaacggtatcggattcgacgtttgctcctttggcaacgcagaaagaaacgacgccttcacagggagccgtgatgtcgttatccattttcatcgcctccaaaacgaggacgggctgatcttttttcacggcggcgccttccgccactaacagattcttgataagaccggggaaaggagaaacgactttctctccgaccgcgggagccgctttgggagccgcagcagccgctgggagcctcttgcggagcggaaacgccggcgggcgcctgggcgcctgcccctacttcttcaacgcctacttcatagtttttaccattgacagtgataataaaattacgcataatgatttctccttaaattctcttgattcttttcaccgtaaattcgcactttggattttctttcgcatagtacgccatgatcgcggcggtgatgaccgcaaccgtttcctcggataattcgtctgccgaagttttttcgcttatcgcgggctcttcgattttttccgccgctttttcctcttttttcttcgcgggcgcaccgtttatcttgcgcacggcaaaaccgatcagccaaagcaatccgacgagaaaggcgatgccgataaagacgacgatgaatccgagcaaagcgtcgagtgcggcttcgccgataccgatctttttatagccgacgggaagcgagccggaagcgtccaataaaaaattcaacatagtttatccctcgcctttacttcgcaagcatttgcagggaagcgatcaaatattgttttacaaattgcggttcgatgatggcgtcgatatagccgtcttttgccgcgttcacgggatcggagttctcgtccgcatatttcgccgcgagagccgccttatccgctttttcgtcgcccagctctatctgagcgccctgcacgctgtcaaacagcgcgatcttcgcgtccgcaaacgcgcaggtataatcgaaaccaaccgattttgccgcaaacagcgaatatccgagtccgatggccttcttatagaccacggcaatttttcccgtatctatcgtatccagcatatcgaggtactcggcggcttccttcatgacgcggctgttgttcgcgcacatcgtgggcgcgattccctttacgtcggcaaagacgacgaagggaagctgatagcagcaggcaagctcggcgaaatccttgatcttcgcaagtttttccgccgtgagttccacgccttgctctttgccgtcgaatacgaccgccgcaaccgcgattccgccgatgcggccgagaatcgtctttacttccggttcgtaaccggcgcccacttctacggaattttcaaaaatccccgccagattttccgctgtcgccgcttcgttgagctgaggcacagcttcgttgagttcggcgtctatcatcggcatttccaaaagttcgctgacggcggaaatgcgcgctttcacttcggcgatatccttcgcttcgaaggcgggaatccccgtcttgcccagggctttcgctccgcccacctcctctttgggaagattctttccggctttcgcggaaagcacgagcggactgttgattgccaagacgctcttcttctcgataaagaaagaaaaatcggcaatcgccgcaagcatcgccgcagacccgtaaacttcgccgtcaatcaccgcgtactgcggaacgacgcctttcagctgagtgcttctcattaaaagcttgcccaagccttccaaaaccgtgacgccttcgcccacctgaacgccgagcgtattcaggatgtaaatcacgggagtcgaattcttttcggcagcgtccagacacttgacgatcttatcgcaatttgccttggatactccgccggagagaactttgaaattctgcgcgacgagatagaacggatacccgtccaacgtagcgaatccggttactaccccttcgcccgcggcgtcctctccgtaaaactcgtttttggaaaagctgaacgcggaaagctcgacaaagctgttctcgtcgacaagcgcgtcgataagactacgaatctctttgcccgcctccgcgatcttcgcctttctttcttgcagcaattgaattttatccataatgtctcctccaagaa

SEQ ID NO: 4132 - DNA, 13153 bp, Unknown
  16S sequences of unknown bacteria
aaaaaaaaaaagccattatagaacagctttggctgacatattataacgacactctttttgctaaaggtcttataaccgaagagcaaagaaataaaatgagaataaaaatcaaaagtcgttcggcatcggtcgagcgataagataaaagacgcggactgtttattcagtaaccgctctttttgttttgccgtcttgattttttctttgctttatgttattataatatagataatgatacaacgaaacttttataggaataataatggaaatacacaacgtaagacagcagctgaaaacaaaaagcatttacgatattcccttgagagtgacattctacgcgcgagtttcctcggagtcggatgaacagctgaattcgctcggaaaccaaatcaatttctacgaggatctgataaagaaaaacaaagcatggacatttgtcgaagggtatatcgacgagggtctgtccggcatatcgacaaagcaccgcgaaaatttcaaccgaatgataagcgacgccgaagccgataagtttgacctcattatcacaaaagagatatcaagattcgcgagaaatactctcgactcaatccggtacacacgacagctcttgagctacggcgtaggagtgttcttccagaacgacaatatcaacaccttcgacgacgactccgagctgaggctttccataatgtcatcaatcgcgcaggatgagcttcgcaaactatcaagccgcgtaaagttcggacatcagcaagccattaaagaaaacgtagttctcgggaacagccgcattttcggatataaaaaggacaacaaaaagctcgtgatagacgaagagcaagcacccatgatacgagagctttacgaaatgtacgcaaccgacaattactcaatgaagcaaatcgaaaaaatcttttgggacaaaggctacaggaattataacggcaaaaagatagcgcacaccaccatgtccggcataatctcaaacccgaaatacaaaggctactacgtcggaaacaaagtcagagtcgtcgatatgtttacgaaaaagcagaagtttctcccgcccgaagaatgggtgatgttcaaagatgaaagcggagaaatcgttccggcaatagtctcggaagaactgtgggatcaggctaacgcgattctccaaaaaagaagcaacgacgttaagaaccgaaaaaatctctgcaaccacgccaatcttctgacgggaaagctcttctgcacctgctgcggcgtatcgtaccacagaagagcatcgacagacagacaaggcaacaaaaactccacatggacttgcgcaaataaactgaacaacggcactgattgctgcgactcattcacaatacacgaaagagaaatcatcccgataatattcgaggtgttccgcgataccagagattcgtcaaaggcaatgatggaagaatatgagcgtatgtatctcagcatgaacagcgacggcaacatcgaaaagcaaattgattccctgaactcttcaatcgagcttgcagccaaaaagaaaaataaactgcttgagcttgtcgcacttgacagcatcagtatagcggacttcaaaagcatgacggaacagtgcaacagcgatatcaaaaaagcggaacaggaactcgccgagcttcacgaaaaacaagagtctggcaaagagtttaaagagaatatggaaagaatacgccgcgtgttaaaagaagcggagaagaactgcgaaaacggagtgataacaaaggaattcgtagatacctttattgataagatatacgcaacaccgattgacgagagaacaatgaagctcgatataaaaatcttcacaggcgaaaagagtgaaaaatacctcgaaaagctcaaaaaacacgctcatcccgactacagctcgggtcacacgttcaagaagatgatcgagaaatacgaaaacgaaatctccgcaaagtaagtttgaattaaagtaaatcccttcgggggcaaagagagtttggcgtcttacatgaagtcgtcaggctctttttgcttttccgtattatgcgcagccgtacataattaagccgtgttatatttatacgtttattctgtgcattatttaatattatacactaatcaacacatacattatgactgtttacagcaatttttacactcgaatctgcgtagatatagacaaatcgcaacttttcatgtcgtattgttttcaaaatgtgttgacaaacagtagacattagtgtattattttcttgtctactttattattatataaagcagaaaatattttttggaggaatttatgttaaaatcaggaaagaaaatcttatctctgatactgtcggtttgtatgctcatttgcctaataccaaccgcagtattcgcggcagacagcggcagctacatgaaaatagcaatgctggactgcggacgaaagtactttaccgtcgactgggtgaaatcactcatctatgaagccaaagccgacggattcactcatgtaatgctcgctgtcggaaacgacggtatgcgattcctgctcgacgatatgtcgctgaccgtcggctcaaagacttattcaagcgaagcagtaaaggttgctgttatctccggaaacaactcatacaccactgcttcaacaggcgagtggacagagagcgaaatgaacgagattttctctgcggcagcttcctccggaattgagataatcccgcttctaaacactcccggacacatggacgcaattctcagcgccgcaacctctctcacgggaacaaattgcagctacaacggctcggtgagaaccatcgatgttacaaacaccaccgctgttgctttctcacaggcattcgtacagaagtacatcgactattttgccgcaaagggctgcacatacttcaacttcggtgctgacgaatacgcaaacgaccgctacacctccggctccatgggcttcggcagtttccagagcagcggaaagtacggttatttcataaaatacgtaaacgaaatcgccgctatggtcaaagccgcaggtcttactcctatcgcattcaacgacggtatcgagtttgcgaacaaaacaagcgcatctgtcggctcaactacatacacatttgacaaggacatcgttgtctgctactggtctggcggttggagcggatacacaccccgtactgccgctaacctcgcaagcgacggcttcaagataatcaacacgaccggcgacttctactacgtcctcggcaagagcgataactttgattcaggctacacctatgcttcaaactggagcaactacaaggtctgcggcactacgctttcatcttcgtcagtcctcggcggaatgttctgtatgtggagcgactatccgggtgccgaaacagaaacgcaggaagcaaagaaaatcagacttcccctccgcgctatgggtcttgcaatggacggctcatacacatataactttgacacttccgtagttcccggtggattcaatgcggacggcacgctgaacacagatcctccggcacagatacacaactatcagctgacatcctcccaagaacctacctgcacggaagaaggaaagaacacctacacctgcaccgactgcggagacacctacaccgaaaccacacccgcgctcggtcatgactacacggcagaagacgacggcggcgacactgtttacgcctgcaagagatgcggcgacagctacaccgagcttcttccgagaaagaatatttccctcaaaacaggtcagacctccgagacatacacacttgacggagaaaagacaatatccgttggcggcgactccggcatagctaaagccaacctcacctacagcgaaggcacaggcgcggaagtatcgtattctgcaagcgcgtcagcctctgtatccggatacacccagggcggctacaactgcgttatctcaaacatcatcgacggaaacacatccacatactactggtcagaagcaaaccagtccgtcggaatgtacgcacgcgtagacctcggagcagaagttcgttttgacgcggttcaggtttcagctcccgcacacggcgactactgcacaaacgcaaacgttcagctctcaagcgacggctacaactggactactataggcacattcacaagcagcagaagctcagccacaacaaatacctacaccgttcccacctcagtcgagagcttccgctacattcaggtggttataactactgcgcgcagctactggtggcagctttcagaaatcgcatggggcagcttaagcggctcaacattcactcgcgctgctgcatccggcactgtacagacaggcacactcaccactaccgagctttccttcaccggagtcggcgcgggcactacctcatacgttgttgacggagtaaaatatgtaatcgaggtcgaagagaatcacgtccactcatgggaaaagacctccgaaaccgctcccacctgcacagcagacggaactacgacatacacctgctcggtctgcggagatacatacacagaaaccactcccgcaacaggtcacagctataactcagttttaacagctcccacctgcactgacgagggatatacaactcacacctgctctacttgcggcgacacatacactgacagcaccgttcccgcactcggtcatgactatgttgaaaccatatcctccgcaacctgcacaacagacggagttgcaacctatacctgctcacactgcggcgacacatatacaaaggtaattcccgctacaggacacaagtataccgcgacagttgttgaacctacctgcacggaagacggcacgacaacatacacctgctcagtctgcggtgatacttacaccgaaaccactcccgcaacaggtcacagctacacttcagttgtaacagaacccacctgcacagaggaaggctataccacctacacctgcgaaaactgcggcgactcctacacgagcgatgttgtttccgcaacaggtcacagctatacttccgttgtaacagagcctacctgcacagaggacggctataccacatacacctgcgaaaactgcggcgactcctacacaagcaacgttgtttccgctacaggtcacagctacacttcagttgtaaccgagcctacctgcacagaggacggctataccacctacacctgcgaaagctgcggcgactcctacacgagcgatgttgttgaagctacaggtcacagctacacttcagttgtaacagagcctacctgcacagaggacggctataccacctacacctgcgaaaactgcggcgactcctacacgagcgatgttgttcccgctacaggtcacgactatgaatgcacggaagaggacggagatcttgtttacacctgcaagaactgcggcgacacttacagagagacttcaatgcctactgtaaacgttgagcttaacgttggtgagacatactccttctccacagacgacgcagacatcaccgaggacattgactcagccatcgcaactgttacggttcacacaaacgaaggcggctacaacgcggtttcttccctcacggacggcgaataccttatcataagcggcggcaaggttctcactgacgagtcctcaacgtactacagctcatgggacggcgcgggcactgtctacggactcacctgcacaagctattcttcaagcggcagctacaagggttatctctggaccataacagaggttgacggcggctatactgtaagaaacagcgacggtctctacctcacaataacctccggcacacgctcatcacacctcactctctccgaaaccgagcaggtcatcgacatatcggatctcggaagcgaattcgcactcagctacggcggaacatacctcgaccgctacagttcaacattcgcggcttcctatcccggaaacgtgaacgagaacgaaaagtgggagctttacaaatccgaacccgcaagctatgatatcactatcactgctgtttccggcggcaagacaagcacagtcatcggcggaacaaaatatgttgtaagcgttcacgagcatgactatgtttccgaagtcacatcagcagctacctgcaccgacgacggaacagtaacatacacctgcacaggatgcggagacagctacaccgaaaccatcaaagcatacggtcacgactatgaatgcacggaagagaaaggatactacctctacacctgcaagaactgcggcgacagctacaccgaagaaatatcctctacatcatacgaatatgtttcttccctcacctccggcggcaaatatatcatcacactttataacggcggcacatactacgctctgacacacaacggtacgtcgctcggagcaactgctgtcacgataaataacggcgaaatcacctccgaggtaacggatgatatgctttgggaatactcaagcaataagctcggattcagctatggctcaagaacctactacctcagcagatcctacggttattactcctcagtttcgctcagcacatacggctcaaacgtatcttattcctataaccgtctcgccctcggttcgtactatctccgttattcgaacggatacatctccacaagcagaaataattactccccctgctacatctacgccgaggttaactgataaaacaaacgccaaataaaaagatcctctgtatggcaaaaacaaatgtcatacggaggattttttgttatttcagtctttcggggacaacgtattcgtgatacatatcgcacagtccgcgagagcctatctttatcaccgttccgccgttcatctcgggttcccagtacgcgccgggtccggttttcagtgcgtatgtaaggcgtactccgcagtagtttatcgagaaattgttcacgtgttcatgtccgcagaaagcgtatttcgtgtgtccgcattccgtcagcttcccgagcacaccgtcgtcagccttcggacagcatatgtcttcccacttcacgccgatggagtccttgtagccttcattccatattccgctgccgtagctctcccacagtcccgctctgtattcgggattcttcacggcggcattgtacgcggtcttgtaggcgtaaatcggcatatgggtgaacagtatgctctcgccgcagcccttctctttcagctcccgcactctgtcctcgtaccactcgagctgtttttccgtgagatgcgcgaatgaccagtcgtcttctgtaaaggtcttatcgtgcgtgtccatcatgatgagcgcctcgactgcttttccgctctcctctatctcgatgacatagtttccgcttccgagattttcgtccccttcctcaaacaggcacagaggatgtccgtgaaatgcggcggcggctcggtgaagtccgttcatgtcggtctcgttatcgtggtttccccagacaaaagcatatggaatcccgaacttatcaagaaaatccgcgtagaactcatacaccggaatggaattttcaaacgtaaagtctcccgtgtgggtgatgaggtcgggcttcactctgcgcacaagctcttccgttgtagaacacattgttctgaagctgtcgttcttttcgtcaaggtctttctttgtgatatgtgtgtcggttacgttaagtatgacaagctccctgtcctttggcttttgtattgtcggcatagctctctccgatttcgtttttgttttattctaccacagctaacgtgataaaacaacgatattatacgaaaacctatcgtattttacgcagttttttgtatctctccgctttcggttgacatagtgtggacattttgatataattatctcggaaaaataatcatatgtgaggtaagttatggataaactcatagaactgcaaaaggattttgtaaacgagcgtctcggcacgttcattcactggaacagcgcggcggcacaattccacgattcaaaggacataatcgactgggaatacggtgtggaaaacggaggagacgcgagacaatacccgttcaacgaagccgactggaacccgcgtcacctcgactgtaagaagtgggctaagatagcgaagagcgcaggctgccgtttcggtattctcaccacaaagcatcacgaaggcttctgtctctgggacagcaaatacaccgagcactgcgtcagaaacgcgaccaacaagaccgatgttgtggcagaatttttgagtgcgttccgtgcggagggaatgaaggcgggactttacttctcaatcctcgaccttacctcaaagctcggacgttatgaattcaccgaggctcaccgcgagatggtgctcggtcagataacggagcttctcacaaactacggcgagataccgtaccttgtaattgacggatggaatgctccctggggcggtccttcatacaaaactcttccctttgaagaagttgacgcgcttgtcaaaaagctccagccgaactgccttctcatgaacatcggatgcaccgaaggaatcaagggaaccgacatcgtattctttgaaaacggcgcaggtcaggatgttgataacggatttgaaggtcccggcgcgctttgccagactctcactaccacatggttcaaccgcgacgagcacaaggatcagcctgtaaagagcgcggactgggcactcaagctgatgaaccgctgcttcggcatgaacgttacgtttatcatgaacctcagccccgatccggacggaatagtaggcgacaacctcgctgaaagattcgccgaaatcggcaagggagtaaagctgcccgctccgcttgaagagatacccgcaggttggcagaagagataatttaccccgacaaatcaaaatgactgcattcccgcttggtttaagcaaggtttgcagtcatttttgcattactttaagataagctcgaattcttcgtttctgtcgcaggtgagctttccatcctttatgtgaagctccgcaatgtgtacgacggtgggcgcgtgctggatattgctcggattttcgcctgccatcgtgtcgttgtagtggacgaaatacacaatatacgcgtgttctccgcagctgatgacgtccgcgtgtcttcctatcgcaccgtcaagaggtctgttgctcacgtcacagaggatattaacgccttcctgtcttgtgaaaacggtgagatcgtcagaggaataaatcgccagtcctctccactcgtctgcgataagccagtattttccgccgaactcgaacacgttaggtccttcctgcgctccgtcgaacgttgcttgaccgatatccttccagttgtataagtcatcgctgtccgcatagaaggtgtgcgctccgcttcgctcatccttgtaccacatacgccatgtaccgctcggaagcttgaacaggcacgggtctataatacgctttgagccgatttcgagctttccgatatgcttccagtggaacaagtcttcggagatgtagtggtgaatcgatgcgtttcctgcccagtgactgtgaattccgcggatgtaggtgacatacatatggtacaatgccgattcttcgtcccacacgatttcgggagcccagaaggtgttgtcgccgaattcaaattccaagtcaagcgcgccgcggtagtaccaatacgaaccgtcatcatatgcttcggctactccgatttttgaaccgtagcagtaggcaacgcttccctccgtggctgtgcttgctcttcgctgagtgtaaaacatatagaatttgccgttctgtacatttttaataaccataggatctgccggtccgttgtatatcgggtcgacaaataccggtgaggggcatttgctcattttgtctctcgctttctttagtgaagtttaatataatcaaaaataccgtgatttcgtctgttttttcactgcaccgacttgtcatataagccgatattaggaaaaagcaaaaccgtcacggtatttattatttgtcagagcttatttcttccggagaaccgatacagcttcggttatagtcttttcgtgagcgagcataccgtacttgtcaacctcggtcttgctcttttctccgtgtgtaaggcatcccgcaccgccgatacaaccgccgatacaagccataccttcgatgaagttagcgtcaaggaggttcttgctctttttaagcagagctacacggcaggcttcaataccgtcgcaggcgcaggcgttgagcttgaagtcttcaagaccctgttccttaagaccttcggcaaccgcatcggaaagaccgccggagcgagcgaagattcttccgtagtaggaagcgttgtcgagcacgtcctcttcaagtgtggtaatgtcgaggtcgcggctgtcaaagagtgcctgaagctcttcaaatgtaagaacaacgtcaacatacggctttacggaatcaagctgaacttcagcctttttagcagtgcagggaccgatgaagattatcttcgcgttttcttcggtttccttgatgtattttgagatagctcccataggtgagaggttatgcgatacaaaaggtacgagcgcagggaagttcttctttatgtaagcgacaaacgccgggcagcatgagcttgtgaggaatcccttttcggcaagctcctttgattcagcctgtgctaccatatcagctccgagagcagcttcaactacggtatggaatccgagctttttcatgccggtgataacctgaccgagctttgcgtatgtaaactggctggagatggaaggcgctacgatggcgtaaaccttgttctttccgtcgcggttcttgagaagctctatagcgtcaaggatgtacgacttgtccatgatagctccgaacgggcactgatatacgcacgcgccgcaggagatacacttgttgttgtcgatagccgcagccttgttctcgttcatggagatggctttgaccttgcaggcgttctggcagggacgcttacggcttactatggctgtgtaggggcataccttagcgcaggctccgcactcaacgcactttgtcttgtcgatgtgagcaacgtggttttcgtcaaaggaaatagctcccctcttacatacgtcctcacaacggtgggcaagacatccgcggcaggcgtttgtaacttcgtatccgccgacaggacattcgtcgcatgcgatttcgataacctcgataacattggggttagtcttgtctccgcccatagcgagctttactctttcgccgagaatagcgcgctctttataaacgcagcatctcatagtgggggtgtttcccggaactatgattttcggaatgtcgagcagattctcaaggagagtgtccgcccatgcctgacgagcaacctcgcgaagaactttgtatttcaggtgctgtactttagtatcaaattttctcatctatcattaacctcttacttagaaataaataactttaattcgcttacccattttcttgagacattcggaaagctcttcaacaagattcatcttgatattgaagtttatcggaagatcagggttctggtgcgcggggttcactgctctgccaacgaagaagttgatatccgtcgcctcttcaaacagcattcggcagataagcgacgcgccgtccctcttgtatccccattgctcgtagctttcgttgtctctcaggtaatcctttgcatattccacgacacggttgacggtgataacaccttcggtaacgagatcgacgccttcaatttcagcaatcggaggaatgtcgcttctctcgaagttcaggcttgttttaagctcttttccgaggtatttcgccgcaatagaagacgtggtaccgccgcagacgatgtgctttccttcctttgagaaaaacagtgacatcattctgtcgcagtcgtcgcggtttctcggaggaccgaagagcatattcatcggcactctcttgcgtatccggacaatgcaggctgtcgcgtcgtctcccggcttatcctcatagagcttattgcactcgtcaacaagaatggtcgaaagagtttttgcggtatatccgacatgagctatggactccatgaacgacgttatatcttccctcttccagccgaagttgtacgcaagtcctatgccggcgtggggacatccgtcgctcatcgcaatgaaaatatcgttttcgcacagctttatctgggatttgtatatcttcttgccgccgatattcatctcagtcatcggatagtcgtagtttttgcaatctcttatcaggattatatgcgggttatcgtactggataagctccgcgtaagaattgtcaatgagatggattatggtaaatgtcgaataagcaactcctcttacggagcaaacgggaagcgtagcggcgatagtctcaacgcagtcctcaagcgaaagcccctccgccatcatcgttgaaattatctttgacgtgagcgtggaaagaatgcttgccttcactccgcttccgagaccgtccgcaagcaccacaacggtagaattttcattctgctcgattatgtcaacatggtcgccgcagagctgttcaccgtaatgatttatgcttttatatccgatatcggcacacagatcattcatctgaaatcgactccttcagtttagtaagggcaatctttgtttccgccgcggtttcgccgagaagcgacgctatctcctgtacgatacgcatctgcttgtcaacgaccttatccgcgatctctactgtctgacggcttatgttttctttcttttctctttcgctttcctcgtcggtaacgtcacgcattatgcagataaggagacggtactctttatcgtaaatgacggtctgttcaacgtatttaccgtattcggcaaggtatattctctggtcgcgaacgtcacgtccggtattcagcacttcgaggaacaccttcgggtcaagaatacgcaccacaagatcgccgagtacatccgacgccgagcggatattcataatcttgcgcgccgcggtgtttatctgctgaacctcgagcttttcgttaagtacgataagaccgttcggtgtgttgtttacgatgctgtccgagaagctctcggctttatccttgaggtaaggcaggcacattgatatctcagccttgttctggaagatagcgacggctttctcacggcagggg

SEQ ID NO: 4133 - DNA, 28632 bp, Unknown
  16S sequences of unknown bacteria
aggaattatgggttcttgaactcacttcctgttgctcttagtttgacaattcaccggttggagggctggattttggtcaaccctttagaatgattacagttctgtagccgaatattacagttctgtagttgtcttatccggcgtacttctgctataataacactggaaaacccggcggatgcggggaattgagcgaatttcgcgaaaggcgcgtgaatccatatatggcactggggcaaaagaaaaagagaacgaaacggctgagcagcctggcgatttttttgctggcgttcgtgctgtttgtgacggtgttcggcgggctttgcctgtgggcagtggtcaagatcaacgagcagcgccgggtgggagcgggggattcctcgtctgcccccatctcgaccgatccggcggcaaccttcaccgaggaggacgcgcgcaatctgttcctggtgacggtggacaccgacgcccagggctttatcgtggtgcgcaccgacccggccaacacccggatccgcaccctggccatcccccgggaaaccaccgtggacgtgggcaccagccagacccggatgttcgagctctacgcctccggcggggcgacagccacccgggacgcggcggccaagctgctgggcatggaattccagaattacgcggtgctgacctattccaacacggagaagctgctgaaaaagctggacggcgggctgattttcacgctgccggaggatctcgattaccagaacccgagcaccggcgccaccctcaagctgacgggcggcagccgcaatctcaccccctcccaggtggtggacgtgatgcggtaccccaactggcacggcgggcgcaagcagcaggcggacatccaggcccagctgacggcggcgctcatcaaccaatacatgaaggcggaccgggacatggaggcggatttcaacagcctcatcgggttcctgcaaaccgacatcaaggtctcccatttcgtcaaggcgaaggcggggctgcagtatctggcggaacggaacacgggcgccatctgttcgagcgcctccttagaggggcaatatgtgggcagcggggacgccctgcgcttcgagccggcggacagcgccaaggccaacctgcgcgggaccttcggcacatcctgaaaaattcgccggaaagcgaagggccggcgggcaaaagtccggcatattccccatggaatccagcgccttcccgtggtatagtgaagggaagacacatcgatttgggggtactccaccgttgagaaagctgctggcggttctggccgcctgttttctgctgcttggtggcgcgggctgccagtttctctggcccaacgccccgacaagcagcgaggaaaccgacaagcacggcgcatatgccggcgaatataccggcaaatggtgctatcagcggctgaatacccggatgcaggcatgctacgccgccatttacgaggcggtggcggagggaatcgacgcagacgaaatggtgacggtggcggacagcaagtcgagcaccccgccccaggagtaccacggggtgaaggtaacgctcccccgccagctgttcagccgcagcgaggcgcagaccctgtatgtggcctttacctgggacaatccccagtttttctttatcagcaacacctacggcctgacggggcggaacgcggacagctacgattccatcagcctggtgttcaccatgaacgcccaggagagggccgccgcccagcggcagctggatcgggcgctgaacgacattctggcggacatccgaccgggcacttacgagtacggcaaagagctgaccatccacgacgcggtggccgcccgatgccgctacgatgaggcggcggcggccgcggcggatccggcggcccagtttcccaacgccttcagcgcctatggcgcgctggtggagggccgggcggtatgcgaggggtattcccgcgccatgcagcttctgcttcacaaggcgggaatcgagtgcaccctggtcagcggggcggggaaaaagaccggtgtggcccacatgtggaacctggtgaccatcgacgggaggaactaccacgtggacgcgacatgggacgacagcgacgacgtgctgcggcacaactacttcaacctgacgaccgaacaaatcgagatttcccaccggctggacaaggacaacatcggggtggacacctgcaccgccaccgaggccaatttcttcgtgcacggcaagacctatctgcatacatacaagcaggacgacatcgcggctgttatcgcccagcaggtgcgtctgggcaaggacgcggtagagatgcgcttcagcgacgacacctatggcaacgccgccgtattcttccggcagaccaaggtgctgacggccaaggtcaacgccctgctgaaggacgccgggctggccatgtgggaatacgaggtgcggggagagccggacgaaaaaatcctcagcttgtacaaaaagggcgcgtacccgaaggggtgatcccgggacgggcgggccggagcggcgccggcgacggcggccgcttttttacgggaaaaggggaaaaagttgcgcggaaggccttgacagggcgcccgacgatatgctattataattgacgctgtgatggggcggccgatgggagcgcatggttttcccggcttcgatttgcgggtgtagttcaatggtagaaccccagccttccaagctggtcgtgtgggttcgattcccatcacccgctccaacccgtggccgcacgggacctgcaggggaccgcaggagctctgcgcaccaatcaaataggcgcctgtagctcagctggatagagcatctgccttctaagcagagggccaggggttcgagtcccttcaggcgcgccagttatggtggatgtagcttagttggttaaagcgccagtttgtggcactggagaccgtgggttcgaatcccatcttccaccccacatgagaaggggacacacgggcaaccgcgtgtcccttccttcgtaaacagcggctcaatcgccgatacaccatattgggctgtagtctagtggtaggacagcagactttgactctgcccgtgctggttcgattccagccagcccagccaaaagaacaagctcccgccatcaggtgggagcttgttcttttactgtggttccgatgaaagcggacagaaacggccacattctgccaggacagggcgcggttgtttgcacaaagctttggcactccagagacgctgaaaaacaaatgcgaagggggatatccacatggctgccatcatcgagattaccgactgggctctgcctgagctggaggtctttgctcatttgacggaagcgcagctgcgcaaccggctggagccggaaaaggggctctttatcgcggagagccccaaggtgattacgtgcgctcttgacgcgggatacgagccggtttcatttttgatggaaaaaaagcatattcacggacaagccagtggtatcatcggccgctgcggtgatgttcccgtctttactgccgccagcgatttgctggccgaactgaccggttaccggctgacccgcggaatattatgcgccatgcgccgacctcccctgccctgtatcgaggatttatgcgcaggagcgcgccgggtagccatattagagaacattgtggatgctaccaacataggcgccatattccgctcggcggcggcactgcacatggacgcggtgttggtgaccccctcctgctgcgatccgttaaaccggcgggcggtacgggtcagcatgggtactgtttttcaagtaccatggacgcgcatcggcaacgatccctccgcatggccacagccgggtatcgcccgcctgcacaggctgggctttcaagttgccgccatggctttaaacgacaaggccatcagtatagaagacccgcggcttctggcagtggaaaagctggctatcgtactgggtacggagggagacggactggcgccccgcacaatagccgactgcgattacaccgtgtgcatccccatgtcccacggcgtcgattctttaaatgtggcggctgccagcgccgtcgctttctggcagcttagagcccggtgagctctaggtcgtcaaaagcccggcacacgatacgcgtggccgggcttttcttcttatacaacttcacctgtcggcaccgccgtgcatgaaataccagcaaaaggatgggcctgctaaaggaggcccatccttttgaaattcagtcgtcctgttccttttcgttttttaggattttgccggttttggcgtctatatcatagtcgtaggcatagccgccggctttgaattccacctcgtagaccggggcgccgtccttgtcgtccagatcgacggcaacatcccgcagaccatcggcggacacggcggcgtgggaaagagcgatctccttcgccttggcgctgccgatgagagcggcggtgccggcagcggagatccggtcgtcgtcccgctccttctggcgcttgagaatcttgccggttttggcgtcgatgtcgtaatcgtattcgtagccgccggctttgaattccacctcgtacaccatgacaccgttttccgtatccagctcgatggcatagccgatcaggctgccagcggtcacgccggcgttcttcagcgcgatctccttggccttggcctccccaatgaggggggccgtgacggcgcctggatcggcggacgtggtgccggaggcgggacgggtcgcggtcggctcatcgtcgtccctctccttttcgcttttcaggatgtctccggttttggcgttcacgtcgacatcgtattcatagccgccggcttcgaattccacctcgtacaccatgacgcccttttcgcagctcagttccacctcgagcttggcggcgtcagccgcggtcacgccggcgtggcgcagtgcggcgtccctcgccttgtccgcgccgatataggccttatcgctggctgtcccgacggattccaccttgtccagggcgccgcttccggcgctggccaggagattcagctcattgatggtcagtttggccaggtcctccggggtatacagcgggtttttatccgcaatctcccggatgagctgggctttgcccagggaaatgccataggtatccgccagcttttgcagggtgccatcggcggagacggtttggctgagcaccgcgccggtgaaggcgtcggtttgcagcagggaattgatttcctcggtcagccgggtctgcagggccgcgcccttggcggggtcgccgttgtccacgctgacgagaatggagttggccagctcgctgagatagccattgcgcagcatggagcccaccagggcgttgacggtcacgtccaggctgctgccggaaaaattcatgtcgcctaagacaatgcggccgtcctcgttgagggcgttcacccgcagcacccgatccttctgattgacctggatttcgacactgggattgacgtccagggagacggtggaggcgacagcgcggttgacgctgtacagccggacgccggccgcgccgcccagcaggagaaccagtgcggcggctatccccattccccgccggatccacggactgcgtttcttttgttcggtcatgacgatcaccttatctttcgtatcctcacaggacgagaggacagaatcgagaacatccggagcggcgtggctataggcccgccggagtttcccttccagctctttgttccgcattttgtcgctctcctttcagtaacgcgtgtttcaactttttcagcgcccggctgtacttggacagcacggtgggcagcggcgcccccagcatctgggcgatttcccggtgcttgaacccggacacggcgtggagggtcacgatttgccgctcctcatcggacagcaggcgcatgcaggccgaaaggacgagtttgtcctccggctcgacctcctcccgctcctccagcacccgttcccactcctccggcgggagatccgccgttttccggctttcccgcagcttgcgcaggcagaggttgcgcacgatggtcaggatccaagccatcggcttgccgctggaacggtacccggcggcggcggaatagatgctgacatagcagtcgtgcatcacgtcctgggcgtcgggggcgttttttagaatggaaagggcgaaaccatacacggaggcgcttgtcccgcggtacagctcctccagcgcggcggtgttcttttccgcgatgttcgccaaacaggcgtccagcgcggcggcgtccggtatatcactgcgcgccgcgtccggcgccgaggatagattccgcatggtctcacccctttcaatcagttaatccgcgagcgcggctttttattgcaagaaaaaaatatttagttatttgccaaaccaaactccaggttgagccagaagttactctgatttgaattctcaatgcacctgccgcagataatttgcataggtgggtgcggtagtctttggcaatcgccctgcgaacaggcaatttccataggggcggattctatatccgcccgttccaacgcaatcgtataaaattgcaaaacgagctgaaaagggatatcccttttcggctcgttttatattcatcgtagtcagttcatgctcgcgactgtaaaacatatcataactttctcatgagaaactctcttatgagtccattatacactagtatggtctgtttatcaatctttcttcgatacttggggttgaacactcgtcattataccaggaaaggtgatgctcttccttaagcccctaatcccaccgcttagcggacgttttttgtagagcccttcgcttcgcgatggaccttacttactaaagtaacaaataaagcggggagtcctgtgactccccgcttttaaatgccggcggtagtatcctccgcaccgtttgttgatcgggttcttactgccgaaagcggcagaatatgcctgcatttagggctcttgttggtcggtaggttcaggggtatttttgcgttttttgacaatgaaaaccgccccggtgccgatagcgccgccgcaaagcagaatcagtaacgtaataatccacggtttcatgcctttttcgggcgccacatcggccggcacagaatttgccgaggtatccgagtatcccgccgtactgcctgcggctatcgttcccgaagaatccggcgtaccggcactgccggaagaaaccgccgtgctgcctgtcggcacagaggagctgcctgcggcggcaggggaactgcctacggggggttgggttttgccgggcatggtcgtaccggctcctgtggtggatgggccgggcttcgcagtcgtggcggtctctctggctttgcggatacgttcgttgagcgccttcacaaaatcctcttcagttttcatggtgacggtctgcgactctttattgcccttaaacgaatagccggaaccgataatcatacttttatcgccgatgaaccgcacggtaccataggggaactcaccgaagatattgtttgaaatggtaagtctctcaacgggctcgccggcggaatgccgccataatgccacgcccgcaccttgtgttgcttccattcccggacgattggcgattatattcccggtaatggtaatatcctgcgggacgtagtaattttcgacaagccccagcgagtaaatcataataccggcggcattggcaaatttttctttttcctgcccgttattaaggatcatgttgttgcgaacgatgacatttttctggttggttaaggaaatcccctcattcccgctgtttttgatcaaattcccctcaatcagtacattgctcgcgcaggtttcaagtccgctagcggaaatgttggagctgcgtgcgccgtcgatgtaattgtcgatgtattggatatccgaaccgtattgattggtatagatcgagctttcgccgttgttaatgaaggtacagcgggcaatttttccaccctgcggcataaaatagcagcccgaccagttattgtttctgaaaatgctgtcttccaccgttatgttgatggcaggagtgcccatcgttctgtctacccaaagggcgggggaggaaatcttggatggtttggtcagcccgttgtcttcaaatatgcagtccttgaccaaaacattcttgcagccgccgagccctaaagtgatgcccggattctccttgaacgtgcagttgacaatggtaacattctgcgcttttgtcagccccagaagcgacccggttcgtccggatgctctctttcctgtgaaggtgatgtcccgcagggtgatgttttcgtccccatagttgttcaacccaacgggcgggtcagagcttttcatcatattggcgccggtggaaagcagggaattcacttcgagtatggttttatctccgtcgcctttaagcgtgatattcgatttcagcgtaacggtcgtcaccatgcgataggttcctgcggggatatacaccgtcccaccttcggggcaggcgttgatggcgttttgtatcgcaacggagccactgcccttgtagtcattgacattgcaaaccttaccttccgcagccgataccgggataaccggacctgcattgcctgctatagccaatatccctccgcaaacaacagcgcagagcgctcttcccaacaattttttcatacaaaaaatcctttccacttacagataaaccccctgcgtcctcaccgtttcatacatggcacggatgttttcgagaggtgtgcggggagaaaggttattggcatcccgcaggataaaccgatggcttacatccttaacggaagaaaggatacgcccggtttccctgaccacgtcttccttgctgccggtcagcagcaaactggtactgggacctccctgaatgcagacatccggtcccagttcgagcagaacttttcggtgatcaaggggatatcccgtatcaaacgtcgtgatgttcaaatgttctttaagaaaacggaagtgacgggaggcgtccccgcataaatggatgccgttgcgtgcgtcgtcggtgctcagagcgtctatcagctgtttatgatagggatagatccattcccggtacatatccgcagaaagaagagccacactgtcatcggcgaaaaagaaggagggctgtatctcatcttgccgcaaataccgccgccacgctttcagccgttcaatcgtcgccgccgtaatatacgcaagaagctgatgggcataatcgggatcttcatacatatccacgcagaaatcatcgacaccccgcaaattacacgctaaggtaaacggaccgtctgtacacatgatgttcggagatgccggcgccagaggggcgcctttataggtaaatcccttttgccttttttcattaaatagttccgtatactcccgaacggttcccataattcccgaaaacggatccggcatacccttttcgaacagcatatgcttatgttgatcatccaatatagccggacaaaccgggcaattatcttctttgtacacgatcggacagccaaaccaggcgctttcgtaattgttttgaaaatccacatagatctcccaaccgttttccgggatgcccatttcatgatcggcaaacacatgatgccgcacaaaatcccgaaactccagctgaatccgaaacatggtctcgggatcttcaaagtattgctgaaacgtgatgccttgggggttcaggcgtgaatccaataacatatagcgagggttgatgccgatgaccatcgggatgcgataaggtttgccggcataataggtgtcccatacctgtttcacctcttgattatgctttttaaaatcgggttccatgtggttgtcctcctccgtattccgcgttcaccggatcatcgcccgtaaccacgaccaggttagccggctccagattcacgccggctcctttgcaaggctttcccgaaaaggcaggcgcagggagcccgccatgatgcctatgctgaaattcatcctcgtacttcacctgttattcttttgctgtaaggcggagaatccggcattgttttgcggggatctccaacgaaaaacccgtatcctgtatcctggcaggttcttcgctcccgcttgctggatcatagacgaaaacggtctgtcccggctcgggcaaaacggtgaccgtatgctgctgtccgtcgcggcaatgcagcaaacaaacatcctcgctctcccggcggcaacgccgtacccaaaggaagggggcttcttctttgatttttaaaacgggcaggcaaagggcagacgccgctttcacagcatcttccggtgcagcaacgcatacccggtctgcatactgttccgccagaaggcggatctcctgtgaaagggtctctccttcccgtatacaaagcatgcggccgcctgcctgcgccagccgctgcagggcggcaagggtttccggcagaaaatcgccggtatcaaaaagcacaagcaaatcaaaatcttcgtatgatgcctgtatccgaccgtttatcactcgacaggtttgcagtcctctgtcgtcgatcaggtcaaaatccaagcggctatccagcagcctggtcatcaccgcatccatatactgctccagccgctgcatggcatacggctgcttgggcgaatatgattccggctccatcgaccagtatttttggttcacagggcgataccgttcccatgcgccttccatgggcaaaaggaacagcaccggcgcctgatgataaccatccattatgcttcccacgcggccaatggtttcataagcctcgcaaaacttggcagacgggtactcaccgggtgaaaaatacgaggcgatcacattgatgcccaggatcatctgatacaggcaggcatggagcatatcggaagtgtcatgcggagtatgccagtaggaagattcaaagcaggcgctggattcgctcatgacgcggcggtaccccatcagatcggcggcggaggctgccgtcttttccggcaatatacccgtgggattggtgcagtacagccgatccacaccgggaagtgtcatacgcctctgaagcccgaacagatccccgttcagcccgatctgcatcgataaggtttcttctccgtacaggtgtcctgtcagacaaatatcataacgggtacaccagtccgctatctgaccgaaataggattcctccagccgtgcagataccagcctccagaaatcgcggcgtacttgtcctcccgaatcggtgtcaaaaaacaagcttgccaggcggggacgcaggggatagccgcagccgttcaaaaaatcggcttccagcccttccgtccacggaacaacgggatccggctcgttgaatatcatgctgcatccgtaaacgggcagtcctggttcgtcgctgaaaaaagcttcgatatggcgaaaagcctccgcactcagattctgccggtagctttcatgggtacactggataaatgtccgcacagcttgcggattcagcacatcgatatacggtactcccgcgccggttatccattggcacggtttatgtataatcgccgctatccgatagtttccctccggcagtgtccagcacaggcggccgttctgcggcgaaagcagccgcatctcggactctgtcagagtaccgtcctgcgccatggggatagccgctgccagcagcgtatccccctccggcagcagcatttcacccgttcctccggttgtttccgcgcttttacaggccagacagcttaccgcataggatggattggtttccacgacccgccgtcccgctgcaccgcttggaaatcccggttcatcatagatccagatgcgttttcctttccgagagcaaaggcggataaaggcatctaaggttttccactcctccggctgccgcagataggtgtcatagcccgcatgatcgtttggatcgttccagggctctttgacattgacaacaaaaccgtctcccgggtttgcatcgataaaggcttccatttttttctcatcacgagggaaatagtgatggataatctgtaagggtttccatccgagcgtttgctgcgacatcctgagctcctccaagaatacaattgttattcccccgctgcattcctgtttggtaccatttcagcgggggaacaacagcacaggaccagcagacgaatccaatacccgatttatttttcgtaggcgatggctattttttcatcgattttcggcgctatttcggcggcgatcgtcgaccagggttcgcctaaagacggacgcgcaaacagatcgccgtaatattcgcctgtttcaaacgggatataggagatcggcacgccgactttgtctttggacccgcaatatttttcaaacatctcctgatgcttttcgttccagccgtaggcttctttcatttccgccaaggtgcgttcctttttggaagtatccataaaatcaaaacgcttggtggcaataaacgcgcaggcgccggcaacgttctgcgccgtcgaggggatcatatagccgtcggactgctgctgtacataatattgatcggcgttcggatctttcgggaacggaacaaacatggctgctccacttctcatcatatccggccagagcgtacggtaccacacgccgccggaaatcatggcaactttaccctgtttaaacatttctctgccgtcattgttggtatacagcactttatccacgacgtttaaatcggtagcaaatttaacggcgcgtgcgatttcttcactcatgatgttgttggtcgccgttccgtcgccgttaaacgaaatgatatgttttccgcaggaatacaggaaagcgtcgacctcgtccacgcacatgccgtaaagcgagctttttccgtcgctcccgggagccgttgtcagttttatcgccatatcgcggagaacgttccagtcccaggttcccgccttgacatagctctccggcgtgtccagtccatactcttcgaaaatttcggtgttataccacaaacacatgttgcgctgtacgccggggatggcacagtaatgctttccctctttatcctgtaacaaattattgatatccttgacatccgcccaaagcggctggttaaaatcgatatactcatccaggtttttaagatacccctgcgttgccagtgccggcttgagatagttccagaacacatcgacacgctcttccgacataaccatggtcataaaccgggtgaaaatttctttatccgaaaccaaaatggattccacttcaccgccataatgctctttatatgttgtggctttttcttccgactgagtcagcagaacgatctttttgtccggcatgtcaattttgggcaaagcactgtagtcgacctttccggcaccttgttgggaagcaccgctggactgggaacttccgcaaccggtgaccgcgcacatagctgtggcaatggtgatggcgcaagcaatggaaaacagacgttttttcagcattactgcctcaacctttccttatcgattttatagcgaatagcggaacaggcccttgccggcaggaaggccggtcacactgtatcctgtctttctgcgggcaaggggtctcttcctaacatcaaacctttagtaaagtttaccgtgcctgggttgttgcctttatccgtgtttccggctttttcgggtcatggccaaaatagcgccggaaacaagcgacacgatgacgatgggcagaaccgtaccgcttccggtggtgggagaggcatcgcccttggtggtggtagtggtcgcattcggtttcgtggggatggtggtggtagaaccggttggcaccgtttcgcccgtcagttccttataataggcatccacatcctctttcaggccgaaaacgatattgtccacatagaatttaccgtccggaacgagaagctgaggtccaaaagcgtaaatgccgaatttgtgattgttgatatcttctgccgtaaacgtcatggaataccatgtccagtccttcgtgccgtcttcaatgtagacgttacccgccgccggctgctgtgcccaaagcatccattcgcgtccgttatcggcataaccgtccgtcttgatcatggcaccgaacgtataggtttttcccggcaccactttcggcagcatttccagtccccagtgctgtttcgccgcgggatcaaacagcaacgaatactggcctttataactttccgtgctcacccgatcaaaagaagtcagcggcagcttggtttcgtcttccatatcaaaagccataaaggaagattcgtcatccgggtccgtaggttcgggctctgtcgccgctgcatctgttgccgtcataaacgctgccacatccgcctccagtccgagggcgatgtcatcgatatagataagaccttcgggtgtgcccgaaccaaacgagaagaaaccgaatttgtggttggcgatatcctgtgccgtaaaggtcatggtgtaccatgtccagtcgttgctgccatcggcaaattccttgttgccggcgccggcctgctgagcccagaactgccatgccgcaccgttgtttttaaaatcgaccgtcttgatctttgccgcaaaggtgtatttcatgccggctttcagcgccggactgggtacgatctgcaagccccagttatcagcggcgttggggtcaaatttgagagcttttttgccgctgtacgactcggtgtcgttcagcgcaaaagcagcgccgcaggagggtttgacgtcatcctcaaagtcgtactttatcatatcatacgtatatttgccggcagcagcctcgtccgttgccgccataaacgctgccacgtctgctttcaggccaaaggctatatcatcgatatagataaggccttcgggtgtgcccgagccaaatgagaagatgccgaatttatggttggcgatgtcctgcgccgtaaaggtcatggtataccattcccagtcgttggtgccatcggaaaattccttgttgccggcgccggcctgctgagcccagaactgccatgccgcaccgttgtttttaaaattgaccgtcttgatctttgccgcaaaggtatattcgtctccgacggtcagcgccggttcgatctgcaagccccagttgtcagcggcattcgggtcaaacttgagggcttttacgccgctgtacgacacggtgtcgttcagcgcaaaagcagcgccgcagatgggtttgacgtcatcctcaaagtcgtatttgagcatctcaaaacttgcggcgtttacaaaggccggtatacagaaaacagccatgctgagaactgccaaaagggtaacgaaacgttgaatccttttcaattgaattacctccactattttattttggggaatgccgaaacgcggaaataacaagctgtgttaggatacctttttctttttcaaaagccagaacgcaacgccgcctccggctgccagaacaacaacgatgccggcaatgatccatccccacggcgtggaaggcgtatttcccgcgggcgtggcatcttttgtggtggtgccggtcggtgccgtggcctgcgtgttggtttctgtcgctatggtggtgtcggtcgtttcgatcgcgctggattcggtagtcgccgtgtcggttgcggtaggctgaacgaccgctgtggtcggcgcttttgtggaaggggcttttgtggtgggggcttttgtggtgggagctgcggttgaattcgtcgagccgccttcttccttcagctcaatgttatcaaaatacagaataccggttggtttcgcaccggcttcaaaaggctgaatccctaaatccacaaggccgtcttgcagcgctttgaatttaatctcgtattttttccagtcggcagtgccgtcctcaagacgaagggaatcgctgagatacatctccacgggacgtttcacgcgggaatacaagttatagccgttattgtttttgaaatcttcggttttgatgtaaaccgagaagatataggtctttcccttttgcagtgtgggcgccagcaccatgccccataccaaatccttggcgtcgcatttcatggcatatttgccttcatagaccaccttggactggatttccgaagcgccgttgccgtcatgcataaagccatgataatccagcatcagttccgggacatcgagctgcctttcgggatcttcaaatccccaaaaaatcggcaatttggtcggttccgcggcggcacttgccgttggaacaataaaacagaaagctatgacaaaagtgaccagtaaaatccatgctttgcttaggctctttttcatacgaattcctccttttatttgcagacacccccggtgtccgatatacctgctgttagccgacaatgcccgatcgttccacaccttgtataaagaaacgctggatcaggatataaaatcccagcacgggcgcaatggcaagcagagaacccgcctgcatatgcgtaatgatcttcaaaggatccgtcgcagccgactcatacccgcccaacatacgcagtccgcttggcaggtttaccagttccatcattaccgtccggtgattgctgataaacatggagcccagaaaataatcgttccaataccagaccagggacagcacgaccaccaccagcatgccggaacggacattggggatcataatccgccagaaacagccgaaaaagctgcagccgtcgatctgggcggcatcctccagctcccttggcataccaccgaaaaactgccggaaaatgaagatgaaaagcccggatttgatcccctgaccgaaaatagccggcagaaagaacacccaagaggtattcagcaggttttttgtcagcggcgtgccggtaatcaatccgaccaacgagcctatgccgaaaaaatcaaaccctttgaaataaatgtataacggcgtgctgatcagctgaggcgggacgataaccgtaagcacgaccagagcgaacagcaagcctttgcatttaaattcaaaacgagcaaagccgtagccgaccaccgcacaaatcacgacctggatcagcgaactgacaacattgatctccagagacgttagaagcgcccgtttataatccatgacctcaattacttctttgaagttatccagcgtccagtgcttggatacccaaataacgctggggtcataaatgtccttcatgctgcggaaagagatactcagcatataaagcagtggataaagaagcacaaagcacagcccgcaaagaagaaaaaatcgaaaaaccttccagccgatactgccgacgccgctgagttttttgaccgctctcgcccgtgtttgttcatctgccgaacaaagagttcttgctgttaaagccattttttcacctccatcaaacctgataaaacacgcgtttgttaatgatgagatagaccatcacaataatgaccgcaaccatcagaaaataaatccatcccagtgtggaactgtaagccagacgcatgccgatctgctgctcattgatgtatttcatcaccacattgttatagtcggtaaacgaatcaatgatcgtgaagataagatttaagatgatcatgggtgaaatcatcggaaacgtaatcttccaaaacgtctcccatcccgttgcgccctcaatttttgccgcctcatacatcgaatccgctatggtttgcagtccggcaagaaaaataatgatctgtatgccggatttccatatcagggcaaacaagctgtccacaacaccagtcagcccattgacaaattcctgactcatgcccgatttaaacatcagctcatataaaaactcgctttgaaacagcgtggaagaactggaaccctgcataatggtctgggagagcacatccccgttcatgatggagaggatgacgccgtttgccacaatgatcgggataaaaaagatgccgcgaacaaatgttcttccaacaaatttttggttaagaatgatggcaacaaacaggctgaataggacgatgatgggtacctgatacagcatggctccgagagaactgaacaccgcgggaagaaattcggcatccgtggtgaaagccttgatgtaatttttccagccgataaagttcagggtatacccgccgttggggtttaaaacgatatcggaaaaagaatagcgcacagactggagaaacgggagcagaaagaagaaaataaacccaataacccaaatcgaaacaaacagaaaacctgccagactttttttggattcatacggcataacgtgttttttctgcctgatggttcttgctcgttgcatgcttattcgtcccctttctcctgcaaaatccgatatcccttctttggaatcgctatgtccgcaatgagcacatccttatcagtgcgattcacgtaggtgctccatccgttgctgtagcgggtacggacaacgccgggttgcagggtatcgtagcccccgatgacggcatcggctgtttgcgtataaaagtctttaagagctgtgtattgctcgattattttatctttccagagcccaaagccggctccgtacagatccgtacgatcggtatccttcaattcggcgggatccacacccagcagataataatggagcagtgaacccgactggatgctccataaaaacgagtccgtgtaagtgccggaaagattgatggcttttcctgcatacggtatgactccgtgcaagacgatctgtaaaaacggaacggattcatcgcaaacatcaaaaccgcttccggaatcaggcaggttcacagcacccgataacgccgggatcgcatagcccatcggattgtctccgagcagcggcaaagcctcctgcgcttttttcagtccgcgccttgttaactctaccgcatcggcacgcgaagaaccgtattttgaaaagtccgtatagctttgcgctcccagcgatccggcgctcagtccgatttgatacttctttccctgatcggccagccgtacaaaagcaccgttggcaagctgattgttcagcaaaaaacctgttccggaacgggaatccgggaaaaacgtgttgcgcttataaacgtgggttttaatggcggatttgctgatatcttttgcggcatccataaacgagaaaacaccggctccgttatcatgaaaattcaccgtttcgcccttcagaaaaacgcggctgtttgttttttgcaaggattctgccaacgccgaaaggcctttttctccgccgatcttgccgaccacgttcatttgggacgtgaccttgccgcgaagcgcgtcctcgctccatccgtcgtaataccagacagtggcatcgatcccgccggatttcaggacggcatccatttgggccgctttctcaaacgaggtgacgacctccgtggaatccatacggatacccagaatggaagcacgcttgcgaatggctcccagcgtctggatatacacaggaggaacctcgccggcaacgggtttcagcccgttttggcgtatcagatattcccgcatgatgccggcgagtccggcaatttcctgctgatcctcatccgcggggaaataacgcaccgagataacgcccgcatcgatgggacgctcatcatacatgatcacatcccggctgttccatccgctgccaaccgtcagcatttggctcaggcgaacactaaaatccgcataggcgcggttaaactgggattctccgcccgatgtggaggcatggatgccggcacgccccgcaccgtcctccacgaccgccagcagcccctgtttcttcgtctggataccgaagcaaggaagcgccgccgcctgctggttggtcgtccggctgtcctgcttcacaacgccgtccagaccgtaaagatcggagcgataggtaaatctacccttgccgttattaaagcgcagaagagaaccgctgccgtccggcaagataaaatatccgtctgtttcccagtcctgcgcgccgaaatacggcagaatgcgcagggaaaaaagacgctgctcgcccttttctatgatcttggaggtatccaccgaaaccttcaggctgtctcccacgaggataaagtccatcgggatcgtataggaatactccggaaattcaaaagttgcccgaaaaccgtcgggtaatttttccagtgtcagcccgtttttcttcacactgccgatcatggaattccgtgttttctgggtattggtctcgctgacgatatccgtgaccgtcagcacggaatacatttcgtttttggcattccctttggcggtggtatcctcctcgacacgcgtcggggtgctgaaccacatcatatgatcccgcatatcctccagcgcaatggccgccgtggttttgtccgcatgaagtgccaaaaatcccttttgtgccatcaattccattcctgccggcgatggcgagggggtataggtttcctcagccggaaacaacaccttcgacacgaccccgcctgtcttttcggcagaaaaggcggtgacacggggagaaaaatccacgcacagggtaaccgttaaagcaataacggccagtacgatcagtccggggatccaccttttactttttctcatttgttcaccgccctatttacgaatccataattcactgacgatcatggagataaaggaatagagttgctgaaacaacgccaccaggagcaacaggataaacagtatcacacagatccccaccaaggtcagaaaaatggaaaacagtgttctgcccccggaatattgatgaacgatccggatcgcctgaaaaagcagcatggcgctccagagcatgccgatccacacaaaccaattcaaaaagacctcttcattgaacgtcagcacgcgtgacagcaaaatgctgacaaagcggaagacgatatagggaatcatggcataggcacaaaaggtgcatatctcatcaaaacgcccttcgccggatgacagcgtgcagatagcccaattggaaatgcagaaaagaaaaaacagcccgatggtcatgctcagctcgatcaaaatattcaattcatccgcatgattggtattaaaacggaaaccgtacagctgtttgaccataatatcgacgataagccatgccgcaagggtgagagcgatcagtccccaatggcggtaacggcggtatttcaactcgttgaaggtttccaccggctttttcacaatcaacagaatattatgcagtgcctcggtcatttcggcatccccctttcctcgggcttttttgttcgtttgcggcggaacaccctttgcgataagcatttactggtaacgatcactaaaaacagcacaacgaggaccagtaccgaaataacaagggtggtgtgactacgcaaataggcattccgatacttttcaaacgctttcgactcgttagcccgatcatatcccaggcggaaatactccaccgccttttcatagttacccagtttcatcatcgcctgacccatgccgctgtatcccagttcaaagttgctgttcattttcagcacctcctgccagggagccagtgcctcttcgtataagccatggtgatacaggctcaccgcttccaggattttttgcccgtattccgtgggcaaaaagcaggtgatgctgcctttgctgtaatccagaacatacacgcggctatccagcgtatcgatcgccaccggcgtacggaatccgcccatttgatccgaaatgttgccgaaaaccaacaggcggttgccttcctgatcaaacgtatagatccggccgcgggtgttgtccagcgcatacaggatatccgactcattaacgcaaacatccacaaaagaggtgatataggtgctttgcttatatcccacaatatccttttctccgaaattttcggtgtacggatagatgttgttgcccaaataatttagcttgcgtacctgctcgcggttaccgcttgtaaaactggtgcaggtataaattagtccctcgtcatcgatatcgaagttggaaaattccacgggaacgtattgtgacatcttggaacgctggtcgttggaaagcagctgtttccacagcctgtcggcgatcagcttcacgcttgcctgcacccttgcgctgccaaagaaggatttgaatttgccgtccggctcaaagaccaaagcgccttgataaacgccttcggcaatgacaaacacggttccgtcggggtctgccacgacttttttgggtttaaaaaacttcgtggtatactcggcgctggtgggttttacaaaggtttgcagcagcttacccgtgccatccacctttaaaacacgggaattttccgtgtcggctatgtaaagatcgtgtttttcgtccacaaacagactttgcgctttgttcagcgtcagggtttctccccccgacccggtgaacttcccgatcacacggataagctgcaggttgctgtccaaaacaacgatgcggctgttgcccgagtccagcacatagatctcaccgtcacggatatacagatcctgcggctccagaaaatccggcttttcagcctcgatgcgcgtgactgtcatctgcggtgtatacgcaaccggtgccgccgcatcggttgcccattcggttacacagtagttgttatacggaacttctgccgctgtgccaaacccgcttatcgcataaaccgccagcaaaaggagacagccaattcccttacggcaaacacaaaaccgtttgagagtgtttttcatccgctttgtcactccttcattccagaattggccatggtttccatcacgccgctttgcgttatcaagaagatgagtatgggcggaagaatcataaacaccgagatggcagcgccgactcccattctggcgataccggcgctggatagctgcgccaagatcgtgggcaggctctttttggcttcggtgtagataaacgccgtgtccgaccggttccacatactgctgaacgaaaacatcagcatggtcatccaaaccgcccgattggacggcatgatcacgtgccagaagatggtggcttcctttgcgccgtcgatgcgcgccgattcgatgaccgaatccgggaatcccaacagattctgccgcatcaggtagagccccagcgggaacgccgccaccggtaagatcaacgccatatagctgttgatcagatgcatggaggacagcatgatatacagagggataaaggtcacttcgttggtaaacagcagcgacaaaacgaccatattaaaaaagaccttttgaccgggaaacttgtgttttgccaagggataagcggccatggaagcaaaaaccacctgtatagccgtacagaacacggtcaggaaaacactgttgaacagataccgggagaacggtacccacagatcggacgtgatattttttaactggataaagttttctaaagtcggacgccgcacaaaaaaacgcggcggaaaaataaacagttcatccaaaggcttcagcgactggaggatcgtatacaaaagcggaagcgccatgatcaagccgaacaagagcaggaagatgataatagctgccgtacctccggcagaacgactaacatgctttgctgatgtgcttctcacaatatcattcctccgctattcactcttgataattctggacacaaggtttctggtgatgatcatcgtcacaaacagtaccgtggcaatggcgcaggcatagcccatctccattcggattgtaccgttatccagaacgtgcatgacgatggtcgtagttgagttgttggtactggggaaccctgtcagctgcatcggcacggcgctgaccgagaaggaggcggcgatctgcatcacagcgccgaacatcagctgaggccgcatgctgggcagtgtcagataccataattcctgaaagcggtttcggatgccgtcaatggctcccgcttcataaatcgaacggtctaccgtttggaatccggcgataaaggataggaagcccgcccccagactcagccacagctgaatgatgatgatgacccccagattgtaccggtcatcgatcagccagttgatgggatcctgcaaaaccccgatcttcatgaacaggctgttgatcagaccgtaggaatcgccgctgaagatatagctccagatgaaaatggcaccgcccgtaatagacggggcgtataaaatcagcgtcagaaagatgcgcagatttttcggcacttcgttgacgagccatgccagtatcagacacaatatgtaactgacaggcccggtcagaaaggcaaaaaccagcgtatttttgacggcaattaaaaacacatcgtcatcaaacagcatgcgtatgtaattatccgcaccggcaaaccccgttacttcgatcatgttgaaattaaagaagctcagcccgatagctgccagcacgggtaaaaccgtaaacagcaaaaagaagatggcaaacggggcaaggaacaaataactgcttttgtttttaatgatcaacgatgcgatactgggtttgagtgggttttcacgggcttttgatggattgttttccataatgtaccaccattcacataaaaacatcgtatggatgagatgcacacagaaatttctcagtcaagaaaaaactctctgcgcttacgggaaatttcggtattgatgatgacattttgctccagtaaagcctcccggtaattttccgatttgaggaccacattgcggaaagcgttatcgatgcagcgggaggtataatacccgccggggacttcgggaatctccctgatccagcttcgctgctccttcagaatggatagttcctcctgcgaccaagaaagctgttccatggcggcaatattcgcgggattataccgggaagcggtgcccatcagggtttcgatctccacgccgtaccgagcctggctctcggcggatgcccaccatttcataaactcccaagccgcggtttttgtcgcttcgtcctgacggttgttgatcataatggttgccgtgcctgaagccccttcggttcggtcgatcttgccgtcttgcgtttgtgttccgggcagcagatgcatcgaccacatgcctttgatctcgggagccgccgcttccagcatgttatacataccgtaaccttggatgcccataggcatctcgccgctgcggaaccggttgtaaaaatcgtatgtcaaaggcagctcatatttctgataatactctgtccattgtttaaacgcgtccatgacgtttttgctgtccagaatagctttggaggcgttttcattgtaaaaagttccgccccgctgcagcaccagcgccgaaaacagatccttagcgcccatgccgccgtccaccgttgcctgcgaactcatggtggtatagggcagcccaacggtcatattactgcgctgcaaagtcggcagcatatcgtacagttctgtccaggtatccggcacctgcaagccgagctcatcaaaaatgtcatcccggataaacagaagatgataatccagcgtgatgggcaaaccgtaaaccttgttttgaaacgtatagggtgtcagaacggttgcttcatactgttttttcagctcatcaaagccctggaactgatcaagcggaaccagtgcatctctaaccgccagattgatcggctgccctctggccacattcatgacaacatccggcgccgttcccgcgataatggcctgcgcgatggatacctgcaccaattccaacgtcacgcccacatggctttgcggcgtgaaagaatcatcgatcatccgctggacgatctctgcctgctcacggctgccgccgtaccagaccttaatgacttggtccagcttctcgccgttgccgcctattgatgtataatcattaaaaaaggaaccgataaacgctttgaattgatacgcgatattctggaaaaatccggctttggtgttggggatcgtctgttccatcccggaaacggtgatataatccagatccaaaggctgttcctgcatcttcagcatcagcgcggataacgctgtcacgttggatttataattgtccaaacggtcggtgatggagtagggatctttcacaaaggagcgaagctgctcctccgtttcgcgcaaaatactggcacttcctcctttctgatctgtcaaagagacgatctgttctaccagcccatttaaaacgtccgcgatctcggtaaaggcgggcagtaattcgggaatttcttcgggcaaggaatagtcccgcaaagaatccggggacgttccggtgatgaccacgatctttcgatacagataattaaggatatacacgcattcctctaaagactggatcacctctccgttttcgtccgtaactacttccagcccgatcgtgtgccgcccttttttcaggaaaaaggcatacggctgatcggcttcgctgccgagttctttgtatttccaggattcatgatattgaaagcggagattttcagcctcagcaaacggcggtgcgccgtcgatcaacagccgtcttgaaacaaacagcccctgcatatccgcctgtcggtaacgcaaaccaatcttgtaattcccatcctgcggaacatccaccgtccagaaaatggtttgtccaggcagcttccatccatccccggagatcatattgagttttaaaaataccggatcggcaggcatggtcgcggcatcggtgcggtcggttccttgtttgatcgccgaatcggttttcacatccgctgtttccgcctgatacagctctaaaaagtccacggcagtatccgagtcggttttcgcctgttcgtaacggatggggggttcgtcgttaaaaacacgcagactttccagatacagcccttcatccgccgtttccagactgatcgtattgttgcccggtttcaggtaaaacagaaacaggtacgtttgcccgcggggatctttgatcgtgtgctcacgccatatggaaacttgtttctgccgcgggcgcttatcgtttccccgaatatccgttgtgatcggttcggcatccgcccaataccgatgaaacgtgatttcttctacattgttaaacggaacgctgccgtttatctttaaacaggtattcatatcccgcttggcgttttcggcggtatagtatccgaaagcaagcgcatacagcccctcgcgctccatggtgaccgtccattccgcttttcccgaaccggaaaagaggatcgccggagcttccccctccgggccgagaccgttcgatatcctttcggcagccccttccagacgggcatcctgagccgcatagcggcggctgatgatcggacgttccgcttgaggatactgcgccaaataatttttataattggaggactgttcgcttttttggagaatgttatgtaaagtcggtgtgtttgcagcgtctatcacgcctgccgctttggaagatgttttgccagcgcagacaccaggcagtaccaggtgaaccaaaagaatccccaccatgaatggaaccatcaagtttttgcttttaccttttttacactgccagaacataagccaaactcctcttaccgtatttacgatgatttcttaaggaccatcatatcaatcctttaagcagactccgtgtcatctctcaagcagccgttttcggtattcccccggcgggcagccgtaaaaattgcgaaaagcccggctgaatgcgtgtacggtcttaaatcctattttttcagccaccgccacgatctccacgccttcttccagcaactccacggctcgttcaaagcgccgccgtgtgtaatactgcttaatggtctcgcccatcacctgagagaaattcgccgacatataggaatagttgtatcctagtttgtcacccaatgtttgcaatttattgatttccgttaaatccgaatcgatataattaataatttcataaatgaatttcttggtggtatcgatatgcagagaggaaaaataccgctggctcttttcactctgaaaactgcgataggtatatatgatgatctgggacaaatgggagatcatcaattcctccgacatttttccccaattggccatttcattcagcgcaccgacaaaaccggcagagatgttgtttttgtccatggcgatcggataatcgaacgaatcaaaaaagcgttcgatctcttcataggaggaataccgcggatccgctttgttgaagctgaagctcacgcaaaaaaaccgcaacgggttatcccttgaggaacgcagggaatgggtatcattttttgagatcaaaaaaatcatgccggcgcttacgttatacggaatactgtttcggtaaaacacgccttctcccgataaaacataggtgatctcatagcccaggtgatcgtgtatgggcacctcataatctgccgagcatgccagatcgcacaattgcaaaagataatactgcccatacaaacggggattcataataaactgattgtccacatggaatctctttttagaatctgtcatgaccatattcctcccaatcacctgtgcgtattgttgtttgtaaaaacatgggagttgggataaataacgagcaatgctgacggaagtgacttgtttagttaaaagtctgaaaaatcatccgtttgtcattactttcattgtacctactgcccatatttttgtatttgccctcac

SEQ ID NO: 4134 - DNA, 1608 bp, Unknown
  16S sequences of unknown bacteria
aaggagcgcatggcttccgacgccgtaaataatcccaaaatctgcgccggaaagaggaggacggccaacgtcccaagtatcatcatgccagtgaccaaagcagttccgtagcggaaagcggcatgcagcctttcactgttgcccgcgctatagttaaaccgcatgacaggcaaacagccctggatcaaaccgtttactgtcatgacgatcagctgctgcaccttaaaatatgcgccgaagaaagcaatcgccgtatcggaatacgccaccagaaacagattaacgaaggttaccataaacgaactgagggcgttcataataaaagatggcaggccaaaggcaaaaatacggcggatcatctgcttttgcaaatgaaagcctttgatttttacctgcaccttctgctttttccccagcagcaggataaatgccaaaatcatggacagcaaatagcctgcaaccgtagccaccgcagcgccgcggattcccatagccgggaaaataccaataccaaaaatcaggatggggtcgaacacaaagttgaccaccacgcccgcgatctggaaccacatgggagcgaccatattcccggtggcctgtatcatcttctggatggcgatatgcaccatattgggaatttgcatgaacgaacacacgctcatataggcaatgctcaactgatagatttcttcattactggtaaacgcccgaaaatagggcttcataatcagtaatgccagaagattgagcaaagcaccaattccaaaggccagtaacaatccatgtgtgacggtggtatttgcctcatcctgctttctctccccaagataccctgcaatcagtacattcacaccgacaccgatccagacagacgccgcattcatcagtgttgtaatcgggaatgacagagaaactgctgtcaacgcattttcactcaaccgcgccacaaacgcgctgtctatcaggttataggaatattgcaggaacatggaaataagcggcggtatcgacatttgccagatgagctttccaacaggagcgaccgccattttattattggtctgcatactttccctcctctccacaaagtgtccggcgcaaaaacattgcgccggacagcaggacattaaatccgaacgatatagttttgtttgcgtgctgcgggttgaccggcttcctgggctggataacccaatgcaatcgctccgacgccgcgcaaggtttccggcaacttccactcccgcaggagggctttgcccttttcgcagtcaaagatttcccgctcccggtgtacccatacggttcccagcccaagggcatgggcggccagcatcatattttcaagaacgcagcttccgtcttccacaaaggtgcttgcactgccatctgccaaaaccaaaaccacgacaggcgcgccataataggggtctgcgttgctccccatcacttctgcgtttaactttgcgatctcctgtctatatttggggtctgtaattgcaataatggtgggggattgacgtccgccgccggtaggcgcgtaagtccccgcttccagtacagcgtccagagcctcagcgggtacaggttctgcttgataggtccttacgc

SEQ ID NO: 4135 - DNA, 26837 bp, Unknown
  16S sequences of unknown bacteria
tgcctttgaaaacattgattttactgactttcttatgttttcttattaggaggcgaggaagggcaaattcttttttgttccagggaagtttttgataaaattctaggttttcttcctttctttttatttaccgtccgggcgaaaaaacagcgggagatcaaacgatcccccgctgaactattttacgcatcggctgtcctttttaagcaagaagtttctggtttccatgcgaatggacaatttttacaaatccttattgggatttttcgtagaaaagaaggcttcggctatttttgcgaactttttttactgcccagaatacgggttgcattgagtactgccagaatggaaacaccgacatcggcaaacacggccatccacatggcagccaacccgcaggcacccaatatcagcaccacagctttgatgaacaacgcaaaaacaatattgaatttagcgatagaaagggtgcgtttggccagttttatcgcctgcggcagatcgctgagtttatcagataccagcactacgtccgccgcctcgatggctgcatcggttccaagtcccatcgccacgccaacgtctgccatcgccagaaccggcgcatcgttcatgccgtcaccgacgaaaacagtggccccgctttgcttgatctgttccaggtgggacactttatccgcaggcaaaagttcagcccatacctgatccgcaccgctttcctgccggattttttcagcggtacgagcattgtcaccggtgagaataacagttttttggactcccagcattttaagctgccgcagggattccttggcgtcggggcgcagtgtatcggctacggtcaaataaccgaggacaacaccgtttttcgccaggtaaatgttggcgtgcggcaaggaagacgtatcgatttcgtattttgccagcaggcgttctcctccgcacaggtactggtcttctccgatttggtaggcaacgcccatcccaggcagttcctgataagcgctgaccatggaggtatccaccggaccgtgatgtgccactacggcttgtgccataggatgtgcagaaaagctttcgcccacggcgctcagccgaagcagctcgtcggcagacagagaatcatccagtggggtaacaccggtgacggaaagttttccggtggtcagggtaccggttttatcaaagacggcattgcgggttttggccagggcctccagcgatttggagcctttgaccaatacaccgcggcggcttcccgcgccgatgcctgcaaagaaggacaggggaatcgaaataaccaatgcgcaggggcaggaggcgactagaaataccagtgcccggcccagccacatggagatggaacccatacccaaaagcggcggcaggaaggtcagaagaatggcagcaaggatgatacagggtgtataaattttggaaaatttagagatcagtttttccgtattgctctttttagcggaagattcctgcaccaattggatgatacgggaagcggcagaatccgaaaaagtattggtagtgcggcaatgcaaggcaccatcccggtttaccatgccggacaaaagctcgtcgccggggccaatctgacggggcaggctttcgccggtgagaactgctgtgtccaccatgctctcaccggattcgacgatggcatccagcggaacccgttcgccgggtttgattaaaatttgagatccggtgggaatggcagtagcttctgtttcggcatagcttccgttcttctgcagaagatttgcagtctcaggccggatttttgtcagggcggcaatgctttttttggagcgggcgacggccaatccctccagctgattgccaagacggaacagaatcgtaaccagtgcgccctcccaaaattcacccagggccatagccgcgacaacggcgatcagcagcagggcagtttcgttcagctgaaggcggacaatgctttttacgccggcccagaacagcgggaacccggctactacagcggctgccgccagcatgaaatgagaggcgagatccggaagcggcagaaaactcagaacagccagtaacacggctgcggcaatgaaaaaccaggcgctttttccggagtcatggtcgtggtcgtgcccgcaggcacagccgtcttcggtgcagctttctaaggagatatcatgatccaagccgcaggcgcagctttcatgatggggttcgtggctgtgcttgcagccgcatccgccctcgtgatgatgaagttcatgctcatgttcatggccgcagctgcatgcgctgtgatcgtggtcatgatctggatggatatgagaatctttgtgggagcagcaggtttcggaaacctgtttcgaatgttcctgtccacagcagtaggtgctttcgtgtttgtggtcagccattgtccttttctcctttcgtgtgccggatatgctccagccccattgaaatgatggcatctacatgatcgtcatccaatgcatagaaaatatttttgccgtcccggcgggtccgtaccagatggctggcccgcagcagccgcaactggtggctgaccgcagactggctggcgcccaacagctctgcaatatcataaacgcacatctctgtttcggacaaagcgcacataatgcggatacgtgtgctgtccgaaaaaaccttgaacagctctgccagctcaaacagatcatcctcgctgggaagatgggagcgggcaaagtccgctgtttttttatgatcgtgctcctctggaatcaggtcttttttttccatttaaaagctcctttccaattgggttacagttaacaaatgaacatatgaatgactattcattcgttttcttcaatatatcatgcttctattggaatgtcaatcaaaaagaaaattttttattggaagtttgatgatactttgctttttaaagcggattgtgctatattatgggtatctttgtgaaaaaggggaaaaatccctttatctgaaaatacaggaggcatcatcatgagtagaaagaaattctacattactacccccatttattacccgtcggacaaattgcacattggtcacacctattgcacggtggccactgatgcaatggcgcggtataagcgaatgcaggggtgcgacgtgatgttcctcaccggcaccgatgagcatggacagaagattcagcagaaagcacaggctgcaggcgttacgccgcagcagtatgtggacaatattgtagacggtatccaggatctatggaaactgatgaacatttccaacgatcggtttatccgcaccacggatgactaccatgtggagtcgatccaaaaaatcttccgcaagctgtacgatcagggcgatatttacaagggcacctacaaaggcaaatattgtacgccgtgcgagtcattctggacggaaagccagttggtagacggcaagtgccccgactgtggacgcgaggtcattgatgcggaggaagaagcttatttcttccgtctttccaaatacgctgaccggttggtggaatattacgaagcgcatccggattttctggagccgccttcccgactgaacgaaatggtcaacaactttatcaaaccagggttggaggatctttgtgtatcccgcactacatttgactggggcgtacaggtggactttgaccccaagcatgtggtgtatgtatggattgatgcgctgtcaaactatatcaccgcactgggctacggcaacgaaaaatatcacgattttgaacaatactggccggcggatgtccactttgtaggcaaggaaattgtccgtttccattcgattatctggccggctatgctgatggcgttggatctgcctttgccggggaaagtatatggccacggatggctgaaattcggcggggacaagatgagtaaatccaaaggcaatgtggtggacccggtggtgttggtaggccgctacggtgtggatgccctgcgctatttcctgctgcgggaattccccttcggctctgacggcaactttaccaacgaagcgctgatcagccgcatcaatgcggacctggccaatgatttgggcaatctgctgtcccgtaccgtggcgatggtgggcaagtattttggcggaactctgccggctgaccgggcggcggatcccattgacgacgagcttttgaccatggcaaaagagctgcgtggaaaatatgaaggtcagatggagaaatatgctttccagaacgctttgatcgaggtgttcagggtcatttcccgcgcgaataagtatattgatgaaacagccccctgggtgctggccaaagacgaagcaaacaagccccggttggcgacggtactttacaatttgctggaatgtctgcgcatttccacttctctgctgaacccctttatgccggataccgctgaaaaagcccgggttcagatcggcgcttcggcagaggacttcacttgggagaaagcagggcagttcggcattttgcccgctgaggtaagcgtgcagaaaggcgaagcgctgttcccgcgcattgatatggagaaggagctggccgcattggccgaggcgcaggctgcccctaaaaaggaagagattcctgcccagccacagaaagagcccattaccatcgacgatttcgatagggtagatatgaccgtctgtaagattttagcctgcgagaatgttcccaaaagtgaaaaacttttgaaattccagctggatgacggttccggcgagacccgccaaatcctctccggcattgcgaagtactatcagccggaacagctggtgggcaaaacggttgttgcctgtaccaacctgccgcctcgtaagatgatggggcagatgtccaacggcatgctgctgtctgcggaaaaggatggcgtattgaatctggttatgctggatgacaaggttcccgccggcgcaaagctttgctgatgaaatgaaacaagaccgggcagggagcaattcccgtctggtcttgtttgagataacaggaggttttttctttgtatcagaatattttcgattcccatgcccactataatggcaaggattttgaagaccgggacgaattgctgccccggttgttttcctccggcgtctgcggtatcattgacgtggcgtcatcgatgcgctccacccgccggacagtggagttgtccgcccggtatgacacggtttacagcgcgatcggcgtgcatcccaacgaagtgaaggacatgaccgatgaagattacgagacgctgcgggaactgtccaagctgccgaaggtcgtggcgattggtgaaatcggatttgatttttactgggatgccagtgaccgcgatacccagcgggaacattttgagcgacagctgattctggcccgggagctggatctgccggtgatcatccacagccgggatgcagcgcaggagacttatgacctgctggaaaaataccatccccgcggcgtggtgcattgttattcgggcagcgccgaaatggcgcaggagattttaaaattagggatgtatatcggcttcaccggcgttgtgacttttaaaaatgccaaaaaagcagcgaaagctgccgcagcggtgccaatggaccggctgctgattgaaactgattgtccgtacatggcgccggagccgactcggggtgtacgatgcgattcttccatgttggtgcacaccggaaaaaagctggccgaaataaaaggcgttgatttgcagggcctgttcaatcaaacgcgccaaaatgcctgcgaactcttcggcatttcactgtaacgaggcattgccatgaacggtgtgggaggtttggttgacaaaagctctttgaatgtgctatattgctagcagaaaataaagttgggagaggataagatgcataaactttcttgcagataaaaacagggtggcagttgaatgcggcggtgccgctgtgtttggcttgcctgttgcaggaaagagcgtgcgcttatcgtagaaacggggaatctccctgcgtttttagcaggagagggccgttcctttattttggcaggctgcaagaatctttcttgcagccttttgtattttgccataggggggaatgtgcatgagtttaatttcggttcatcatttgacttttggatacgaaggaagctacgataccatcttggaagatgtatccttttcgctggataccaactggaaaaccgggctcattggccgcaacggccggggcaagaccacttttttaaagcttttgatgggggaatactcttacgaagggtcgattacagccagtacggctttcgattatttcccttttcttccgccggatttgtcagccacaacgttggatgtggccaacgcagtctgtccggattgtgaatactggcagctggtgcgggaactatcactgctgcgggtagaggaggaagtattgtaccggtcttttgaaacgctcagtcatggggaacggacaaaagtccttttggccgcgctgtttctccacgaaaaccattttttgctgatcgacgagccgaccaaccatctggatgcggcgggccggcggctgttgggcaattatctggcgggcaaagagggctttattctggtttcgcacgaccgctcttttctggatcggtgtaccgatcacattttggcgattaaccgttcggatatccaggtgcaaagggggaatttttcatcctggtgggaaaataagcgccagcaggatcagctggaattggagcaaaaccagcggctaaaaggggaaattcgccggttggatcagtcggcccggcaaaaagcaaactggtcagatcaggtggaaaaggccaaaatcggtgcagcggataagggctatgtggggcataaagccgcgaaaatgatgaaacgggccaaagtggtagaagcccggtgggaaaaggcgatacaggagaaggaaaagcttttgcggaacatcgaaaaggtagatccgctggtactgcgccccttgcgctaccacgtggattcattggtccgtctggagaaggtaacggtcttttacggaggaaaaaaggcgttgggaccggtatccctttcggtggaaaggggggagcgggtggctttgcgaggcagaaacggctgtgggaaatccacgctgctgaagctaatccagcaggagccgctggattataccggcacgcagcagattcctgccggattgattctttcgactgtgccgcaggacccttcttttttgcagggggacctgcgcgaatttgtccggcgtgaagggctggatgaaagcttgtttaaggcggttttacggaagctggaattttcccgcgcccagtttgataaagcgatgcagcatttcagcgcaggtcagaagaaaaaagtactgctggcgaaaagcctgtgccaaagtgcgcatctatatctgtgggatgagccgctcaactatattgaccttttttcccgtatgcagatagaacagttgattttagactatgagccaacccttttgtttgtagagcatgacgaggcatttacccaaaaaattgcgacccggatcgtagaattgggataaaaacgtctgggctggctgattggcgatatcaggcttgtctgttccaagcgcctttcgaccatcttccataaacaattgcttgcgcagctctgtgctgtgaaggcaaaacccccgcaaagattttcttcgcgggggttttgtgcgagacgatgttgttttgagattattttggtcagccgtttatctgggcgccaccccattccacaacagtaaaaccggtgcggatgaagggctccaactgctgcggttccatttctatcggttcgtccagcggctgataagccataaagacccgcaatatgctgtccggcgccggcgagatatccagtctagccaaatcggtatatgcttcccgctggaagctgatgagattatatggatgatcctgcatcagcggcatccagtagacgatgaattcattgtattcccggggcgtcaagcccagaaaagccagtttttcctgtaaaaagtccttggtatcttctccttttaccacaaaacctttggatagatcatatgcgccgggacatgtgccctcccaaaacaggtaagagtattcccgaccgtcaaaccggtcgtataaagtgccgtcgggcatagccatgacctgccagccgttccggtaatcgggataggtagcggtcagttcgccgtcgtagtccagcttgacggccacttcggttttttcttccggatacagatagatgaccggtttccccatcggcactagtttatggacctgctggttattgatgatttcctgttggtgcagcagatcctcccgggttttatggctgccggaataagcggacgcgccgaaaattgcacccaacacgccaaaaatcaaaaggattggccaaattttcccccaaactttcacgctttacacctcccgatgaaaaacaaaaaaggaaccagctgttttgcgcagcagattcctttttgcatcattttttccgccgcttttctatgcagaaaaaccgtcccgttagcggcaaagaaaacaggtgtttgtgccgcctagtgagcggaagcaacaaagatcaaaatcagcacaccaaagaccagcagaatcggccaagctttttcccataaagtcatttgtcatacctcctgaatggtagtgaatccataattgattgcttaaattataacgcgtaacacgaaaaatgtccagattccaaaagaggaatgcggaaatattctacattatcactaaaaacaagcggaatttttggctataaagagaggaagccggatactgaaattttgtatccggcttcctgaaaaagagttctttgtttttttgactaatatgccgggactgccggcggtaccggcataaatgaatggaaaatggaaccggtttattttttgttgaacacgtatttgtccaaacgttccatcatctgctccaccgtcaggcgcgggcaggcaaagttgatccggacatgatgttcggcgtggaatgcacggccgtcgctgacaagaacaccgcaccaagccatatcatccagcatttcgtccatggtctttccagtgttttccagccattcagtgcaatccatcagcgcaacataagcgccttcattgactgtaaattttactccatggaaatgtctcttacaataatcctcacagtattgcatattgccgcggatataagcgcacagctcgtcaacccaatcggcgccgccttcatatccgccgatcagcgcataggtggacataatgttgtggctgttgtagtgcgacaggctttccgttttcaaaactttttcgcgcaaatcgtcgcggtaaatgatgtggtaggaaccaaccagaccagccaggttaaaggttttggacggggcatagaatgcgcaggtaatgcgtttcgccaaatcagatacagactgggtgggaatgtgctttttgccttctccgatcataaagtccgcccagatctcgtccgagataacagtaatgccatatttcgccatcaaatcaatataatcgctgatttcttctttggtccaaacgcggccggtggggttgtgcgggttgcagaagattgccacacggatacctttttcctggatttttttctccatatccgcaaaatccatgcggtaaacaccgttttcgtcctgtaccagaggagaggaaacgatgtccatatcatttgttttgagtacgccggtaaatccgacataggtgggagaatgaaccaggatcgggtcaccgggcttcgtcaaggtgtgcagcacagcagctacgccgccgagtacgccgttttcatagccgatatgttcttttttcaggccagtcacgccgaaacgctccttctgccatttgaaaatcgcattgaaatagcgatccggatcgccgtaataaccgaacagggggtggttcaaacgttcctgcattgcctctacaaccgatggggcagtggcaaaatccatatccgcaacccacatgggcagaggggtaaaattgggatcggttttgcggggcgccatgggattgacatcccatttgatggcgttatgaccagcgcgttcccaaactttgtcgaaattatactttcccatttgtattgacacaacctttctaagaataaaaatacttttttgaataaaccagattaaattttatcagattttatatctgttgtaaaggaaaggttgttcgaattgacaaaaacatgaattaaaccaatttgtattagtacagttttcctaaaaaaacaaaaaattatcgatgattggtcgaaaaaatatccttggtcgggaattgttcaaactatctaaaccaatgggctttccaagaggaagaatcggcctttttcctgatttttgaagcggcacttgacaaggaggccgtctgtttgatatactcagcgcaaagttgatagaggcgcagtgataagagtacccggcggagaagacgttccgcgatgtcggggaaagggttaactgccgaagcaggcattccaggtatgggtgtctgttgggctcaatgtgaaaatcattgagactcctgcttccggaataccggcggcagaggcgctatcgaatgctcctttccggatccgaaaggctgtatcgatgcggtacagccttttttgatggctgtaccgtcaaaaacgcccgtcaactcaggttgattgggcgtttttgtgtctcctatcatccatgaaaggagtttttgtaatggaatctgtatcggttggactttggtcggtactgccgccgctggttgcgattgtgctggctctgttgaccaaagaagtgatcttttcgctggcctgcggcattttttccggcgcggttatttatgcagtggcggcgaatctcggcgttgcgggcgtgttttccagcgtgtctgatctgatgattgaaaaaatgggcggaaatgcggctttgctgttgtttgttgttctgctgggagccttggttgcggtgattaccaaagccggcggttccgcagcatacggcagctgggctgccggcaaactgcgttctggcaccagcgcgcagcttgctaccggttttttgggctgcctgatttttattgacgactattttaactgctttactgttggcacggtgatgcgcccggtcacagataagcataaagtgtcccgggaaaaactggcatatctcatcgatgccactgcagctcccgtctgtatcatcgccccgatttcctcatgggcagcgtcggtcatttcctactaccccaccgacggtacaatgaccggcatgcaggcgtttttgcgagcaatccccatgaatttgtatgcgattttgagcattgtgatggtattttggctgtgcattcggaaaaagggggactttggccccatggcggcggcacagcgccgggcagaagaacagggcttgcagaatttgatggaaaggggagagcagccttcttccaaaggccgggtattggatctggtaattccgattgcagcgctgattgtgttttcgattttttccatgctgtattatggcggctactggaacggcgaaggtttgagcctgtttgacgcattcggcgcgacggatgccggtactgccctggcgatggcgagccttctttccctgatcgtggcgtttttgctgtttgttccccgccggcttttgagtttccgggaatttttccagggcatcgtcagcggcattcaaacgatggtacccgcttgtgtgattctgactttagcctggacgatcagcggcgtttgccgggatttgctcgctaccggagattatgtggcgggagttgtggcggcgtccaatatgccggtgatgctgatcccggccattatgttcggcgtgtctgccatgctttctttcgccaccggcacctcttgggggactttcggcattctgattcccatcatcgtttccgtctgcgagacagcggctccggaattgaccgtcactgcgctgtcggcgattttggccggttcggtattcggcgaccattgctcgccgatttcggataccaccatcatgtcctccaccggcgcaggatgcgcccacattgaccatgtatccacccagctgccctattcgttgaccgttgcatcggtctgtgtggtgggctatctggttgccgggttctcggcgggtttgggatttggcacaagtctgctgattaccgacgtgatttccctgcttttgctggccgttctgctgttggctctgccgaaaatctggagtggtgagaaaaaagcagttcaaaaaacgcccgcgcttgcggcgcaaaaataaaacagcaccccagtcggtttctccgtggtttgggccattggcaatgcggttgtctgctgggcaacaaaatggtgaaaccggaaaaaagctgccctgccttgtgtcggagcagcttttgctttagcgtttcccgcatctgaaaaaacaccggtttcccataggattttttcgcaaaaaagatagaaaaagcgcttgcaaaagaaaaatccgcagagtatcgtaaaaaatacatgccttataatttttggtttgatcaggagggaacgccaatgaccgatctttcttttatcgaaaagaaacccattcaaaaaggctggtcatgcgacagtaaatattgtgtaacagccgctgacgggacaaaatatttgatgcgtataacaccgcatgaaaaaagcgcaagtcgtgagaatatgtttcgtatgcagcaaaaggtggctgagttgggtgtacccatgtgcagaccggttgctttcggtacctgtgatgagggcgtttataacctacagacctggattgacggacaggatgcggaaaaagtcattcccaacgcgtccaccgaagagtagtatacctacggatggcaagacagaagcatactccaaacaattcatttgattcctgcgccagacacgcagccggaatgggaaccgcgttttcttgcaaaagcacagcggaatataaaaatctaccaggactgtccggtccgaatggatggcgcccaaaagttcattgcctgtatagagcagaaccggcatttactgaaaaacagaccgcagtgctttcagcatggagattaccatattgccaatatgatgattgagaacggcaaactcgtggtaattgattttgaccgctatgattttggcgacccttgggaagagtttaaccgcattgtttggtgtgcacagcggcgcccctatttgcgtccggcatggttgacgggtattttaacggcaaggttccggcggagttctgggaactgctcgctttgtatatcagcagcaatatgctttcttccgtgccttgggcgattccttttggcgagcatgaggttaccacaatgctaaatcaggcgcgagatgtcttgcggtggtacgacgggatgaaaagcgtggtgccgtcctggtatgccaaaaaagcgtgcactggctttggattttgaaatggctggaatcggcagcaggaagaatgcacggtcgctgccaaacttattgacagactataagcggcgacggcgtttcgatgggttggccattttggagaatctttttgcgaggcagaagaatagactgcttgtggggtgaaaaattgtagcttttatctgcggcagaacggaaaaaagggcaggaaaacggcctgagatgaaaatcccaggccgtttctttttatgattttgtagagagggcagtttccgtttccgtatgctccggttcccggacgctttcccggttaccggggaagagccgcggtaaaatgagcagggagctaatcagcagcaggaaaaagatgcccagcgacaacggcagatataccgtgtaccccaaacctaccgaaaaccctgctaccagataggcgatagctgcgcagatggccacagtaagcgcataagggatctgggtgaatacatgacgcatcagatcacagcctgcggaagtggaggaaaggattactacatccgaaatcggagatacctgatcgccgaacaccgaacccgccaatacggcggagagagacaaaactgccatctccggtgccagcgcttcgcagatggtgaccacgatggggatcagaataccgaaagttccccaagaggtaccggtggcgaaagcaagtagtccggcgataaccatggcaatggcaggcagaagatggacgggaataccggaatcgcgcacgattctggctacatattccccggtgcccagataatcccggcagacgctgctgatactccaagccagggtcagaataacgctggcgccaaccatggattttactccgtcgttaaaggctttgaaaaattccgtcatcggcatgatgcggcgggggataaacaggaaaaatgctacaagcaatgcgccagcgccgcccaaagccagcgcagtgggggcatctgttttaccgaaagcctgaactaggctaagctgttcgttccagtatccgccgacataaagcatagccagtaccgaaaagaccagcagtgcggcaattggaatggccaggtcccagacccggcctttagacgaggcctgcatccgggtgatctcgttttcggtttccgccgtgtcgcgaacgccgtcacgcattgcccggcgttccgcttctgccattggaccgtagtcggcgtgtttgcggatgcacatccaaaacaccataaaaatagtgccgatcgcgtaaaagttcagcggcgctgcatgtaaaaacgcctgcataccggtgagaccgccatcttgagggatgtaggacataacggaggcggcccaggaggaaatgggagctaaaatggccatggcggcagccatcatgtctacaatataggacagcttttcccgggagatgttgaaccggtccgttaccggccgcataacggttccgctggtgatgcagttaaaatagtcatccagaaataggcaggcggaaaatcctgcggtggcagtgagcgcactgcgccggcttttaaaacggccgcgcgcccaagcggcatacgcattggagccaccggctttggtaatgaccgcaaccagtccgcccagcaaggacaaaaagacgatcatggcgatattttcacccagctttgcgatcatgatgtctaccgtggtagagaagcactgaatcaggcttaattggttgcacagcacatagattaccgtaccggacaaaatgccgcagaccagcgaaaaaataacttccttggtcaaaaccgccagtacaatcgccacaatagggggaacaaccgaccaaatccctacatcctgcacagaaatacctccccggaaagcagataattttttgataaagatagcagaaaaattataacattataatatgaccttgtaaataaattttgcaggaaaaaattcataaaaggacagaagagaaagggaatgaaaaccaaaagagaaatcttcaatattttgtatcgataaccatatctgattttaggaattttccataaattttagcgattttttaacaatagaacaaaaaaaagccaaaaaccgctttttgccccatttatttactatttgttcataaaaaaggcacgttttttgcatgttttgttgtgaatctttctccttgctacttcaaagggcttatgatatagtagtttgggtttcttcctatatacatattaaataggtatatatataggaaaataaggttgttgaggtgattgaatgtttgttctgttgtttgccctgtggatcttgttcaacggaaaaatcacgctggagatctgcctgttcggccttgtgatttccggggcgatatatctgtttgccattaaactgttggactacgatcccaagaaagaactgaaggctttgaaaaagctgggaggcatcttccatttcctgctggtgcttctgcgggatattatcaaggccagtttccatgtcatcggcgtgattctctctccgaaaaaggaggttgaccccaagctggtatttttctatacagatctgagtaccgataccggccgggtgggtttggcaaacgcgattacgctgacgcctggcacgattacggtgttttgtgagcatgagctgttctgtgtgcatgcgctggataccgccagccaggcagatgtggacgagtctcaatttatgcatttgctgaaaaaactggaggattaaaagatgaaagagtttacaggttcttttctgctgggctcggtgatccttttatcggtcctgattttcttctgtatgatccgtgccattaaggggccacgttttaccgaccgtgtggtggcggggaacatgatcagcacaatgatcatcgtcattctgtccatcctttcggtttacatggaggagccttttttggtggacgtggcgattgtatacgccatgctcagctttattacggtggttgtgctttgccggttggtaattgttcggcgccgggtacacgaaagggaggaacaggaagatggaaaacgttagaattgttgctggcatcattctgattgcagtagggttattcgtttatatcacagcaacttttggtctattccgctttcattatgtgctcaaccgtatgcatgctgccgctttgggggacacgctcggcattctttttgtgctgctgggactgatgattctggtagggttcaattttcacacgctgcggctgggacttattatttgctttttgtggctcgcaagccctgtgtctagccatctgctggcaaaagcggagtttgtgacctttaaacatatcaaatccgaatgcgaggtggtagagaaatgaggttggctttggaactaatcctgccgattttgttgattgtttgcgctttggctgtgaccttctccaaacggctgctggtcgcggttgtcatttttacgtctttcagtctaatcatgtcggtgatctgggtactgctggaaagccccgaccttgcgattaccgaggcggcggtaggcgccggtgtcagcggcctgctgctcatctatacactgaaaaaaatccatgcgttgaagggaacgagtgatgagtaaaatggccaaaatcaaaaaagagaaaaagaccctttggcaacggttcaccgcatgggttaacggcgatgccgccgaacaacccctgcttcctgcggaaccgcccaaacccaaaaaaaacaagggggccaagggcaaaaagcaaaaggcgcaacccacccgcaaggaatggatgggcctgagccggtttgaacatttttatcacgtctgtgcagttgtcatcggtgtagctatcgtatcggtgctgatggtcacagtgctgcagcttccgttgttcggcagccctgacaacccggcggttaacgaagtagtggagcggtacgtggaaaaaggtctggaggagactggcgctgttaatatggtcgctggtatgatcttggattaccgtgcgtttgatactttcggcgaatcttcggtactgtttctggcagttacctgtgtaaccatgcttttgatgcgggaccgcaacaacaccacaaaggaagaggatctgctcactgcccgggagcacgtgatagagggccacgaggaggatatcattctaaccaaaattgcccggctggtcatcccctgtgcgctggtttacggtatttacgtggtgctgaacgggcatctgtcgcccggcggtggtttttccggcggtaccatcatgggctccgcgctgattttgtttgccgtgtctttcggtatgatccggatcagccggttctttacttatgctaccttccgtaaagtcacatcctgcgcgctgatggtttatgccgcgtcaaaggcttactcctttttcaccggtgcaaaccatctggaatcccatattccgctgggaacacccggtgctattttaagctccggcctgattttggttttggatatctgcgtcggcattgtggtagcctgcacgatgtacggcttttatgcgctgttcacaaagggggagttgtaatggaacacctgctgatcaatcactatgaaacagcggcggtcattttgttcggcatcggttttttgaaccttcttctgcagaacaacctggtcaaaaaggtgatcggcgttgggattatggacagttctgtttatctgtttttggcatcccaaggctatattgaaggccgcttggctcctatcctggtaggagaggcagccaatgcggcagactatatcaatccgattcccgcaggcctggtgctcactggaatcgttgtatcggtaagcgttactgctttttcgctggcgctgatccagcggctgtatcaaaaatataagacggtcaactttgacgagattgttcaactggccagacaaaagggagatgagtaaccggtgccatttgtatataactttccgttcttcagcatttttatctgcatgatttccggcatcgtcaccccgcttttgaaaaacggcagatgggcgtatcgactgagcttatttgcctctggcgcagggttgctgctgtccggcgttttgctggggcggattggacctgcgaatgaaagtttcagctttatgatgggccattttccggccccttggggcaacgagttatcggtgggaccgctggaagcggtgctggccactgccgtttgtctggtgatgatgatggctttgttaggcggcagccgggacatttttgaagatgtcctgccggaaaaacaaaaattgtatttcatcatgatggacgagatcctggcagcgctgctggcgctgacctataccaacgatatttttaccgcgtacgtgttcatcgaaatcagtaccatcgcggcttgcgccattgtcatggccaaagatgccagcgctacactggttgccacgatgcggtatctgattatgagtctgctcggctccgggctggtactgatcggtattgtgctgttgtactgcatcactggtcatctgttgttcccaagcctgcagcagcgggttctggaattggtagccactgggcagtacaccattccgctgactgtggttgtggggctgatcgttttgggccttggcattaaaagcgccatgtttcctttccatttgtggctgcctccggcccatggatcggcgacgaccgcctccagttcggtgctgtccggtctggtagtcaaaggatacattattttgatgatccgcctgttttataaagtattcaccatcgaggtcatccgggaactgcgcattaccaatatgattttcctgtttggtctggccggcatgatcattggttcgatcggcgccatgaaagaagggcatatcaagcggatgctggcctattcttcggtggcgcagctgggttatgtctttatgggaatcggtctgggaacagatattggcattatggcagcctgtttccagattttggtgcatgcctgtacaaagcccatgctttttagctgtgccagtgccctgagcgccggccggcaccacaataaaaagctgcatgcactgcgcggtgctgcttatgaaaacaagctggctggtatcggctttacggtcggcgctttgtccatgatcggtattccattgtttgccggtttcgccgcaaaggtgttctttgccagcgcaaccatggcacagccggtgaaaatgtggatgacgctgctgacgctggctttgtccactgtgctcaacgccttgtactacatcccggcggtaaccgttctttggtcccggccggcagaaggagagactggcgaaaaacagcctgttcatccggcgtttgcagtttccaccgtggtattcatcgcagcggtgttcttcttgggcatctgctatgagccggttgtaaccctcatccaaaacggactcgcgctcttataaattcccgataaagaggtgacaatttcgtgttcaaaagtatcgtcctgttgctgcccatcctgctgccgttgatcggcggtttggtggtgttccggctgcgcgatgccaaagcccgccgcattgcggtatctgcctgtgtgctgtgcacgttggtttcggcggtaggcgtcagctttttgccggatctttccctgcgtatttgggacttgggcggcagtattgccatttatctgcggctggacgccatgggcaggtttttcctgtgcctggtgtcaggtatctggacgctggtggcgttctttgcttatgagtacatgcagcacgagggaagggaagagcgcttttttggcttttacaccatgaccctcggcatcctgatgggacttggcctagcaggaaatttgctgactttgtatatgttctatgaaatgatgaccttaatcacagtaccgctggtcatccataacggaagccgggaggcggtagccgctgggtttaaatatctgggctattccacctttggcgcgggccttgcgttgatcggatttttcttcctcaaccggtactgctccaccacagaattttcagctggcggaacgctggatttctcccttgtagcgggaaatgaaaacctgctgtttaccgtttggcttttgatgatgatcggttttggctgcaaagcgggcatgatgccgctgcagtcctggctgcccaccgcccacccggtagcgccggcgcctgcatcggccgttctgtctggcatcataaccaaagcgggtgttttggccattattcgtgtgactttttatctgttcggcgctgatttcctgcgtggcagctgggcgcagaccacacttttgtgcctggcgctggcaaccgtatttgccggttccatgctggcttataaagaaaaagtatttaaaaagcggctggcgtattctacggtcagtcaggtttcttatgtgctgttcggtttgtttttgttaaacagtgtaggctttaccggtgcgcttttgcaggtggttttccacgccctggtcaagaatcttttgttcctggctgccggtgcagtgatttataaaaccggtaaaacggatgtgcgggagctggtaggcattggcaaacaaatgccgattgtgatttggtgctttgcgtttggcgctctgtcgctcattggcattccgccgactgcgggctttgtgagcaaatggtatctggcccagggcggcattgctgattatggcattttgggtatcgggggcgcggcaattcttttggtcagcgctctgctgactgccggatacctgcttccggttgtgacccgcggtttttttccgggccgggactttgactacgcaaatctggagaaaaaagaaccgtcaggctatatgacggtgccgctggtcattctggcggcgttggccgtgctgttgggtattttccccggcggcttgatcgaatggatcagcggcatttctgccgtattattttaatgttgggaggggaagcttgtgcctgtttggatgttatgcctgccggttttgtttccgattttggccggcgcagtgatgctggcccgtcccattgaggaccggaaaaaacggcagatttatgtggctggcgccgtgattgtcaatgctgtgctggcgctgacagtgctgatctggacgccggacggcgttctgacgctgctgcgcttttccgataccatgcaaattgcgctgcagatcgacggagcgggccgggtatttggtattttggtgtcgcttttgtggccgttgactaccttttattcctttgagtatatgaagcacgagggaagggaaaacaagtttttcggcttttttaccatgactttcggcgtaattgagggcgtggcttttgcggataacttcttaaccttgtatctgttttatgagcttttaacgctggcgaccttgccgctggtcatgcattcgatggacggcagggcccggtatgccggtaaaaaatacctgatttattctctgtccggtgcggcgtttgcctttattgcgatgatctttttgcttacctatggctccacgctggactttacctttggcggtgtattggatccttccagagcaagcggacacgaaacgcttttgcaaacggtatttgtgctgggctttttcggcttcggcgtgaaggcggcgatctttccgtttcacggctggctgccggacgcttcggtagcgcctacgccggtttccgccctgctgcatgcggtggcagtggtgaaggcgggcgtgttcgctgtgatccggctgacctattatggttttgggtgcgactttttgcgcggcagctgggcgcagacggtggtgatgacggcggctgtcgtaacgattgtatacggttccgccatggcgctgcgcaccccccatttgaaacggcggctggcttattccaccgtcagtaacttgtcctacatcctgttttcggttacgctgatgactcctgcgggcctggttggcggcttgtctcatatggtatttcatgcggtgattaaaatcacgctgttcttctgtgccggcgcgatcatttacaagacgcatcgggaatacgtttaccagttagacggttttggccgggcaatgccggtgaccatggcggcgttcaccatcgcttcgttaggattgatgggcatacctcctttggccgggtttgtcagcaagtggggcattgccaccgccgcggtggaaaccggaatgcccttggcctatgccggtgtggcggctttgatcgtttcggcgctgttgaccgctttgtatttgatggcggtcgttctgcgtgcctacttccccgcaaaaggctttgatcccgcttcggtcaaagaggtggaggatccgaatcgtctgatgacggtaccgctgcttgtgctgagtgcagcatccgttttgctcggattgtgtgcttcgcctttgatcgcagtatttgaacaaattgcagccggtttgctgtaaatgccggaaccattgaagttgggagtgagaaaatgggcggttttttattaattttcctggtattgtttccaatggctggcgcagtcgccggatatctgaccgggcggaagaataagtctgcgcgggattggctggtgctggcggtcacggtagtggagctgttgggagcactgttgcttttgtatttccccggcgccaccctgcgtctggacgggatttgcggcctggggcttacttttcaggcggacggattccggatggttatggcgcttttgaccgcggcggtctggatgatgaccacgctgccgtcccgatcctattttgcccacgcgcgcaatcggaatcgatattatctgtttttgctgctggcgctgggagccaccatgggcattttcctgtcaggggatttgtatacgacctttatcttttttgaaatgatgtcctttgcctcctacgtatgggtggtgcaggaggaaacgccggaggcgatcagcgcttcccgcagttacctgaccatcggtgtgctgggcggcctggtcacgctgatgggcgtgtttttgctctaccatctggcggggacattgcagctggatgcgctgcgtgatgcctgtgctgccgtagaaaaccggcggcttttatacgcggcaggcggctgtatcctgtttggctttgcagcgaaggcgggcatgttcccgctgcatttctggatgccccgatcctacacggcggcccctgcacctgctacggcgattttgtccgccgtattgagcaaggcgggtattttcggcgttttgatcgtatcctgtgacatgttttaccgggatgccgattggggtatgctgattttgatgttaggcgttgtcacaatgttgttgggcgcggttctcggccttttctccgtcaacctcaagcggatgctggcctgttcctccatgtcccagatcggttttatcttggtgggcgtgggcatgcagggccttttgggggcacacaatcagctggcagtttacggtacggtgcttcatatgatcaaccattcgttgattaagctgattttgtttgtcatcgccggggtaattttcaccagagtcggttctttggatctcaatgagatccgcggctggggcagaggcaaaccgctggtgatgttctgctttttcatggcggcagttggcgtcggcggaatcccgctgtggagcggctatattagtaagacgctgctgcatgagagcatcgtcgaatatattgaaatactgagtgcccagggcggcgccggtttgatgcgtacggtcgagtggctgtttttgatcgccggcggcatgacgctggcttatatgaccaagctgttcgttgcggtatttctggagaaaaaacccggcagcgaaaaacctgccaaagagctttatatggataagcccacttcggtgatgctgacggtatgcggcgcgctgcttttggtgttcggcctgtttgcccacagcaccatggatcatatcgccgaagtgtcccgttcttttttgggcggtgaggcgttggagcatgcagtacaatatttctcctggaccaatctgcagggcgctttgatttctctggccatcggcgcggtgctgtatttcggcgtggtacgtcttttgctgatgaaaaaagacgcgcagggcgttcggatttatgtagaccgttggcctcgctgggcagatctggagaagcttgtgtaccggccgctgttaagcggactggcctttgtgggtgctttttgctcccgtaccgttgcttccttggcggactggatcattgctttggtaaaccgcctgttttacaaaaaagcgccacaaagcgtggaaccgaaaaccaatgagcagtttggtgcttattcagacaagccggttcaccgtggaattgtcggtgaaacattggcctatgagcttcttttgtacggcgcaggcgtagtggcaacgctgttgtacctgctgttgcaatagccgcaggtttgagttgcagactttttatttttaaaaaggaaagctgtacggatttttgtatccgtacagcttttttgtcggagagcctttttgaatggccatgttatatcgtaatccagtatcgctgaaccagctcaccattttccagacgctcatcctccagcacgccgccacagcgcagaatggtcttggccgaagcaggattatttttgtcgcaagtcaccagcgcacggtcaatccccagctctttggcaatgggaagggccataaaaagcatttgggcagccagtcccttgcctcggcaggacggacggatggccgtatccgatatgcccactgtaagacagcagatagtcgtttaactggcggcggatgtcaatcgcgcctaaaatccgcctggtttcatcctgcaagaagaatacggtagccggcacttgcacgggatcggaaatagattcccgccggcgtaaataggattggagttgtgcataattcatcccttcgccgcgaacggcagcgggaatgatcttatcatgatttgctttccaatccgctcgaaaatcctcatacgcattttccaattccggacacggcttgatcaggcgaagcatctttttttcactctttttttatttcaatgattctatcatataaggaacagaaatgtaagacaccaaaagaaagcgttgcctcggctctttttatggtgtatgctaaagaaagaaaaaagggggggatagatttggagcaggggatttgcgcgtttaccggccaccgtcccgggcattttgcctttggctatgaacagggtcatccggattgtgttcgcctgaaacatgccattggacaggcggtgtccatcttaatacaacagggcgtaaccacttttatcagcggtatggcacaaggggtggatctttgggcagcacgggaagtgttgcggcaaaaagcagaaaatccaacgctgcgtctgattgcagcacagccgtgtgccgatcaggcacggcgttggccacaggcagcgcggcatgaatatgaggacattctggcagtttgcgacgaacgcttttgcctatatgagcggtatacccatttctgcatgatggaacgcaatcgctggatggtggatcggtcggggattctgcttgcggtatatgatggcagtgcaggcggcggaactgccgcgactgtgcggtacgcacagagcaaacaaagggaaatctggctgctggatccggatacactgtgtttggttgctctgactcctccggaaaagcagatttccttcgatgacacttttttatcggggcagacggtgtaaacaccgaaaaaccggcgtattttacgaaaaggaatggggaaatggcttgttatcaagaccatgcgttttccatacgggatctgcagccggatgatatccgtccgattgtggaaggggaaatagctcaaggctggcagtcccatatggaaaagtatgagatgaggattcagcatcaaaaggaagggaaatctgtttccctagttgccgcatacggcagtgcggtaatgggatacattaatgtatacctcgattctaagtggggtgcttttgccaatcagggatatcctgaaatcgtagactttggcgtgctggaaaagtatcgcagaaatggagttggaagtaagctgatggacatagcggaacggattgcctccggatacgccagcatggtataccttggcgtggggatgcacagcgggtacggaagcgcgcagagaatgtatataaaacgcggttatattccagatggaaccggcgtgtggcatggcaaaaaaatatgcgaaccttatacaaattgccggaacgacgatgatttggttttttatctctttaaatttttaaggtgatccctaccaatagcgagtgaagtttttagtgaaaagaataaaaagcggagattttcatctccgcttttttgatatgtaccccctttactggacacccagtagagggggtattattatgcggta

SEQ ID NO: 4136 - DNA, 26025 bp, Unknown
  16S sequences of unknown bacteria
tttttcttttcaaatttctccaaagatacaatcggtctttttttcttctcgcagaacatcctggcataggcggcggaaaattcctcctccgtcatttcctccacgttttcgcggacgtattcggggatttttttgtacgacatcagccgctttccctcaaaccaatcgggacgcagtttcagcccgacgagcgcgatgccgcagaccaccgccgctccgatgatgttcaccagcatatccatcatgctgtctttcagtccgctgccccgcaccgcgtccgtaacatacgttccgtcgggattcatggaaacgatgccgtccttccagcgctgcatattggacgcgccggcaaagcccgctatctcgtaactgacgctgtccaccgcgtattcgacgagttcccagatatattcgatggacagggcgaaacaaaaactgaacacgacgataaagaagggcgacaacttgacttttttgctttcgagattggtgaacgacagaacgacggaaaatccgatgaacgcgatgattgcgccgcccgtagtatgcaaaattttgtcgaagagaatgtaatgatcgtaaaagcgatagatctccccgaggataaaatggataaagataaagagatagacgatgacggcgatgaaatcgggaatgcgcactttgagttttctttgaaaaaacacgggaatgtttaagcagacgatggcaagcacgcacatctgtatctgattgaggtacgtttccagcatttcccccgaccctaaaatgcacttgacgagcgaatagatcgctgatccccccgtcaacagagtcatgatcagcacaatccagtacaatacccgattggctttgtgctgtttcaaaagcttttccgttctgtaatcgatcaattcttgtttttcgctttccgtcatacgctcctccacgccgcaaaaagcggcagccgacttcttttatccttcgttacagcagacgtcaactcatgtttgaataccgtgcgaaaacgcccgccacgcccctttgccgccgctgcgacagcgcggtgggcgaggttacagggcgttccaaattcccgcaagcgggcgcttccgccgagcttgcggactgcgtcccggcggaagcgggcacgaaaacgcttcgcaaacccgtaatttcgttcttattgcaacagcgccggccgtatgtttgcatagtccgcaaaagaaggatgcagacacatggcgtcgtctttattataacgaaaaaacggcaaaaaagcaagcgtcacgctcttttctgccgttaattttctcggtttcacacgtttttcaactattgcttttgttgtttcagcagatcgcggatctcttccaaaagcctcgtgttcgccgtttccttagcttccagcgccgctttttcggcagccgctttctcctctgcgaggcgagcctcctcggcttttgccgtttccgctttggcgatatcctccgcgtacttctttctggcttcttcgcgcgtcaaaccctctttacggtatttcgcaacggcttttttctctatttccagtccgctcttcatcttatcgctcgcttctgcaaagctgttgatcgctttgacgatgcaaaagagcacgaaagcgatgagcaggaaattgatgatggcgttgataaaagcgccccaatcgatgtaaatggaattttcgagcgaaagtacgccgttcgcgtcatagccgcgttttaaaaaggtaaatacttcgctcagcgcgtccttgcccaaaatcaaagcgaggacccaattgatgaggggctttaaaatgttgtcgctcagcgccgtgacgatcgccgtgaacgcgccgccgacgatgacgccgaccgccatatcgagcacgttgccgcgcgtgataaattttttaaattcaccgaaaaacttttttaagccgccgtgtttcttctccataaagatatgcctcttgtaaaattatttgttatttgtcgcagatcaggctcccgtaaacattcggagcgtttcaaaaatcatcgcgtaggaattaagctgatccaaaagggagtccataaatataaaattgaggacccacatgacgacggaaatgacgatgcccgcaatggcaagtccccttcctttgccgtatatattcttggagcgattcaaaccgatgatactgaaaataagccctaaaagcggaatgaagaaggagcagacgaagcccgcgatcgccatgccgttggagccggaggcttcctgcgggggctgatagccgccgttttgcggcgagtaatagtagccgccctgcggagaaggattttgtcccggctgatagccgccgttctgcatacccggttgatagccgctctgctgataagtattattcggagtctgcgcagactccggcggttgataaccgcccgcgccgaattgatcgttgaggttgataccctgggcgggctgagacgcagaagcgttctctttcaaagtgccgtcgggattgacggcggggttagcgtccgtgggaggcatcgcttcatggcgggacactttttcaccgtactcggtcaaagagccgcaatttttgcacaccatgtcgttctcttcgacaggggagccgcaatttttgcaaaacataattttctcaccttttccttaaaatacttgaacaacgaaatttgttctgtatcattctactacatttgaggtaagattgtcaatagggaaagcaaatatttttgttttttattcgacatttttctttcaccctgatttttcttagaataaaaggatttttttccctcttttttctccttcgcgggaaaaaagcccttccttttcggcgcctttaaaaaaaagggacgccgaaaaaatcaggcgcccttgttttttttcactttttcgacaatcagccacgcaaacagagcgccgccggaaagagagccgtcgcaaaaaatctgtaaagggattcttcccgacgtcaaaaattctccgctcgccgtcaagatttcccttttcccgccgtcccgttcaaacgcgctcaccgtatacgccgctccctcttcgagtcctttcagacaaacgcatggcgtcccgtttccccttcctttctccgccgcaaccaaagccagagcggacgccttgttttccgaaacggcgaggagaccgtaagcctcaaagcgttctttggaaaacgcgtttcccaagcggtaggtctttccgcattgcagcaaacggcggtattttttaaagaaggcgatccgctttcttattccttcttcctgcgactgcgaaagcgcggaaaaatccgcttccacggtcggcgagccgaacgccgcataaaaatccgtcggaaggctcaaagacgcgcaatcgaagcggacgcgagaggagaggacgcttggaggatagccgcaggaaacgccgctgcggagaaaaagatcgcgcggcgcgtccccgccttcggccgctatctgcggaaaatagcagagcagtccgagatcgaatctcccgccgcccgcgccgccctcgaagagaacgcccgggaatttttccgcgatgcgccccagcaccgcatacaaaccttccgtatagcggagaaaatactcccccgcgggcacgtcgcggcaaaagcagtccgccatgcgcccgcccgtttcccagtatacatagctcgccttcgtttcggaaagaagggaggacagcgcgcggaccgcatatttctgcacgcggggatccgcaaagttgagaagaagccgtcccttgacgcgcaggggttccctgcccgggatcttcatggcgtattcggggtgtttttcgtaaagttccccgttttcggaaatgctttcgagattcacgcggatcccgaattttatgcccgcttcgcgcgccgcggcggcaaaaacgcccgcctccgtccttttttccccgccttcaaagtgctccgcgggaaaagaagcttccccgccgagaacgaacacctccgcgcccagctccgccgcctttttcgcctcggcaagcgcctgcggctccgtaaagtccgaggggttctctccggctgcgaaaacgacggggcgttctcttcccttccatctgccgcggacgatgtgtttcgcgacgaaatcgtgcatggcgagcgaaacgccctcttcgtccccggcgaacgtcatcgccgcctcgggagaggaaaagctttcgccgggcaaaagcgccttgtccagcataaaatcgtttacgccgaccaagacgcgggtacggggatacccgtccgtttccgccgtttctttatggccgcccgaatagacgaggttaaacgcgtacacgctcccctccttttccagcattacaaaaggatttgcgaagagggaggaggcgccgaggcgcgattcgcggacgacgactccgtcctttacgggcgtatagactttttcgtattctccctcccgcccctcgcggaaggcgacgaaagagtagccgccgccgtatacgtcgagctgcaaagaagcgagattcttcacgcgcacctctttttttccgccgttgaagagccgcgcggacacggcgatgacgtccgaatcgtcgaataccgtgtaatagagaaaaagacgaagcctggaaggctcgtccgaaaattcgagagagagcgtctggcaggcgtttttctccatcgagtcggaataggaggagggcaagggcgccagggagggtttgtccgtcagtttcgccctgagaaaagaaaagcgcggagaaaaggacccgtccgcaaacgcgcaggatacggaaaagcggcgggcgtcccctcccccgaacgaagacgcgaggctcaacgccggctcgtttccctcgccggcgcaggaaagaaaatcgtaatcggagccgggcacggaaagccgccgcccgtaatagagatactccgcgcacctctcggcgcggatcagaagcgtcgtcgcgggagtatcgagtttatacacgtttccttttctttttatcatagtgccgccttctcttttgtttttcctattttccgcaaagcgcgtcttctttccggatagagcgttctatctcgctccgggtttttcggaggaaagacgcgcctcctttgcaagccctttaaaacataggcgtccgtcaaaggctccgacgcggaggaacggctgcttctcttgtaaggagcggggaagagccggggctttgccgacgactttttcccgtgaacgacgatttctttataacgattgcctaacgccgtacgcggctttttcgaaaaaagccgtcctcgcggcgcgaaaaatcttttttcccgctttacgtcggagcaatcgtcccatttgcgggaaagcgagcggacggttggggaagcgccgcatacgccgcgaaaagagccgcgtcgaggtttattataacacggcaaacgggaaaagcgcaacgatttttccgcgttttaagagaattttcaaccccttcacgactcttttttcagttttttcctttctcgccttggcgggcggcgagcagatcttcgatgaaaaagatatcctccgccaccgaagagaacgcttggagcagatacgacctcgtttccttgcgctgcgccgaaaaaattgccgtacagtattcccgcagcagagatttttccataaacagcatatcctctaaactatcgtattcgttgagcgtgatctcgcgtttgctgtttttcattccttaccgcctcccgcgagctttttaagcgcgcttttgcgctgttcgtgacggacggcaagcgcctccatatcctccgcgagcgccgcgtcggtgagcagtcttgaatagatcctcgctttcttcacggagagatcctccgcttccgcaagcatggtcaaaagctgaaattcgcattcgaagccgctttcgtattcttccataaaataaacctccctttattttccttgatacttgcaagtatgcggaaatcggggaggttttataccgatcaatctctgaggagagcaatttttcgctccttttcagaagccgggcgccgacgacgtcttttcagttccctgcgcctaaaagaaagcgctcaatcggagcttttttccttcgtttccgccgttttcgatttttccctgaaaaaatcgcaatacggggcgagcgtacagccgccgcagtcgggacgccgggaatgacagacccgccgaccgtgaaagatcagccaatgatgcgccttcgaccagtcggatttgggaatcgaacgatgaagcccctcctccacttccgcgggagtcctgccttttgccagccccagacggttgctgacgcggaacacgtgcgtatccacggcgatggcgtcgccgccgaacgccacggagtataccacgttggcagtctttttgcccacgcccgcaagactcatcagatccttgatattatcgggcaccttgcccccgaaatgctctgaaatatccctgctcgccgagagaatgtgctccgctttcgtcttgtaaagcccgcaggaaaagatatacttttccaattgctcctgcgtcagcgcgcacatggtttcgggcgtggaatgttcctcgaacaatttttccgtcactttgtttactctctcgtccgtgcactgcgcggagagaatgaccgccaccaaaagctcgtaggcgcttttgtagtgaagggcgggacgggcgtcgggatataaacgactgagttcggcaagagccgcttttttatcatgaggtttcatagcgcttcccttataatctaatcgacgttatatgtggaatcgggcgcaaaaatgctgataaatacttcgtgcttccgcatttttgcttctattataacatcgcttacgcaatgtttgaatcgggcgcggaaatgcccataaatacttcgtgctttcgcatttcgtttctattataacacaaaaaaagcgcttccgcaagctatattttccacagtcggaaaaattttccccgcttaaaaaaatttccttcctctttcttcgttttttcctctcccccttccgcctgacgcaggtttaaagattgcgtttttccgccttcaaaaaaaatattttaaaccgcgaaaaatgtaaatttccccttcgcggcgctgtttttgccgcgcgggaaggcgttttttcggcaaaaaggacccgaacgccttataagcgatcccttttccgaacttataaattcccccatgccgtttgtcccatacccgcgctttaaagcgcgcgggcacgctctgcaaagacgaaaacagcggtcagcgcggcgcgggataatagggcgtcaccactgccctgccgtttttgtaatccattttataaaatcctttaaaagcggaatatttccccaatttcaaaaccgcctgcgcgcggataaacgcggacgaatcgaatttgacgcacaagccgcagccgatgttcgcctccttcggtgcggaagcggtctgcgccgccacgccgtatttatataaacgtcccgcataatccaaagactgcgcgcgggaacggaacactgcaagtatcgtcataatgtcataccgacctcctcggcggaatagtatattttatgactctataaaaaaagaggtgacttttcatgatctatttcgacaacgcggcaacgggagggcgcaaacccgacgccgttatctccgccgtttcctccgcggtcagactgtgcgccaatccgggaagaagcggacataaactctcccttgcctgcgcctccgtcgtcctcgactgccggagctccctctccgattatttcgacgggtacggcttcgagcgggtgatttttacaaaaaattgcaccgaggctttacatatcgccatcctgggaacgctctccgcgggcgatcacgtcgtcacaacctgtatggaacacaattccgtgcttcgtcccctcgaatttttgagcaagcggggaatcgtcacctacgacgtctgcccgttgacggacgggaatatctcccccgaaaccttcctttccctcgtcaagccgaatacgaaaatggcgatcgtcacctccgcctccaatgtcacgggagcgatcccccctttgcaaaaaatcaaggacgccctccccaaacggatcttgttcgtcgtggacggcgcgcagggcggggggcatctgcccctcgatatgagagaaacgggaatcgacgccttagcgctggcgggacacaaaggcatgatgggcattcagggcagcggcgcgctcctgttttccgagcgcttcaatccccgccccgtcatgttcggcgggacgggcagcgaaagcttttccctcgatatgcccgacttttatcccgacgccttggaagcgggcaccctcgcttttcccgccgtttcctcccttttggaagggacgagatatttgacgcagaaggaaggggaaatcggcaggcatctcgtcgctctcacgggatattttttagacggacttaaaaagctgcccgcttaccgcgtctattccattcccaacccctgcggtatcgtcgccttttcgcaccgggaaatccaatcggaattcctgtccggggaactttcggaaaaatattccgtagccgtgcgaggcggactgcattgcgcgcccctcatgcacgaagcgctggggacgcaggaaaacgggctggtgcgggcgagtttctccctcttcaatcgaaaggaggaaatcgcggtcctgctcgacgccttaaagcgcatgggataacgaatacgcttccgccatccctttcctattttcccgaaggcggctcctgatttttacggtcttttcaaatcggtagccggtttttccgcactttcccgcgcggggaaagcaactcttatcccgcaaatttttatggactccgagggggaaattttttctctgcttgcccttttaaaacctttgcaggcgaataaaattccccttgcggtattattccgcattggcaatcgggcgagctctttttaaaggagtattttccgcctcttaccgatcaatccgtttcccgtcccgtccgttgatattgcgcgccgaaaacaagacgatttttctttacgggacgttccccgcgccttttaaaaagaaggccctcacttcatattcggcgccccggcgctttttacgggtttgcttttgcgagggaggagaaagaaataaaagcccggccgcctgttgttgacgaacaagaaaagggcgagcttcgacgagggaaaaaggcggcggacgagaaagaaagggcagcgttttttcatgccctttctctgttttttcccgcgcggcgtcaaatccttttgagtctttccaccacggatttgagctggcggcgctgcacgttgttcaacagcggcgaaaactgttcgtaaaaagtgtctatctccgcattggagagcgtgcccgcgcgcttgcttttttccgcttcgcccaaaatgcttctcagcatatcggaattgcttttgccgttgaacgcggcggctattttttttgtaagctccgccgcggaactttccatggcgggatcgggcgccgtagccgcctcttttaaaatttcgctttcgtcctgcggcgaagactgcggggtataatctttgaaacttctcataaacttctcctttttcatgggattttttcggaatatttaatactatcctatgcggagaagcaatttttcgttagcgttttcatatattgaaagtatggaaatcatgatgctgattttattatactatctctcgcagaacccggattttcccgaaagcgtcaagcccttgatgggaaaactcaaaaattccgaggagatgttgaaatttttgaacgatttgtcccgtttttcggaaatgttcgcgctgtttcaaaaacaaaagcccgaagcgagcaatccccctccgccgcccaaaggtccgccgccccctaaacccaaggaggaaccgtgcggcaaagaacaaaaaaaggaggatccgccgccccctaaggacgaaaaagaaaaaccgccctcccctacgaacgggatagcggataaattcatcgaggaatgccttgaccgatattttaaaaagagatagccgtaaatttcccacaagcctccttcccaaaaggagcgcagcgcttttttcctcgcaaagttgcagattgccgccgcccgaaagaactcaccgggaggcggcgtttttatactacggaaaagccgccgttgacgggaatgtccgcgcccgtgacgtagtcgttttcttccaaaaacagcaccgttttggcgacgtcttcgcccgtgccgagcctgcccgcgggaatttcctctttcaaagccgccatgtcctctttggaaaaatgcgcgttcatgcgggtgtctatgaccccgggggacacgcagttgacgcggattcccgaccagcccagctccttggaaagcgctttcgtaaagccgaggagcgcggctttggaagcggaatacgcgctttcgcagctgccgccgacttctccccacacggaagaaatattgacgacgagcccgctctttttgcttatcattcctttcagcgcttccctcgtgcagagaaacgcgcccgtcacgttgacggcgaaaaggcggttccattcctctatcgtcacgtcctgtatctgtttgacgagggaaatgcccgcgttgttgacgaggatgtccacgccgccgatcgtttgaaagagcgttttgatctccgcctcttccgtcacgtccgcgcgatagatctccacgcccgcttccgccgtttctctggcgctgtcctcgtccgaggaatatgccgcgcatacgcggtagccctttttcaaaaacgcgagcgccacagccttcccaatcccgcgcacgccgcccgtcaccaggaccgttttttttgcgttcatcaaatccctgtcccttccgttctttctttttccgacgtctttttaagcgctgcgttctccacggtttgaatgacggcggcagccgattcctccacgctctttccgtccacgtccacgataaagtccgccacgtgttcgtacacgggcatccgcactctgagaagttccgcgagcttgtccgcgatgacgcccgaatccgcctgcaagagcgggcggttgtcgtatactttgagtcgctttaccagcgtatccagcgacgcgcgcagaaatacgatcttgccgttttgctgcaatagttcgttgttttcgcgcttcaagaccagacctccgcccgtcgagatgatcaggtgttcctccttcgaaagctctttgacgatccccgattccaattttcggaaatactcctcgccgtaatattcgaagatgtccgagatgttcccgtaacggtctatgatcatctgatcggtgtcgtaccagcgccgccccgtcgtttccgcgatcttgacccccacgctcgtcttgcccgcccccatcatgccgcacaatacgatgttcatttcttttcctccgtcagggattccttcaagccctctaaggcggcgagataactcgccgcgccgaaaccgaacaccacgccgcggcagacctcggacaggacgctcttttttctgaattcctcgcgcgcggcgatattcgacatatgcacttctgccacggggacgtcgatggcggcgacggcgtcgcggatagcgtagctgtaatgagaaaacgcgcccgcgttgagcacgattccgtcgaaggcgcgctttaaataagcctcatgcagcttatcgcaaatctctccttccgcgttgctttgaaaaaactccgtttcgtcgccccgactcgcgcaataggcggcgattttttcgttgatctccgcgagggaacgggcgccgtagacgctcttttcacgcacccccgtcaaattgagattgactccgttgatgatcaaaaatttcatgatgactttttcctccaaaaaacctgcggtgcccgttttctccccttttcacggaaaaaacacgacggaaaagccgcgcctttaaaagacggcgaatggctttgaacgaaggcgggatccctttttaaccttcgagatagttcctataaagtccctccgcttcctcctcgtcggcgggaagggcgagatacagacaatccgaaaggtacgcctgataaaacagcatcgcgtgcccgttgagcgtctttttgccgagcttttgcgcgagccgcagaaattccgactgcgcggggcggtaaatgaggtccaccgccgccgcgcaatttttgatcgtttcttcgcctacgggcgatacgcccacgctctcgtgcattcccacgcccgtgcaattgatcaggacgtcgcaagggacgcttgcgggatccgctgccgcgcgcacgccgagcgaaaaacagacgtcctttaaaagctcctgccggcgctgatagagaaacacctcggcgcccgcttttttgagggacgccgccgtacttcgccccgccccgcccgcgcccagcaccagcgcccgccgatcctgcgtccgtacgcccgcgcggcgaagcatcaggagaaagcccacgccgtccgtgttgtagcccgtcttttgcgcggagagcaccgtattcaccgaatcgaacgccgccgcgtcccctttcgtttcgttcaaaagagcgatgattgactttttatagggaatcgtgatgttgaagccgtccgtttcctttaagagccgcccggcttcttttccgaaagattccgcgccgacggaaacgttttcgtaatcgcacgccgcgcccttgccttggagaataaagcggtgcatcctttcgctctccgatcgggaaacgtcttttccgatgagcgccaatttcaattttttcatgccgatgttcctcccgcggctcgccctttcctattgcggattgcgcgtttttcgatttcccggggcttcgcgtttgcgattttttccgtcatacggaacctgcgccgagaagctgaaagaagccggggaaagaaatggcgcagcattcggggcgggcgatgccgccgcccttttctgacgcgagaagccccaccgccgccgtcatggcgatgcggtgatcgaggtagctgtccacgtttccgcccgcgagcttgtctttgccgcggatgacgaatccgtcctccgtttcgatgcagatcccgcccagcgccgcgatcatttccgaggtggtgcggatgcggtcgctctccttgacgcgaagttccttcgcgcccgaaatgcggctttcgccgtccgcgaacgcgcagagaagcgccaccaggggcaattcgtctatcatggagggaatgtcctctttggtcagcgaaattccccgcatcggcgatttttcgacgagaatgtccgccgtttcctcgccgcccgacaccctgcggttgagaatggaatatcggacgcccagccgatcgaacgccgtcaggatccccgtgcgggtgggattgatgcctacgtttttgcacagcgtcctgcctttcagcgcgcccagcgccataaaatacgccgcggaggaaatgtccgagggcacgcaaacgtccaccgctttcaaaagactgcgtttcaattcgatgcgcccgtctttgcagcggatgtccgcgcccatggcggcgagcaggcgttcggtatgatcgcgcgttttctgcggttcgacgacggcggtgacgccctccgcggacaaccccgcgagaagcagcgcgctctttacctgtgcggaagcgatgctcatttcgatctccgcgccccgcaaaggcgcggggaaaacgcacacgggcgcgtgtccttccgtcgtgcggacgtccgcgcccaaaagagaaagcggggaagccacgcgcgccatcggcctcccggaaagggattcgtcgccgaagagaaccgcctcgatattttttcccgcggcaaagcccgtcaaaagccgcatcgtcgtacccgaattgccgcaattgagccgcacgcccgtccgaaaccgaggcgtaccgtgtacgcagagcgtcgttccgtcgatgtcgatccttgccccgagcgcgcgcatacactggcaggtggagaggcagtccccgcccatcaaagcgtgcgtgacgaccgcttctccctccgcgcccgcgttgagcatgacggcgcggtgggtgatggatttgtcgccgggaagttcgaattcgccttcgaatgcgcctatgggcttaatttccttcatattcgtcctcgtatttggtattttccacatttctcgctatctcttccaatccctgtttatattcttcgaacggcaaagaaagcagcgtccattttcccctgctcttcgccgcggatatacagatgtttccgtcgtccagattctttttgtccgaacgcgccttttccgcgtctttgccgatacgggaaaaatccgcggcggaacggggggcggcgttcagcgcccttgtcaccaatccgacgagttccctcccgtattcggcttcgcagacgccgtatttttgcgccagcttcgtttcgaacaacattccccaaagcacgctttccccgtgggaaagagaggaggaaagttccacggcgtgccccgtcgtgtgcccgacgttgagggatttgcgctcccccgtttcccgttcgtcctccgtcacgactttcgccttatgccggacgcataccggaatcaaggaagagagaaaacgcaactttgtcaaacgctccccgttttctttcagcgcgtcaaaaatccccgcgttgagcgcggcgtatttgacgatctcgcccaagccgcacttgatctcccgcgcgggcagcgtctttaaaaattgcggatccgccacgacctcaaagggttgataaaaggcgccgacgacgttcttgacgccgcaaagatccaccgccgtcttgccacccactccgctgtccacctgcgccagaagcgtcgtgggcacctgcacgcaggaaatgccgcgcatataaagggacgccgccagaccgccgatgtccccgacgacgccgccgcccaccgcgaacagccgcgaggaacggtgcagccccgccttcgtcatgctctttaaaatatcccccagccgagagaaattcttgctctcttcgcccgcgggaaggacgtagatttccgagtccgcaaaatatcgggcgaaaaatccgccgtacagcgcgtatacgttggaatccgcgacgacaaaatttttctgtcccgcgacgagaaggggcaggcgggactcgcacgcgccttccccgacgtatatttctccttccgcggaaggagttttcaagatgattttttccatgaagacctcccgtgcggcgcgcctttcgccgcgacaaatttccttttttgcgcttttccgcgccccgcttttcggaattttcaaacccgccgagcgccgtttaaaaaacttttccgcatgacaggaaagatcctatccattcttcgataaaccgcctttcgcccgcctgtccttcgccgaggcgcgccgcgccgacgacgggcagccatcggagaatctccgatcgggatttgttttcccgcccgcaatacaagtccagatacttgtccgctatcttaggggcgcggaaaaaatagagcatatacgtcctacatatgtccgcctctccgaatcccgtcgcggcatccgcccaatcgacgaccgtataccgcccgtcttcgacgaggatattatagccgtgaaaatctccgtgacagagagaatcgccgcagggcatttcctccaacagtttaagtacgccgcgcatttccgctttcggcaacagcgaaccgttttctattttttcgcgcagtctgctcttcaaattcaaaggaagccatatctttttcgcttgaatctccgcttgcagagagagcattttgccgagataaaattccgtttcggaaggcgacgcgacgatcaagtcgtttaaaggctttccgccaagacagtccatttttacggaaaaaacgcccttcgtttcgtacacgccgtatatctttgccgtcggaacccctgccctttccgccagagaatggacgagagcttcgtaaaaaacggcgctcttttccacgcccttcccgtatactttccaagcgaatcgcccgtccgagtatacctttgagcgcgctcccgttcccataagacgcatctctttttcttcgccgtccgtccgcatattccctctcctcccttccgtggttacggcaaagcccggtatctttcgacgacctcgtacacggtatccccgcccaagcgttcggcgatcgtctttgcgaggatttccgcgacgaccgcctcggcgatgacttcgagggcgaaaacggcgcacacgtcgctgcgttcggaagccgccgtcgccctttcgtgcgtgagatagtcggcggtgccaagtccccgcatcagcgtgggaatcggcttcatcgcggcgcgcaggacgatctcctcgccgttcgacattccgccctcgatgccgcccgcgcgattggtagccctgcggaagccgttttcataaaagatttcgtcgtggacttcccgcccgctcaaaccgcccgaggcaaagcctgcgcccacctcgacgccctttaccgcctgtatgctcatcaatcccgccgcaaggcgcgcgtccagcttctccgcatacgtcatacagctgccgaagccgcttttgagtcccttcacgcggatttccgcgacgccgcccgccgtatcgcccgctgttttcaaggacgccaccttttcctccgcttctttctccgccgccgcgtcgagcatccccaaaccgctctccttggcgcgggacagctcggagaacgcatacctgccctcgtcctttactccgcaaacctcttttacgtagccgccgatctccacgccgagcgccgaaagatattgtttgaacacactgcccgccgccacgcgaatggcggtttcgcgcgcagaagcgcgctctaaaatattgcgcgcgtcgttttgggcgaattttatcacgcccgcgaggtccgcgtgaccgggacggaccttggtgacggtgcgcgcggaaacgtcgcacgcgccgtccgacatatacgcgcgccaattttcataatcgcgattgtaaatgcaaagggtgagaggactgccgagcgtttcccgattgcgcaccccggtgaggatctcgacgcggtcggtttcgatcttttgtcttccgccgcggccgaaaccgctttggcgaagcgcaagttccgcgtttattttttccgtatcgatttcaagatgcgcaggcagtccctcgatgacggcgatcagggcttttccgtgcgattctcccgccgttgtcagtttcatggaaaatcctcctttaagcggcttcgtaatccagccattttttgaatttacgtccgcatttcgtacagcgcagactcatgctcagacacaagaacgcgtttgcccaatcggacggggaaaattcccctcgttctatctcctctttgagatcctcttgaaaggtggtgcacggctctatcttcatttccgcctcaaacgtttcgccgccgcatttgccgcaggtccacaaatcgagctcgtcctttttcgcggggagattttctttgcatacaaatccgtcccacccgtgctttgcggcatcgaaaagttcccgctcccgattacaccgaacgcatctcccgaaaacggcaagactgaatccgcccgaacgctcggctgctaagatgtatttcttcgtcttttccgcacagacatacaaacggaaactttcgcttccgcaggtgcagcgcaacgacccgcacacggaaagcgagctcgcttttctccgtttttcttccctctttataaaaatttccctcagaggaacgggaacggaatccgcatattcttccttcttgtgcgtatactctttcataatatctattttacagcaaaacgtcgagaaagtaaaatcttttttcttgttttcctgtaatttggctaaaaatatcgaaaaattatttctcggacttgacaaaaaacttttgtttatgttataataagcaaataaaaagccccgaaaaagaggatttttcgcgttctttttaaaaagcgtcccgaaaaacggcactctctttcggcaaccagaaaaatggaggattaaaatgaataccaagcaattgtttaaaaaagggataacgctgagcgccgcggcggcgctgtttacgttgggtgcgtgtcagggaaaggcggcggatgtttcgaaagaggacgcctatgcacagttgaaaagcgcgctgacgacgactgtggaaacgaacgaactgtccgtttccgtccgcggaaattttacgtcccgaacgcccgtttccgacgaaagcgacggctccgcagcttcccttagttcggaagaaaacaaagggaccatcgatatttctttgcagatgaagacggacgaagaacgtaaaatcaccgctcaaagtgcctggatcaagcttctcgacgagaacgacgggagcggcttgattctcgaatcctactataaggacaaaaacgcctattcgtacagcaattttatccaagaatcatacagttacgccgcggaccaagcccccgacaccttcgatccgtcggacatcggcatcgaggatttttcggcatccgtcgacaaggtgttggaagtagtacccgaagcgaaggcaaccctcgaagacggcgaatacaaacttgtctggaacgtgaacaacgacaatctgaatcagtatatcgaggcgtatctttgggtaaattccgagaatactcccgctaccgaggagcaggtgaaagagcaggcaagcgaaatagcaaaagacattaccgtcggcggcgacacctcgctgaccgttaaaatcaaggagagcacaatcacgtcgatttccgtcgttttcgacgtgacctatcaaggctcccgcatcaagggggaaggcgctttcgagatgtccgtcaaaaacgtgactatcacttatcccgagggacgactggaagagatcaagcaaaaagcggaagccgagcgataacctattttttgtctaaaaaaccccgaatcggtttatagatttgaattttgttaaaacctattgttggattcaaaagccccgtgggatatggaaaatcgtttgaaacgcaaagctctccttttccgtcggaaaatgacagcgcacacagaccttccctttccgtcgagatatgccgcaaagccttttacggactattttgcgaactttttatcaaagcgttaaaaaagcgtttcggtattgaccggaacgcttttttcattcactgcgccgtaaacgtaaacgcgccgccgagatagtccaccgtcacccgctgaccgttgcccacattgccgagcagtatttcctcggacaatctatcctcgatccgcttttgcacggtgcgttttaagggacgggcgccgtattggctgtcgtatccttccttcaccagctgttcgagcgcggatttcgtcacgcaaagcacgatgccccgctgttctaaaagccgcttacccaaagaatcgacgatctttccgccgattttcgccgcgtccgcctgcgaaaggcggtgaaagacgatgatgtcgtccatacgatttaaaaactcgggacggaaacgctctttcagggctttggtgatgttttccttcatctcctcatactgtttttcgctcgcttccgtcggcttttccgccgccagctcgccgccgaagccgtaggaaaccgtgcgttccgcttccgccgcgccgacgttggaggtgagaatgatgatggcgtttttgaaactgaccgtcctgcccttgctgtccgttaacctgccgtcgtccagaatttgcaggaggaggttgaacacgtcggagtgcgccttttcgatttcgtcgaagagaatgacgcaatagggcttcgtgcgcaccttatcggtgagttgccccgtctgcatatcgtcgtagccgacgtacccgggaggcgcgccgatgagtttggacaccgactgcttctccatatattcgctcatgtcgaggcgtatcatctgatcttcggagccgaacatcgcctccgcgagcgctttgcaaagatccgtttttcccacgcccgtgggacctacgaaaataaagctgccgatcgggcgcgaggggtctttaagccccgcgcgggcgcggcggatggcttttgcgacggcgcttaccgcctcgttttgtcccacgatgcgcctatgcagctcctcttcgagatgcatcagcttttcgccttcctcctgcgtgatcttcaaaagggggattttcatgcgggcgctgacgatggcggccacctgctccttgccgagggcgaatctgccgtccgctttccgctccatacactgcgcgcggcggatcgtttcaatcttcgcttccagcttctttttttcgttgagcgcctctatcgcctccgtatactgcccgcgggcgcgatacagctgctcctcctccgcgagcgattccgcctccgtcaatagctccttgatctcgtcgccgccgtcctccgcgatgatccgcgcgcgcgccgccgcctcgtcgatgaggtctatcgccttgtcgggcagaaaacggtccgtgatatagcgggaggaaagttttaccgccgcctctatcgccgcgtccgtgatctctatgccgtgatgctcctcgtatttggggcgaagtcccttcaaaatggaaacggtgtccgattccgaaggctcctccacgtaaacgggggtaaaacgcctttcgagagcgctgtccttttcgatatatttgcggtattcctcaatcgtggtcgcgccgatgacttgcagatccccgcgcgccagcatgggttttaaaatattcgccgcgtccatagtattgtccgccgagcttcccgcgccgacgatggtgtgtatctcgtcgatgaagagaatgatgtccccgtccttcatcaccgcttcggtgaggtctttgagccgttcctcgaaatcgccgcgatacctcgcgcccgcaagcatcccgggaatatccaccgaaaacaccgttttgttgaagagctgttcgggcacctcgccgttcacgatcaactgcgaaagcccttccgcgatggcgctctttccgacgcccggctcgccgatcagcacgggattgttcttggtgcggcgggaaagcacctgaatcaccttttctatttcttttttcctgccgattacgggatcgatttttcccttgcgggcgcggtcggtcatgtcgatgccgtattgaaggagcttttccttggcgccctcgttctttttcggggcgggctttttcttttcggaaaagccgtaatccttcatctgcgtcctttcctttttcacggggttctcgcttcccgatttcggaggaacggacggcgtgcccgcgctctcggaataatcggagccgaactccgcatcttcccgcgtttcgctatccgcgcccccttcgtcgtcaaaatcgtcgtagccgagctccttgcggtgcttttgggcgcgcaggacctgttccgtcttttccttcatcgattcgacgtccgcgcccagacgcttcaaaattttgacggcgtagcaggtgtcgctttcgaggacggacaacagaaggtgcgccgtgcccgccagcgttcccgtctgtacggcgaatttaatggcgcggtcgaacatctgcgtcgttcggacggtgaagccgggcgtcgtgatcttcgtatcgatgcagcggaaaaacacctccgcatattcgtttttcgaaatgccctcccccgccagaatcccgtatgcggaacacctcggcaggcagagaaagccgtagatgacgtgttcgctgcccacgtatacggcgccgtgttccaccgtcacgtcgttggcgattttcagcgccgcctttaaattgtccgagaacttcgataaataatccatcgtctactccccgatttgcccgctttttcccgccgtctgccgcggggcgcagcaaagatacattatatagtatatgccgccgcgccgcccgccgttcagcccttggacggaccgagccggttttccgcggacttttcgcccggacgatgcaccagctgcggcaggatcttatggacgatcttcgcgcgcaggatgtcgcattcccgctcgtccttcgcttcgggacaattgccgcgcttgaaggaaacggggcgcatatgctcgataaaatcgttgagggcgtccatatcctccgcctcgaaaaatcccagcgccgcgcccagcttcactttgaccatgcccgccgtcagttccttgacggaaagcagggcgcaattggtcaacgtcccgtaagcgcgcaggcacatatcccgatagccgagagcgtccgcttccagcatccgctcccgcgcgcgggcttccagttccgcgagattgagcgtcacttcgttcatcagggaaaggatatccgtttcggaaacgcccagcgtccgctcgttgctgatctgataggaatacccctcggcggcggtgccttccccgaacacccctctcaccgtcaagccgttcgcctttaaagagggcatcagctcttccaatctcttatatttggccagcccgggcaaaaacatcatcaccgaagcgcgcatccccgtgccgagattgctcggacacgccgtgagatagcccagtttttcgtcgtaagcgaagctgacggagcggccgatgccgtcgtcgatgccgctgatgcgctcgtacgccttatagagattgcagccgcggaggatatattgttcgcgcaaatgatcctcctcgtttatcatcaccgagatctcctcgtcggaagtaatgaacgcggcggaaatgctcttgcggcgaatgaggtcgggactgatgaggtgcttttcgagaagaaaggtcgcctcgtcgggctctattttgccgatgtcgtattcggtgaaggtgtcgaggcggttgagctcatagccgacgacgcggatgatctcccgcgcccgcttctcgtccagcttgtccgggaaaggataggaaaaaagatttctcgcaagccgcacgcgcgtcgaagtcaccgtgctttcgattaaatcggaagaatccatctcaatcatcgggtccctccttatacaggatcttattcaggcgtttgagttcgtccgagcacattttcgccgcctcgtagctcctgttttttatcagctcttccacgcgggtctttaaaaggttgcgccggcgcaccatctcctcccgctcgccggagtttctcggtttttttccgcagtgcgtttcggtgccctgcaaccgaatgacgacggggatgaccgccttggacagcgattgatagcattgcgcgcagccgaccagtccgcaggcgcgaaaatcctcctcggaagtaccgcaataagggcacatggcgatctgcctgtcccctccctttccttccgcggcgtccgcctcgatagaaataaacagacggtgataacagtccagacaataatactccgtctgctttttcccgtctgtaattctgtcgtaagttttggtcgcctgattttttttgcaatgacagcaaagcatccctttatccctttttatcactccgtatcgtgctcttgctcatgcgggaaaacgtattcaggctttcggatcctccttcccgtcgggggctgcttttttatccgttttggcgttttttcccttaaagggcgtccagcggaaaaagcaccacagcacttccagcgcctgcaagggcacccccaggaggaataagagccaaagcctgctgtaatccgtatgccccagttttaacatgacgacgcgcgaggtgacatagacgcagcaaagcaccgcccagataagtaccgtcacggctccgaaattggtgagcttatatttccacaccgccgcgagaacggtgacgacgatggcgttgataggaacggcgtacacaaacgccagccaccacggctgtttcggaacaaacagattgagcaccacgaaaaccaccgtagcgaccaaccagacgatgccgctggacaagagcataatcaaaagattatgccacttggacatctttttgggcgcgggcgcagacgcgctctcgtagacgagatcgttaacgctgacgccgtaaagctccgcaagtttcaaaagaatataaatatcggggacgccgttgccggattcccacttagaaacggacttatccgaataatttatcttctgtgcaagctccgcctgagtcagattcgccgcctttctgtaacgtattaaatttttggcgatcctctgatttgtcgtgtccaagttttccatacagctatgataacatttttttttcgtttcgtcaagcgagtatgccctttttttaaggaaaacccgccttttttattcgattctaccccgggtagaatattatttttcctctctacccgtcaaagcggggaaatagaacgtttttccccccgatagaaaacgtccgtttttttagtagacttaaccgtttttacgaatagagaaaaaagagaaagcgagtagagaggtttgtgctataaatcggttgagttttggctataacaagtataaaataaattatggaaaacgaagggcggcgaaaaaggctccgctcgttcgtaaaattaaggagtttttaggtattatggaaagaagtttcgacatcattacggacacttgcagcgggatgccgcgggatttttataaggaaaacgacgtcgccgttcttcctttgggctacaccatcggcgccgacacttacggcggcatcgacgggaaagatctgcccatcgaagaattctacaagctgctccgcgaaggaaacgtctgccacacttttcaggtgaccgcggaacaggcgaagccgcagatagaaaaatcctttcgggcgggcaaagacgtactcatcctggcgttttcttccgctttgtccggcaccgcttcctctttcaccgttgcggcgaccgaactcgtcgaaagctatcccgggcgcagggccttggtgctcgattcgttaagcggttccctggggcagggaatgcttctcgaatatctcgtcaaaaaggcggacgaaggcaaatccctcgacgaagtgtacgcttacggagaaaagctcaaacaccgcatccagcatctctttacggtggacagtcttgaatttttgagaaagggcggcaggatttcttccgccgtcgccgtggtaggcaaacttttaaaaatcaagcctctccttcacgcgacttccaagggcactctcggccccatcggcaaagtgatcggcagaaagcgctctttggaggctatcgccgacgaagcgcagaagcgcgccgatcttgcagaggacgatcccatttttatcgctcacgggaattgcgaggaggacgcgcttaaaatggcggacatcctcagacagcgcttcggtgaaaaaaggcgcatcctcatcaattacatggatcccgtgatgggcgcgcacggcggtcccggcattttggcgattttcttcaaagggatcgttcgggcgtaattcatcgcatacctgcccccgttctttctcttttgaaagtcccaaagaaaaaatcgaaaaaataaaatattcaaggagatcatcatgagcaaaaacaagtttaaagtattcaacgacaaaacggcagcctgtgaattagaggcggctctcaaaaacggaaacgatctcgttttggtgagttctccttccgaatatttcgagagcggcgcgggacaaaacgccatcggactgatgaaaaagtaccccaagagaaagattttcgtcaccagccccgcctcggcgtccatttgggaacaagtctgcaaaaaggcggattcgggcgcggatattctctccacgtacgtttacgcggaagggcttgcaaaggcgcgttgtgccatttgaaaacgccgtttttggcggaaaaagcgtttccgtatttcaaggcatggacaaaaaatgttaagaaaggcgaatttctgatgccccggcattgcagagctttctccaagggaagttttacagatttcgccgttggtccctgccttacaaaaattcaatgcttcccgtccctcttacagagcagacaggggcgcgattactgtgcttatacttcaccataatcctaataaaagaaaagccgg

SEQ ID NO: 4137 - DNA, 1970 bp, Unknown
  16S sequences of unknown bacteria
acattatcgagaatgtttcaatcccaaaatttttctttcgctgaatttgtaaaataaacgcaagagaaatccaagcggtttctcctgcgtttatttttttgcgcatttttcaggaagtgaggggaaaaggatggcgaaacacatgacgctggaagagcgcaaggtgctggaagcacggtacaatgcgggccagagcgtccccggaatcgccgatgcaatggggtttagcttctctaccatctataaggaactgaagcgcggcgataccggagcgatggacaagaacggtcgcgcgggctacagcgcagcgctggggcagcggcggctttaccatactaagcagcgcctgcggtatcaggcggaccacccggcggagtaaagagatgggagaagtatttaagctgaaccactgctacaacgtggactgcgtaccagcaatggaactgttcccggatgattacttcgacttggcggttgtagatccgccgtacttctctggtccggaacgccgcggcttttacggctccaaggtcagcaagataggcgtgcaccgtgattatcccatttcaccgacatggagcaggccgggaccggaatatttcagagaactgttccgcgtttccagacactacatcgtatggggctgcaactactttgattataagtttgcgaccgggcggattgtgtgggacaagtgcaacggaagttccagcttttcggactgtgaaattgccgcgaccgatttgttttcctcggtgcggctgtttcgctatatgtggtccggcatgatgcagggcaagagcattgcagagggcggcaccatgcagggaaacaaaagcctgaacgaaaagcgcatccatccaacacagaagccggttgccctgtatgactggatcttcaagaactatgcagagccgggacagaagattctcgatactcaccttggaagcggaagcagccgcatagcagcttatgaggcggggcttgattttatcgggtttgaaattgattcgttctatttccagctggaagaagaacgatttgcagagtatacaagtcaaaccagcctgtttcacatggagggaggcgaaacgaaaaatgaaaattgaaatcactggcgaggcaaaagaaattgcggtctttgcgctggaactgcaaaggccgcaaccgttcaacgtccccaataaggaagcgctgtcagaagagcagatgcgagaatttactcactatctggagagccatcatcctcaaaatgaagaaccccactttgcttgaggatgtcggaaaccatgtgagcaacggtgtcaggaatcgaagttgcgagataggcaagggcggaactttgaccgccggatcggtatgcttcctttactcctttgttcaattcggattctgtcttttcgacaatggcaaggacaatctggttatattcagaacgcttcaaagaaatcacctcctttccgtgctcattgtaccacggggatggcagtgacgaaagaagcaagaaaggacaaaaaatgatttttgaaaaacttcacagggcaatcaacagcttcaacaaggcgttcaactggcggcagttccgccgcgatgtgctgcacctgggggaaagcctgctggtgttcggtattctgtatggcattttttcaaccgtgatctggggcgtttgctggctgacaaaaatcaattatgacccggatctcattgctgttgcatgggcagtgccggtgctgttggacactctggtcaacaaggcttacgactggaacaacgagatccggcgctgggactaacagaaccggaaggcatgggcagacctacacgcccaccatgcggtttatctgtggcgcagacagaccgcccggctaccgcaaggccggggccttacctactgggggcagaaagaacacagcggggcggcccgcagggcaggagcggttcagttgtccgacaccgctcctttaacatgg

SEQ ID NO: 4138 - DNA, 14427 bp, Unknown
  16S sequences of unknown bacteria
tgaccttcttgaggaggaaaaatttgatttttcccgctgtgaaaaagctctgaccgatcatttttccgcaaaagacctcggggatctcgggcttgacggcaaaaaagaggctgtcggcgcagcgggatgtgcccttgaatacctctttgccacaagaatgaccggccttgaaaacataaccaaaatcgaaatatacgcaagctcccagttcatgaagcttgacctttccgcaagacgaaatctcgagcttttcgaaaccatgcgttccaaggaaaagaagggttcgcttctttgggtgcttgacaagaccaataccgccatgggcaagcgtatgcttcgctcctggcttgaacagccccttataaatcccgccgcgataacaagacgtctttcggcggttgaggagctttatgacgatacggccctttgctatgaaataaacgatctgctttcgggagtttttgacatcgagcgtcttatgacaagggtggtttattcaagcgcaaacgctccggatcttttgtcccttgcctctgccgcgtctcatcttccgaagcttaaggagctgcttcaaaattcaaaatcctccatgcttaaggagatacataaggacatcgacgagctttacgatatatgcgagcttgtgggtaagtgcattgccgaaaaggctcccgccattatgagagacggaggtattataaaggaaggctataacgccgacctcgaccttctccgtgacgacatgaacggcggaagcagcaccgtatccgcggtcgaagcaagagaacgcgaacgaaccggaataaaaaatctcaaggtgggatataacaaggttttcggatactatattgaaataaccaattcctttaagcatctcactcccgacgattacataagaaagcaaacaacggcaaatgccgaaagatatataaccgaggagcttaaaaacctcgaacaaagaattttgggagcaaaggaacgctccattcgtcttgagcacgagctctttacggatgtgagaagccgcattgccgccgaattcgaacgggttcagaaaaccgcaaaggcggttgcccgccttgacgttctgacgtcctttgcccttgtggcaaggcaaaagaactattgccgccccgaaatttccgacgacggaaaaatcgaaatcaaagagggtagacatcccgttgtggagacggttataaaaactccgtttgtgtccaacgatacgcattttgacatgggtaaaaaccgctgtgcagtcataacgggaccgaatatggcgggtaaatccacatatatgcggcaggtggcccttattacaataatggcccagataggctccttcgtgccggcaagctatgccaaaatcggtattgtcgacgccgtgtttacaagggtgggcgcctccgacgaccttttctcgggtcagtcgacctttatggtcgaaatgaacgaagtggccggaatacttaaaaatgccaccaaacacagcctgcttattctcgacgaaatcggccgagggacatccacctttgacggaatgtccattgcacaggccgttcttgaatatattgtttcaaaaaaactcggcgcaaaggtcatgtttgccacacattatcatgagcttacctgtcttgccggaacccttgagggcgttaacaattttaacatagccgtcaaaaagaggggagacgacataaccttcctgcggagaattgtccccggcggagccgacagaagctacggcattgaggttgccgcccttgccggggtgcccaaaaccgttgtcaaaagagccaaggaaatcctttccgagcttgaatcgggtgagcacggcagcatgtcggaacattcggccgcccccgccgacgacggaatgcagctgtcgctcatgtcgtccttcgaaaatcctgttatcgaaaagcttaaagccgtcgaccttgacacactgacgcccattgaggcaatgaataagctttatgagctgaaaaaagaggccgacaaaatgtaattttatttgaattttaaagtgaggtgggaaaatgccgaaaataaacgttttaagcaaacatacggccgatcttatcgctgccggagaggtagtggagcggcctgcatccgccgtcaaggagcttgtggaaaacagcattgacgccggagcaacctcggttaccgtggaaatacaaaacggcggtatttcctacattcgtataaccgataacggctgcggcatttcccgcgaggacataaaaaacgcctttttaccccatgcgacaagtaaaattgccgacgaaagcgaccttaattccattatgactctcggattcaggggagaggctcttgccagcatttcggcggtttccagagtcgatattctgaccaaaacggccgatgagccctttggaacaagatatgttatcgagggcggaaccgaaaaacttcttgacgatgccggttgccccaacggaacgacaattgtcgttcgcgaccttttttacaacactcccgcgcgaatgaaatttttgaagaaaaatgtttccgaggccaatgccgtggcggatgtgctcgaccgcatggctctttcccatcccgaggttgccgttcgctttatcagagaggggaaagagaccctctccgctccgggtgacggaaagctgctttccgcaatttacgcggtttacgggcgggagtttgcctcggggcttattcccgttgattatgagtcggacggcgtttgtgtcagcggctttgtgtcaaagcccatggccgcgagaaaatcgagaagtatgcagctctttttcctcaacggaagatttgtcaaaacgggaactgcgtcggccgcccttaacgaggcctaccgcaattccataatggtcggcaaataccccgcctgtgtgctgcacattaaatttcctcccagcgccgttgacgtcaatgttcatcctgccaagcttgaggtcaggtttacaaacgaaaaacccgttttcggcgccgtctattacggcgtgaaaaatgcccttgccgcgggcgatacccgtccggaggcaaagcttcccgagcaaaaatcggctcccgcttttacaaaacccgaaagtctttataaaaagagcaatatgtttgctcagcagaaatttgttttcgctcagaaatccgccgcagccgataccgctgctcttaacaaacctgccgaacacatttccgccgtcaaagcaccggagccctctcccgttttaaaacaggagggaagcctttacaaccgcgttatcgaggtcagaaagcctgccgagcaagccgattcgaccgaagaaaaagcggctgaaagctcttttgaacccgaaagaaccaaaatttcaaatttttccgctcaaaagaacgatgaagcagaaaaaatcaaagacgtttcggccgaaatcgttgaggacgacaatttacctactccgatttttgtgggcgaagcttttgcaacctatgttattatggaggtgggcaaaaagctgctgcttatcgacaagcacgccgcccacgaacgaattctttttaataagctttgcgaaaatcacagtgctccgtcggcgcagatgctgctctctcccgttaccgtaacgctgagaaagaccgaatataccgttcttctcgacagtctcgagcttcttaaaaacgccggcataatcgccgaggacttcggcatgggttcggttgttattcgttcggttcccatgaatcttgacggagaaagcgtatccgagcttattgaagaaatagcaaaacgtctttcggaaaatccgaacgtcgtttccaccgaaaagcaggagtggatataccattcgattgcctgccgcgccgccgtcaaggcgggggacaagtccgacagagccgagcttatcgctcttgccgagcagataatcagagacgacagcatacgttattgtccccacggccgacccgttgcggtgtggctttcaaaatatgagcttgaaaaacagttcggcagggtgtaaaatattatgtcaaaaataaaacttgcggcagtcgtcggacccaccgccggcggaaaaaccgaccttgcaatcggccttgcaaacgcattcgacggcgaggtcgtgtcctgtgattccatgcagatttacgattttgctccaattgcgacggcaagccccacggccgatgagttgtcccgtgctcctcatcatttggtgggaattttaaaggcgggcgacagcttttcggtgtcgaaatatgcaaagcttgcccacgaaacaataaaagaaatccacggacggggaaagcttccccttttgacgggaggaaccgggctttattattcgacggtcgtcgacaacataaattttttggatgacggatttgatgccgacataagaaaaaagcttgaagtaagatttgacatggagggcggcgaagccctttatgcggagctttcttcaatcgacccgattgccgccgaaaaaataagtccgaacgaccgaaaaagagtaatcagaggtcttgaaatttattatgccacgggaaaaactccctcggaacagcttaaggagtcaaaaaaggagccctcgccctacgatttgtgcgcggtgggaattacctatcgggacaggcaaaagctctacgaccgtataaacaagcgggtggatataatgcttgaaaacggacttgttgacgaggccgagtatattataaagaacaatgtaaacggaacggggatgcaggccataggcgtcaaggagcttattccttattttgaagggagagtttcgcttgacgaggcggccgacaaaataaaacaggaaagccgccgttatgcaaagcgccagtttacatggtttaaaagggacggccgcataaactggatatatgctgacgaaatttgtcgacaggaagtttttgaaaaagcaaagaaaattgtggaaaattttgtaaatatgtgatatgattttctcaccgaaaaaagaaaggtgagaaaaatgacaaaattaaatttacaggacagctttttaaatcaggcgagaaagagcggaataagtttgaccgtctttcttaccaacgggtttcagtttaagggaacggtgagaggctttgacagctttaccgtggtgcttgaaaacgaaggaaaacaaaatcttgtttataagcacgccatttccaccatcgttccttcacgaaatattgatttaaacgaataaaaagaaggtgatattatgtttaaaacaagaaagggcagagtcgttatttctgttgccgtttcggtctttgtgctgctttatcttatattccagctgcacaatgttttaagcaaaaatatcaccacagaatttgccctcttttatgaatttgacgataaaatttcggcagacgcatacataatccgcgacgaggaggtcgtttcggcgcagacatcgggcggggttatcggatactgccagcaaagcggaagcaaggttcaggccgagagcaccgttgccgagattttttccgccgagcaacaggcggccgccaaaaaccgcattatcgaaatcgataagactcttgaacgtctcgagtcgcttcaaacctccaacagacaggtcaacgcaggggcggagtttatagattcgaaaattcaaaaaaatataagcgatatgctgtcgctgaccgataccggcaaccttcgcggatatgccgagtttgccgacgaattgcttgaaaatatggaaaaaaagcagatggctgtgggcggctcgaccggttttgagtcggaaattgcggcgctcacctcggaaaagcagtctcttgaatcgtctgtcggttctcccacgggaattgtttgccaaaatgcaggatattttgtcaacggagtagacggatatgagggaagactttcttcgtcggatattgccgggctttcggttgaacgtctcgttcaagagctgtcggccgagccccaaaagcaggaatctgccgtcggaaaagtcattgtaggcaacgaatggtatattgccgcaaacatcagcaccgccgttgcaaaaaggcttgttgtcggaaaccagatttcggcttttcttcctggcgtgacctccgaacgtctgctttgtacggttgcggcggttaaccccgattattcctccgaccaaagcatggtcgcccttaaatgcgaccgcatgagctttgagctcaccggagtgagatgcgaaaaggtcgagatatgcgtcggaagttacagcggacttaaaatttcctcgggggccgttagggtgtccgacggtgtgacgggcgtgtatgttctttcgggaattaacgctgtttttaagcccattgaaattctgtattcggattcaaattatgttatatgtaaaaacgatgttcaaagttcttcgggaattcgtatgtatgacgaggtaattctcggtggcagcgatttatatgacggaaaaaccgttaaataaaacggagggataaaaatggaatggacgcatccggacaaagagctttttgaaaagaaaaaagcagattttgattttaactttgaaatcataaaggagcgtattgcagaggctgcgaaaatttcggggagagagcaaaagaatattaagcttcttgccgccaccaaaacggtaagccccgagcttataaactacggtctcgaaaagggaatcgagcttatcggcgagaacagggtgcaggagcttctttcaaaaaaggacgagcttaacaccgataaagagcacacgcattttataggacatcttcagacaaacaaaataaatatgcttttgccccatgtttccatgatcgaatcggtgggaagcattcatcttgccgaagaaatttcgaaaaaatgtattgcggcgggaaccgttatgccggtgcttatggaagtgaatgtgggagaagaaatttctaagtcgggaattgctccgagcgaggccgaaagcgcctttgagcagatgctttctctcggcggaattaaggtcatggggcttatgtccataccgccggcctgtgaaaaccccgacgacgcaagaagatatttttcgacaatttacaaactgtttgttgacattaaggacaaaaacagagataataaagatattatgtatctttcgatgggaatgtcgggagattattatgaggcaatttccgagggcgcaaacatcgtcagaatcggttccgcgctgttcggtaaaagaatatacaaaaaataaatttttataaacggaggaaataggttatgggttttgtagacaagatcagagaggttatgaatgcccccggagacgacgattacgagtatgaggacgattttgaggaaacaaccgacgattcggattttgtaaacgattattccgagcgttcggaaagccgttcttcatccaagaacaacaaggttgtaaacatacacgccaccacccagcttcaggttgtgcttgttaagccggaggaattttccgaggcgccttccatcggcgatcatcttaacaataaacgtaccgttgtgctcaatctcgagtccactcccaaggacattgccagaagactcgtggattttttaagcggcgttgcctatgccaaccacggaacactcaaaagagttgccaacagcacctttattatcactccctataatgttgacattatgggcgatatgcttattgacgagcttgaaagcaatggtctttactgatttttcgggaggatagatttatgattactgccaaggacatcagagagtccactttttcccgcgccgcaagaggctataaggtcgatgaaatcgacgaatacctcgaaaaggttgccgactcggttgaaaagctgaccgaagaaaacaaaacgcttgtgaagaaaatggaaattctcgcctccaaggttcaggaataccgagaggacgaggataatatccgcgcggctcttatcaccgctcagcgctctgccgacgccattgtcaaggaggcaaagcggtcggttgagggctcggtcgccgaggccgaaaccaaggccaaggctattgttgacgatgcaaattccgaggcttccaaaattctttcggacgcccgcacgtctgccgaatcccttgtggaggaaaccaagaaaaaagcgtcggccgttcttgtggaggccaaaaacaaggccgaaacaatggtgaccgaggcaagagagggaagccgcaaagaaaccgagaatttcgaacttatgaagagaaaggctcttgaattcaggagtgcccttcttcagctttacaaggagcagtttgaaattatcaaggacggcaagtttatccagcagcccaaggccgacgaaagcattgactcggtcgaaaagccgaccgaaagcgccgaaaaacccgaggagcagcccgaaaaggccgaaaaaaaggttgaggaaaaacctgccgaaaaagagtttaaggtggaaaacgagtccgaagaacagccttcctccgaaaatatttccgacggatttaaaatcggcggcatgaacgccgacggcgataagtttaaaaatctcaaattcggagacgattatgacgtttccaaggatgaggaagaggatgaagatgacggtgcgaaaaccggaatcttcagaagaaaaaagtaattattcattaaaggggaaccaatagaaatgtctcaggattataacaagactttaaatttgccttcgacggattttcccatgagggcgggactgcctcagcgcgagccggttgtgcttgacgaatgggacaaggaaaacgtgtatgaaaatgtgcttaagaagaacgaggggagacctctctttgtgcttcacgacggccctccgtatgccaacggcgatattcacatgggcacggctctcaacaaggtgcttaaggatttcattgtgagatataaaaatatgtcgggattcaaggctccttatgtgcccggctgggatactcacggtcttcccaccgagcttaaggctcgcgcaaaggccggaattacggccgattccaccatttccgacaacgagcttcgcgatatttgccgcgactttgcgctcacctatatagacggtcagcgcaatcagtttaagagactcggcggtataggcgaatggaacaatccctatattactttgacccatgattttgaggaaactcagatcaaggtttttgccgaaatggccgacaagggctacatttataagggtctgaagccggtttattggtgccccgagtgcaacaccgcgcttgccgaggccgaaatcgaatatgccgaggatccatgccattctatctatgtcaaattcaaggttaccgatgatctcggaaagcttaaggctctcggtgccgatcttgacaacacctattttgtaatttggacgaccacaacatggaccctccccggaaacgtggccatctgtgtcggtccctcctttgattattgcctcataaaggccggaaacgactattacgtcatggccgacggactttataaatccgctatggccgcggccaaaatcgaggactatgaggttgtgggcagaattgtcggttccgagcttgagggtatgaaaaccgctcatcctttcctcgaccgcacctcacacgtcattgtgggcgatcatgtcacccttgaaagcggtaccggctgcgttcacaccgctcccggcttcggtgttgaggactttgacgtgtgcaaaaactatgattttctcgagaccgtcgtgcctgtaaacgataagggcgtgctgaccgacgaggcaggcgagcgctttgcgggacttaccaccgacgaggccaacaaggccattgcgatttatcttgacgagaccggcgcgctgttcgccatggaaaaaataattcaccaatatcctcattgctggcgctgcaaaaagcccgtgcttttccgtgcgacaagtcagtggttctgctccatctccgatttccgcgaggatgcgataaaggccgtcgattcggttaaatggattcccgaatggggtcatgaccgtctccagtccatgatcagagaccgcaacgattggtgtatttcccgtcagagaaaatggggcgttcccattcccgttttctactgcgacaaatgcggtaaggaaattgtcgataaagaggccatgctcaaggtggccggcattttcggcaaagagggaacaaacgcctggttcgagcgtcctgccgaggatttccttcccgacggatttaagtgcccccattgcggaaacgatcacggatttaccaaagagaaggacataatggacgtttggttcgattccggctcaagccatttcgccgtctgcaaaaaccgtccttaccttaaatggcccgccgacgtttatcttgagggtgccgatcagtacagaggctggttccagtcctccatgctcacttcggttgccgttgagggcaaggctccttataaaaccgttatttcccacggctgggtcgtggacggagagggaagaaagatgtcaaaatccctcggaaacggcatcaatcccgacgacattgtcaaaaaatacggcgccgaaattctccgcctgtgggtcgcttcctccgactaccatgccgacataagaatttcccccgaaattcttaagcagctgtccgagggttaccgcaaaatccgcaacaccgcaagatttattctcggctgtatcggagattttgaccccgacaaggatatggtgcccgatgaaaagctcgaaagcatcgacaaatgggcgatcatgaagcttaacggacttataaaggacgtcaccgacggttatgaaagttatgaatatcacaacgtttatcacgccgttcataatttctgcattgttgatatgtcgaatttctacctcgatgttataaaggacagactttatgtcgaaaagaccgacagcgccacacgccgcgccgcacagactgtcatttaccgcattcttgaggcgctgacgctgcttatttctcccatactcgcctttacctccgatgaaatttggcgcagcatgaaacacacttccaaggttaatcccgaccgtgctgtttataacgatatgcccgtcgtttcggaaatttcctgtgacgaaggctttatggaaacatgggataaaattcatgctctgcgcgacaatgttcagaaggctctcgaggaggcaagaaacgcaaaggttatcggcgcttctcttgaggccaaggtgacgctctttgcaaagggtgatacctttgaatttctatcgggtgtaaaggataagcttgccgacgtgtttatcgtttcggccgttgagcttaaaaatgaaggcgagggtgccttcaagggcagctttgaaggagtttcggtgaccgtggaaaaggccggcggacacaagtgcgagcgctgctggaagtacaccgaggacatcggttccgacccgaatcatcccgacatttgcgcaagatgcgccaaggttgtttccgaataacatgagcataagtaaacacagaaatatttctcttgccgtgtcggcggtcattttgattgccgaccggctcgtaaaatatcttgtggcggaaaattttgagctttactacaccaccccgatcataaaaggtctgcttgaattttgctatcttcataacgacggcgccgcaatgggaatgctgtcgggaaaccgatttttcctcatcgctctgcctattgttatgattattgcaatttttgtcgttgaattcagcgggaaaataacttctccgctgattgtttgggccttaagccttgtggttggcggaggaataggcaacctaatcgaccgtattaaattcggttatgtggtcgattttgtgagatttcctgtaagctggttcaattattcctttaacattgccgactgtgccgtcaccgtcggcgcggcaatgcttataatttatcttataacagacattttcaggtcaaaaaaaaaagatggaaaagaaacactttcaaattgactttgaccgcgtcgaaaggcttgacaaggcgttgtgtcttgtcgacggtgagctgacaagagcggctgccgttcggctcatcgagtgcggaatggttcttttgaacggcaaaaccgcgaaaaaaagcgataaggtcaagctttttgacaggcttgaaataacctatcccgatcccgagccctccgacgttgttcctcaggacataccgcttgatattctctatgaggacggcgatttgcttgttgtaaacaagcctaagggcatggtcgttcacccggcggcgggaaatcccgacaacactcttgtcaatgctcttctttttcattgcaaaggaagtctttcgggaataggcggcgttatccgccccggtatcgttcaccgaatcgacaaggacacaagcggtctgcttatggttgcgaaaaatgacgaagctcatctttgtctgtcggaacagataaaggaacattccttcacaagagaatatgaggcggttatcgtcggtcacttaaacgactcagaggggaaaatcgacgctcccataggcaggagcaaaaaggaccgaaaaaaaatggccgttaccgagcaaaattccaaaaacgccgttacctactataaggtgcttgaggaattcagcggcttttcccatgtgagactccgccttgaaacgggacgaacacatcaaatcagggttcacatggcttatatcggccatcctcttgccggcgacggagtttacggcggtaaaaacgctcaaagggctatcgaaggcggacaatgcctacacgcccgcaaaatcggatttatacatccgagaaccggtgaatatatggaatttacctcggatttaccggattatttcaatttgtttttagagaaattacggaatggataatttgatttttaaagatataattcttttttccgacatagacggtacgctctgcacatatgacaagaaaattcccgaaaaaaatcttgccgccatagagcggttcaaagccttgggcggaagattttcggtttgtaccggtcggtcggcgctgtcccttcgcagggcggtggatgtcagtattttcaattttcccgccattatattcaatggcggaggaatatacgattactcaaaagacgaatatataaaggacagtggccttgatatggacgtaacgccttttgttaatgaagtctttgaaaaatatcccgatgtcgggcttgaggttaatgtggaaaatgtgctctactgcgttaaatattccgaacgctcgggccgtcacattttgacagaaaacgacgaattcagactttatgacatgagcgagcttcccaaagggcaatataaaaaggtgctttttaccggaagcagagaggatattgaccgtctttcggccgcgtttctctcaagaaattccgacggaaataaatattattttttacgcagcgaaccgactcttttcgagcttttgcccataaacgccaaaaagggcgaggccgtaaaggaaatttcaaaaatgtttaatgttcccattgagaatatttgcgccattggggattattataacgacgtcaccatgcttgaagcggcggggtgctcctgtgccgtttcgggtgcgcccgacgaaataaaagacattgccgactatatttcctgcagctgtgaagacggcgccgttgccgatttcatcagctacatcgaaagtgtgcaaataaataagagataggagtgcagaattttggacaacaatgaaaaaagaaagctccaaataacggcttgcaagatcagaatgggtattatcgagggagtgtataacgcaaagtccggtcatcccggcggttctctttcgattgccgatgtgcttgcatatctttattttaaggaaatgaaaatcgaccccgcaaatcccaagtgggaggacagagaccgccttgtgctgtccaagggtcacacggctccgggactttattcggctttggccaaccgaggatatttccccgttgagtatctcaagactctgagaaaaaccgattcgttccttgaaggacatcccgatatgaagggaactcccggtgtggatatgagctcgggctctctcggtcagggtatttcggttgcctgcggaatggctcttgcctcaaagcttgacggcgaccgtttccgcgtctattcaattctcggcgacggcgagcttgaggaaggacaggtttgggaggcggccatgtttgcctctcataaaaagctcgacaccctcacggcgattgtggataacaacaatctccaaatagacggtgagcttgacaatgttaattcgccctatcccattccagaaaaatttaaagcctttaattggcatgttatcgaaatcgacggcaacgactttgaccaaatcgaatcggcttttgaagaggcaagaaataccaaggaacagcccaccgccattatcatgaaaacaactaaaggcaagggcgtttcctttatggaaaataaagcgtcgtggcacggagccgccccc

SEQ ID NO: 4139 - DNA, 3569 bp, Unknown
  16S sequences of unknown bacteria
tttataatgtagccgtaaggagccgcgcagagccattccccgtccgcctgacgtctctttatgacgttgcgcaccttttttgacgtgtcggtgacgggcatttcgttgatgacaaactggaactgaattttcagccagtcgtcgtcgttcggaaagtcgatgtagtccccgatggaaataatacggactcccgcgtcgcgcaaatcctcaagctccaccagtcctcgtgagttgcggcgtgagaatcgtgagaagtccttgatgacgagaatgtcatacttgtgactcatcagccctcggcgcatttcctgatagccttcacgctgttcaaaagtatagccggagcggtcgcgatcctcgaaaaatgtcagcgtactgccgggaaaacgggtgttgacgtaatcctcgatgatggctttttggttctctatggaaatgtttttctgattcttttcatcatccacggaaatacggacgtaacccgctatgtcaaaggtttctgtcatgacgacgtacctccttcattgtttcattaatatctgtcttttgtgttcgtacttacagatatcattgtaacatattattttgaacatatcaagtggcgcatgataacaaatgcaaaagaaaagacgggaaaacgctccatcccgccgctgttatcctgtgtttatcgctgtgcgctgtttttcacgattaacttctatctctgcgcatcgctttttgttgtatgaaagcagttctaaagtcgactgatagagatcgccttcgcctgactcaaaaaccgcaaccatatattttttcttcttgtattcggcatataagcgtttcagtccatcacgcagagacgtatcttttttctccgcattgcttaaccaaacctcaacaagatgtttatcgtccctgacgtgtatctccaaaaccgatcacactcctttgcttaggaagcctctgatttatggtaatttttgcgaaaaaagcccctatatcttagccttttatcgcaaaaatctgatttattcagagtatccttgaattattttccacagttttttccgatttattcagttgcggcggataaatcaaatcatgatacctctttagcatgacgcaaagctgctcccgtgtcaccggactgtggagcattagattccctcgttcgtctccctttaggataccgttccgcaatgcccagtttacttcgttttttgaccagtcagcagccttattgtcaagcggcgtttctgttagtgcatctgtgacttcctttgccaagcattcaagcctttcatacatccagtcgccggggcagctcttgttcgcaaaccatctgtgaacggtcagcaccatctcatcggatttcggggtgtagttgagcgttttggacttatcgccgagccataatagctttgtcttgccgttgcgcttgcagatgtcgatacaaagccccacgagcctgttgtaaacagcatcattgaatgcatacggctcagtgtcgtcagacgcgcattcgatcgttaccgcacgttggtcattggcttcgtctgaggaacaccacgagcggttcttttcctcaacatacatcccgactctgccgtccacgccaatgccgtagttggagcttgctttcctcgatgtcggaagaaatatatctcccagagcttcaacggtgcattgaccgacaacacagtgcggcgtgattcggtcgatttcatgtgtcctctgcccggagtggttcgggctgaatcttgtatatctgacaagcggactattactcatttctcgctgtcctctttctcaccgcgttcatgaagctgctccaatacatccttcagcttctgcggaacaggaagtccgagatgaaccgcgttctcaataagtgaaacgccctcatttgaaatgtagaaaaagatgaccgctgttctcattacggagccgttgccgacgacctgtgtatcaagaatatgtcctaccccaaccagcgcaaaaataagcaccttgcggcagatacctttgaagcctatagcggacgacagggatttatccgcaatcgcgcacatgacaccggtaatgtagtcgatgaccacaaaggcaatcaaagcatacataaacccgtccgctcctccgaaaaaccaaccgcaaaagccgcctgcagcagcgagagtaaactgaatagtattccaaatctgtttcatgctgtctcctttcattctgtaaaacagataaacggcgtaagcgcgtcaatgtcatgcacggacagccgcaagtcttccgtgacgggaatttctaaagtctgatattctgcttcaacttccatgtcgagaagcgcttcaagttcgagcgatgcttttttatctccctcattatcaaacgcgaatgttccgtctttttgcgccgttccgtatttttcaaagattttctgtctctgctcaataaaaaagtccacgtctttttgtaacatggaaacgagattttttaacttgtacgctaagcgaagttcaagatctcccgccgacagcttaccgagtgcgggtgctgccagtacaattgtttttagctgcataaatcctccgttaagttcctataagtccatacttcacgagtatgccgactaagttgttcagtattttcagatagtttgatgcggtcgccgtagagtatcccatattttgcgaggtagagctgagtgtctgacggacaatgggcgttccgacaaagaagcctattctggaatttaccgtagagccgagttttacggtgtttgaaccgatatacgcatagtgccaatagtcggtcagcgttccgagatagaatggatttgcggttgaagaactgttggggcgaagctctcttgatttggtcgctgttacgtaataataagaagaaccgcccattttgacttctttaccggacatatccgttccgattgaagtgggatcgaatttcgtgccgttcaggtaaaggttggtgatgtacgcgtattgccaagggtatgtagaactgccaagataataacccgttcctgacggaataaactgttttgatgcgttaagggacgcgtaaatcaaagaggaatacgatattttgcttgtgtctaccgtctgcggagtgaattccgttccgttcaggtacagttttgtgatatacgcttttttccacggatatgacgatgagccgagagtgaaatcataagtcacagtggacggaacaaacgcatatgacgaattgagttcggcataataggtcgtagttcccgcgtacagctttgaaattttgctctcaccgccgattgcaactccgttgacgcataatgatgccccgtcggcagtcagatagcaattcttgccgagatacagttttttgataaatccttcggaaaagggatatgtatcagagccgcaattcccggttccgtttctacataaaacgtcttcaatatacagagttccaaaaccgtaaaggacattgccgagattccagaaacggtcggcattcggtcgcaaacaacggcttccgatgtccatcacgagcatggatgtgctgccggaactgaattgcttaaactgtatcgt

SEQ ID NO: 4140 - DNA, 9214 bp, Unknown
  16S sequences of unknown bacteria
aaggaggggcccgcttgcgggaagattccttgtgatcctacaagtagcgaagctaggccctggcagcagagctgcagggatggattgcgaatatctgctttgattcgaatcaagcaagccactcttcttttaacccgacaaaatttgcttgaaatatgtctggaaaaagggtaagatggacaaggatgtagaaaatcaagtgaaacaggagaaaaatgctatggaaccaattatccgagtggaacatttgtgtaaaacgtttgatgtcagggataataccgtgcatgcggcaaaggacatcagctttgacatcgaacgcggagatatttttggaattattggtctgtcgggcgcaggcaagagtacactggtgcgctgcctgaacctattggagaagccgacctccggcaaggtgcttgtggatggaaaagacctgatgacactttccggtaaggagctgcgactgatgcggcgtgatatcggcatgatctttcagcatttcaatctgctcatgcagaaaagcgtgctggataatgtctgctttccgctgaagatcaatggagtcaagggagaaaaagcaaaaaagcgggctatggagcttttggagacggtaggacttgcagataaggcacatgcttatccggctcagctttccggagggcagaagcagcgtgtggcgatcgcgcgtgtgcttgcaaacaatcctaaaatcctgctctgcgatgaggcgacctctgcgctggatccccagacgacgaaatcaattctgagcctgctaaaggagatcaatgaaacatatgggattacaatcgttgtgattacacatgagatgagtgtcgtgcaggagatctgccgtcatgtggctgtgctggatcacggtgagctcgcggagtccggtaccgtacaggagctgttccgcgcaccgaagacggatgcggcaaagaaactgatcctgaccggtacggagcagatcgaacggatgcacggggaatatctgatccgtgtgaccttcggcggtcagtcttcctttgagccggtgatcggaaatctcgtgctggagtacaagacgccggtcaatattctgtatgcagatacgaaaaatatcgatggaaatgcagaaggagagatgattctgcagcttccggaggtaaaggagacagcagagcgtatgattaaagatctgaaagcaaaaaatctgggagtggaggtgctggatcattatgtgggatagttctatgaccattatgttgctggaaggcacaagagatacgttatatatgacattgctggcaactttttttggatatgtattcggactgccgatgggtattgcgctgatggtgacagcgaaggacggcattcagccgagttccaggggcggacagcgtgtgtatgcagtcatttataagattctggatgtaatcgtgaatatcacgcgaagcatcccgtttttgattcttctgattctggttattccgctgacaaagctgattgtcgggaagagttacggatcggcagcaacgattgttccgcttacgattgcggcggctccgtttattgcacgtatggtagagtcatcattaaaagaagtagaccggggtgtgatcgaggcagcacagtcaatgggtgcgagcacgggaagaatcatctggagtgtactgcttgtggaggcgcgtacatccctgctcgtcggcgtgacgattgcaatcggtacgattctcgggtactcggcgatggcgggagcagtcggcggaggcggactcggtgacatcgcaatccggtacggttactatcggtatcagaccgatgtcatgctggtaacgattgtgattctggtattgctggtacagattttgcagagtattggtatgatgctttcgaagaagctggacaggagacgctaaggaaaagaaaggaagacggaaaagatgaagaccgagagagtagcacgggtacttgcagagatgaagaagctgggactttcccagatgattattacggatccgacatcaatcagctatcttgcagtgcattatgagaatccgatcgaacgtttttgggcgttgtatctgagagaggacgggcagcataagctggtggcgaaccgtctctttacattaaatgatgtatcaggtgtagatatcctctggtacacggattcggaggacgggacggcagtgctgaacccgtatattgatcattcggcagtgcttggtattgataaagtcatgtcagcgaaatttttgatccggctgatggagcagggcgcggcagcgaagtatgtaaacggttccgactgtgtagacaatatccgttccagaaaggatgcggaggagcaggaaaagatgcgcgaggcatcacggatcaatgatgcagcgatggcgaagttcaaagagctggtacatgaagggatgacggagctgcagattgcagatcagatggaagcgatctataaatcacttggtgcggaaggatactcctttgatccgcttgtcggtttcggtggaaatgcggcaaatggacatcatgagccggatgcgacggttctgaagaaaggagactgcgtactctttgatgtgggatgtaagaaggatggctattgctctgatatgacacggacctttttcttcggagaggtaagtgaggagcatcggaaggtctatgagactgtgctgcgtgcgcaggaggcggcagagcgtgcaattcatccgggtgtgaagctctccgagatcgaccgtgtagcccggagcattatcgaggaggccggctatggtccgtatttcacacaccggctcggccatttcatcggcgcggaagtgcatgagaagggtgatgtgtctgaggcgagtgagatcattgcacagcccggcatgaccttttccattgagccgggtatctatctgccgggcgatgtgggtgtgcggatcgaggatctggtgcttgtgacggagaatggtgtggagattctgaaccattatccgaagacgctgcaggtaatagaataggcattgcttacttatgagtgcttatctgcggtaaagcggacattcgcaatccatccctgcagctctgctgacagggtctagcttcgctacttgctcatgaacgcagtcgcttcgcgatctgcgttcaaataccagatcgcaagctgtgtgcgatcacgtaagtttaacttatttagaatggtgctcaggtaattgcgtaccgttccttcgccgaagcagagcgcttcggcgatttccttgttagagagaccgtctgcgacgagccggatgatgtcgacttctttttctgaaaggtcgaatttccggaaatcgacggtcttttttttctgcagcagatccggcagcctttgaacgatctcatcaccgaaaaccgtctgtccgtcatagacggcccggatggcaggggtgatgtgtgcatagtcctgttttaataaatagccctttgtgccgatgcggagcgcctttacgatgtattcgtcatcggaaaatgttgtgagcagtaaaatacgggcggaaggatgcttttgcaggatctgctgtgccgcatccaacccgctcatatccttcatccggatgtcgagcagcagcagatccggtcgatgaatatcataaagcataattgcctccgcaccggaggtgccggtcgcaatgacgtggagctccggatcagcctctaaaatgattttcagtgcagtagtgacaagcagatcatcgtcaataagaatcaggttcatggaagctcctttctttattgcttcgggatggtaatatgtatccgataaccgtgttcattctgaatttgcagataaccgttccatgcggcaacgcgggtatatatattggaaagaccgatgccgtcggaagaggtgtgtggtgcatttatatcggcaattggcggcaccttaccgccaattccattatcttctatgataaactggtaaaagcccggatgttcaatcgcagtgatggcagcctgggtcgcatgactgtgtctggcgatgttgacgagtgcttcacgtgcaatagatatcaggctgtagcggagctcgcgggggatgtccggctgcatggcatattgcagcgagaccggacagtaagtgaagtcgcggatcagcagctccagcgattccttcaggtctgcggagctgtcatgcagatcgtggacgctttgtcggatgctgttcatcgcctgatccagtgtgtcatttaaaagagaaagtgacacagcgaggtcaggctccgggtgtgtcgtgcgcagagcaccgaccatgagaatcgcgcgtgtcagcatatgtccgacgttatcatggatctcccgggcgatccggttgcgctcgcgcaaggtagcagtataaatttctgtattctgcttttccagtaaagagcggttgcgttcttctaaaagcagctgcagttccgtatcatcgtcacgggtccgacggtatttttgaagcagtacggtctcccgattgctgcgcaggcagagcaatgcggccagagcgcagccgaacagcaggaaaacgatctgtggaaaggtcagaaaaatgaggagccgcaccagcagcatgccaaggcatccgaatgtaatatacaacagaatgaccggtgaagaggggacagaagaaacggccaatattgggtattccggctgaaataacgggtggcgccagaaaaagatacggaaaaggtcatagattggaagcatgagaaaacgggcagaatccggaaataccagcatggagatgagatagagcatgcaaaagccaacctgcctcttctgctcagtcacacagcagctaaaagagccatagcagatggctataaaaaagcaaaggacaaaggaggcattgacgggcagggtaaagagcgggaacagaccgtacagcaaaagaaatgttttgtctataatgatactcataatatcctcccgaaagcctgcctgataagtgaatgtttcctttatcgtagcatatctgcggccggaaagcaatgtgacatttgtcattgcaggtgctgacatctgacacttaaaaagtgtatacagcaggcgtataataataacaggagctatcgtggaaggtggcagctggcagggaataacaaaaacagtgaggccgcatacagagagctcatggatcaaaggaaaagaaacagggaggaagcgtatggtaaggactatagtgaaaatagaaaatcttgtgaagcgttatggcagtctggtagcgctggatcatctgaatctggaagtaaaggaaggggaaattctcggactgctcggtccaaacggatccgggaagacgacagcgctcaactgccttctggcacttttaaaatatgataagggaacgatcacggtatttaacaaagagatgcatccgaccagctatgcgttgaagcgtgagatcggcgtggtgccacagaatatcgctgtatttgaaaaaatgaccgtgcaggagaatatagattatttttgcgggctgtatgtaacggataaacagagacgaagggcgctgacagaagaggcacttacgtttgcagggcttacggaatatcggaagatgcttccgaaaaagctgtcgggcggattgctgcgtcggctgaatattgcctgcggaatcgtacatcagccaaagctgattttgatggatgaaccgactgtggccgtcgatcctcagagccggaaccggattctggaggggattttggagctgaaccggaagggctccacgatcatttacacatcgcattatatggaagaggtcgagcagatctgtacgcgcattgtcattatggatcatggaaggagcatcgcttccgggacaacggaggagctaaaaaggatgctccggacagcagagaccattcatatagaaggaattgctttgcaggagagccagctgcagcatatccgtgagctgcctcatgtatttgaggctgagtatgaccagagtcagtgcctgctgacggtaaaatgtacgagtgcagagcacaatctggtgcggctgctgaattatctgcaggggcaacaggtggcattccatcaggtctattcgcagcttccgacattaaacgatgtttttctggagattacaggaaaagagctgcgggattaaggagggagtatgggctggctttatcgatttcatttaaaaagagcactgagagaccgcggagatatgttctggtcgctgatttttccgctcgttctggcaactttgttttatgcttccttcggatctggcaaagatctggagcagatgagcacgatcccgatcggggtagtgaaaatggcagatgcggatacgagctttgatacgtttttggattctttaaatggcggacttctgacgctgacggaaatgaaagaagaggaagcggaagcggcattgcgcgacagaacgatccgggggtattttatttccacggcagagccatccctgacggtggcaggtacagatctggaggaaagcattttaggcgcactgctcgatggatatctgcagaatgcagagctgcttcgacgggttgctgaaaaaaatcctctgctgcttccggctgcgattgcagaagtatcgaagagtggaagctgggtgcagtctgcgactgtaacgggcaatgagacgaacaacaatttgagttatttctttgcactgatcggaatggcatgtctttttggagcatttttgggaatgaacgcggcgcaaagccttcgggcagatcagacagcgcttgcgttgcggcagagtacagcgccaacagggcggagccggatcgtgtttgcagagatgctcgcagtattcacaattcagtttggtaatgtttgcgtattgctttgttatcttcattttatattacacatttcatttggagagcggtggtggctgttgctgccgatctgtctgctcgggagcatcacaggagtggcctgggggatatttctcggaagcctgcgactggcagttggtctgcgggaagggcttctggtgggaagttctctgctgatgagctttctggccggactgatgtttggcaatatgaaggatataatcgcacactatgcaccaattctgaataaagtcaatccggcggcgctcatttccgatgcattttacagcatatcggtctatgagaatccggcgcggtatttggaaaatctgctgctgctcgcactgattacggcagcgctgacgggagtgagcttcatacagcttgggagggatcgctatgacagtctttaaaggatatctgcgtattgtacgcgcaaatctcggacagcttctgatgtatgttggcatttttctggcgatctgtgtcgctatttcgcgatcaaatccgggcggaacgacggagagttttacgcagaaaaagctgaacgcagcagtaattgaccgggatggtggaagccttggcactctgcttgagcattacatcgggcaggagcacaaccggatttcgattgcggacgatccgcaggtactgcaggaggagctgtattatcggaatgtggagtacatactggttattccaaaaggtgcgcaggaacggatgctcgccggggagacggatggcgttgtacagtgtgtgacagcgccgggatcgactgccggctattatgtggatgcacagatcgggcaactgttaagtcatgtacatattttactggcaggcggcttttcgatggaggaagcctgcgaacaggcagatatcttaagtcaggaaaaaggaagaataaatctggcagaggcaagcgaaagcggcagtgcccgtaccggatacaatttcttttatgcatatctgccttatgcattgtttggctccatcatcatgacactcggcatcgtgattatggaatttaagaaaaaagagatccgccgcaggatgcagagtgctccgattccatttgtccggcagaacctggcgggcgctgcggcattgctggtggtctgcaccggaatatgggtattttatctgctgctgcaggctgtgatctatcagggtggaattttcaggagcggacatgcagcgatttacatgctcaacagcttttcctgtatgctggttgctctggcacttggatattttaccgggatgatctctgaaaatgcagtggcgctgaatggcatcaataatgtattgtcacttggcttgtgtttcctgggcggtgtatttgttccgctggagatgctcggaaatggaattgtgagcattgctcaattcctgccgacgtactggtattccagaattaacgggattttaagagactatggagaattgagcagcgagctgtggcacaccatatgggcgggactcctcattcagctggcatttgcactggcatgctttggagtgacaatgatgctgcgcaggggacagctgcaggagcgaggataaggcggatgacaatgttctgagcatgctcacttgacagttcttaggatatgtgttatgttcttaccggattttatcggatgcttatagaaatatggcatctgaaagcaaaaatcaggtaggagtgatagtatggcagataaaaagataagcggcacgcatcggccccatcgtctgacctcacaggaacattattctgatgcatttctgacaagcgcgttcctggcgctttcaggaggactgcaagatgcttatacttataatacgagggatggagttttttccaatgcccagacaggcaatgtcgtgctcatgagccagcatctcatgcgaggggaatggggggcatgtatgcggtatttcgtgccggtcattgcgtttgcgcttggcgtctttttagcagagcgaatctgccaccgctataaatatgcacagaaaatacactggagacagctcattctgtcgatagagatcgtgattttgtttgcagtgggtttcattccgcagcagtttaatatggcagcggtgcttgtttcattaacctgtgcgatgcaggtacagacgtttcgaaaagtcggcggcttctcctatgcgagcacgatgtgcatcggcaacctgagaagcggcacagacgcactttccgtctacgcccgtgagcacaagccggagcagctgcggcaggcactgtattactttggcgtcattttcatgtttgcgatcggtgccgggatcggcggcaatcttttcgcctggtatggcatccgggggatctgggtatcgtgtattttgctggcggtgagctatttgctgatggaaataga

SEQ ID NO: 4141 - DNA, 7166 bp, Unknown
  16S sequences of unknown bacteria
ggggagccgatatggcagtggtagcccgagagctcgatgccgggcaggctcagcgcgtacttggtggcagcctcggcagcgccgttgcggatgttgaagccgaacttggagtcctcgttggccgtctggatgtaggcgtgcgtgtcggcctcgatgcccgggcagatgcgcaggatgacccgctgctcgatgccgtgggccaccgcctccttggagatgcggtcgagctcctcatgggtgtcaacgacgaagcacgcaacgcccgcctcgatgcactcgtggatctcgcgctcggtcttgttgttgccctgcgcgaagacacggtccatcgggaagcccgctgccttcgcgaacgccagctcgccgccactcgcgacgtcgatgccgacgccctcttcggcgacgatcttgtcggtggcgaccgagcagaacgccttcgccgcatagatgatggtgctctgcgggtagcagaccttgaactcgttcacgtaggagcgcagctggcggcggatgtggttctcgtcgtacacgtacagggccgtgccgtactcgcgcgcgatgtcgagcaggtcgaccccgccgatcgtgaccttgttgcccttgacctccatggtcgtgggagcgactttgagcagcttgtccgcggtcaggtaatctggctccagatgcgggcgtttgggtgcgatggacatatgactttcctaaccctcgagactacattttctccggtgcgctcacgccgagcaggccgagcgcgtttctgagcacgcgtcgcgtcgcgtctgcggcgaacaggcgtgcagctgtgagcacatcgtcgtcggtgagcacgtggcactgggtgtagaactggtggaacgtgctcgcaaggtcctgcgcgtaatgcgtgatgcggaacggcgcgaggtcgcgtgcgcaacctgccgcaagctccgggaactcgtcgatctttcgcgccagcgcgagctccgcgtcgtcgacgagcgccgagaggtcggcatcgcgcgcgatgagcgcctcggcgagcgcatcgggaccctgctcttcggagataccgcgtgccgcggcggccttgcgcagcagcgagcagatgcgcgcatgcgcgtactgcacgtagtaaaccggattggaggagtcctgctttttcgccaaggcgatgtcgaagtcgatggtctggtcggtcgagcgcgagagcatcaggtagcgtgtcgcgtcgacgccgacctcgtcgatgagctcctcgaacgtgaccatctcgccggttcgcttggacatgcggaccgccacgccgtccctgaacaggttgaccatctggccgatgacgacttcgggctggcccgggtggccgaacacgtggccgaccgactgaatgcgcttgatgtagccgtggtggtcggcgccgaggatgtcgatgcaacggtcgaagccgcggtcgagcttgttcttatggtaggcgatatcgggcgcgaagtaggtgtaggatccgtcggccttgacgaggacgcggtccttgtcgtcaccgaaatcggtcgtcctgaaccagacggcaccttccttctcgtacaggtagccgccctcgcgcagcgcgtcgagcgcgcgcgagagacgggagctgccgtcggcatccttagcgtacgtggtgcgctcggaataccagacgtcgaaatcgaggccgaagctgtggagcagcgccttcacgtggtcaagcaccgcggtgtaggcgacctccttgaagtgcgcgtcgcgcgcggcctcgtcggcctcgacccaggcatccccctcggaatcgaagatgcgggccgcgatatcgacgatgtaggcgcctgcatagcagttttccggcagctcggcgcggtagctgtccatgttcgtgacgatctcgtcgtgcgcctgggcaaggctgctgccggcggcgacgagacgcgcgacctgcaggtagcggtgcgagacggagtcggcgaagacgttcatctggttgccggcgtcgttgatgtagaactcgcgcgtaacgtcatagccggcaaacgagagcacgttggccatcgcgtctccaagcgccgcccaacgcccgtgcccgaggtgcatgggcccggtcgggttcgcggagatgaactcgaggtcaaccttcacgccatcgcccgcatgcgtcctgccgtacgcggcgtcttgggcgcggacctccttgaacacgtcttgcagggcggaatcggcgagcttgacgttgatgaagccggggccggcgacctcgatgcgctcgactgcggggctttccatgtggctggcgatgatctcggcgatctgtcgggggttcatgtgcgcctgcttggcgagcttcaaggcgacggaggttgcccagtcgccgtgctcgaggtcacgcggacgctcgacgctcggggcgggcagttcggacagggcaagctctccgctttgaacggcttggctcaaggctgaggtgacgaggtcttctaccagtttgcgcacggttggaaaagtcctttcgtatgaagatacaagtacgccccattctacacggacagcgccacgcatgacatgccaaactcggcaagttgcgcacgcgaaagacggctagcccttcgatgcgagggcgttgtgctccgtgagatagccgatgctcgcctccatggcggtcttggtcacctggcccgtcccgaacgagcgcttggcatagcagcgcagcgtgcacgagatgccgaacggctcggtgccgttgaccgtgaacacgggcggtttgccctcgtactgcatgccctctgcgacgagagccttggagacgacgcccggaagctccgcatctaccgcggcgatgtcgcaatggctgtcgagcacgagcggcaacgcaacggagaagtacttcgtgagaacggtcaccgtggaggtggtgagcgtggagtttgggatgttgtggaggtttcccagctcgtcttggacgagcatcttgcgccaggtgatgtccttcacttccccttcgatgccgccgacgaccacccagtcgccgacggtcgtgtccttggagagcgtgatcagaagaccgccgatgagattgctgatcgtcgattgcgcgcccagggacagcgcgatgcctccgacgcccagagcgccccacagcggagtcgggtcgatgcccaggcacaatctgagcacgagtgcgatcgcgatgacccagatggtgacgcgcaggatgttgttgaggatggagccggcgacgcgcccatcgcttgcggcgaggatgatcttgctcacgaacctgacgagcacatgagtgaggacggcggcagctccgatgaggaaagccgccccgacgatgacgccgagccagccccaggtgaggtacaagacggtagattcgatattcaaggcacgcacctatagaagcaaaaggcgcggttccgacgacgtgccgccgaaaccgcgcagacgtaaacgaacgagacgacttagctggtgaactcgatgagcttggcagcgacctgcttcttgcgcgagagcacgccgggcatccagacggggccttcggcaaacgagatgccgaacgcgtcttcgataaacttgatgtcacccgcgccgatgaagtcggagccttcctggatgatgtcggtgagcagcatgagcgcggcatcatagccgccatctgcctgcaccttctcgacctggccggcaatctctgccgtgcgggagcgcagcccctcgaggtcgacggtctcgtactgggcgatccagaccttcttgcccccgaaattgaactccttggagtcgcggctgcagatctcctcgacggtgacgtcgtcgtctccgccgcgggacttgaacagcttcatgccgaactccacgggatcgacgccgacgatggcgctcaggcgctcgacgatggcgcggtcttcctcggtggcggtgggcgacttcaggatgaccgtgtcggtgagcacggcggcgagcaggcgcgcggccgcgtccttctcgatttcgattccgtagtagtcgaagatcttcgtgatgatggagcaggtcgagccaagcggcaggttgatgaacgtgatcggcgcggcggtgctcacgtcggcgatgcgatggtggtcgacgatctcgactacctccgccttgtcgatgcccgcgaccgcctgtccaagctcgttgtggtcggtcaggataatcttctgcccctcgtcgacatggtcgatgagctcgggggcctcgacgccgaactcggtaaagacgagctcggactcggcgggcagcgggcccaggcgaaccgccttgtagtggttgtcgccgtcgagcttgttcttgagatctgccagcacggatgcggacatgatcgcgtcgttatccgggttgcgatgccccacgacaaagatttcagccattaaaatcctcctagacttaggttagcagcgcagattataccgcgcatgcacgcactttctcgcgccgtaacgcgcccaatggacacgagttgctacttgttctgatcgagcttgacgattggcgcatagcccttcaggagcttcttcgtcttgccggacttcgagaagcggatggtcatcttgtcgccgtcgatggcgaggatctgcccgattccgaaggtcttgtggtcgaccttgtcgcccacggcgaagacgtcgctttcggcggcctgcttgaaacgcggccccgagctcttctccttgtccgcgcccttgccgtacacatgcccgccgtacatttcctgaccgcggccggaacccgagatgccacggcggtcgccgcgcttctcccagccggtgccggacatcccgagcgagccgatgccctcatgcttgaggagctccttgggcatctcgttgatgaacctgctgcgggcgtttgcctgggtgtcgttgaagatgcggcgcgtctgcgcgtacgtgagaaacaggcgcttgcgggcgcgcgtgatggcgacgtacgccaggcggcgctcctcctccaccccgttttccatgatggcgctgcggtgggggaagatgctctcctccatgccggcgacaaagaccgtgtcgaattcgaggcccttcgcagagtgcaccgtcatgaacgtgacggtctcgtccgcatcgtcgcccagcgtgtcaaggtcggtacgcagcgagagccattccatgaagtcggacagcgtcgggacgtggaaccccttcgggattgagccgtcctcccctatgacggggtcgtcttcgagggcgccgaggtctgcctgaaccgcgtcggcctggatctgctcgagcgtctcgcggtcggcgatgagctcgtgcgtgctcacgaattcgtgcacgacgcccatgaattctcggatgttttccgccctcgtttgggcctcctcggtgtgctgcgcctcgagcgatgagatgaggccgcttttctccacgatcatctcgacgacggacgaaaggtcgccgcggtaggtggcaacctcgtctacgagctcgacgaaggcggcaagcgccctgcgcgtgccggcgcggcagcccgggtcgagcgactcctcgcgcgccgcctcgaaaaacgggatctggcgcagcgcggccgtctgcgcgatgcgatcgatggtcgtcttgccgatgccgcgcctgggcgtgttgatgaccctcgtgcagctgacgtcgtccgaggggttgacggcgagcttgaggtacgcggtcacgtccctgatctcagcgcggtcgaagaacctcgtgcccccgacgatgcggtagggcacgcccgcgcgcaggaacatgtcctcgagggtacgcgactgcgcgttggtccggtagaacaccgccatctcgtcataggactcgcccgcgtcgtgcagcttctcgatctgagacgcgatccatcgcccctcgtcgcgctcgtctgccgccaggaacacggcgaccttgtcgccgtcgggggcgtcggtgaacaggtgcttggacttgcgcgagcgattgttcgcgatgacggcgttggccgcgttgaggatattgcccgtcgagcggtagttctgctcgagcttgaccgtcttcgtctcgggccagtcgcgctcgaagtcgaggatgttgcggatgtcggcaccgcgccacgagtagatggactggtcgtcgtcgccgacgaccatgaggtttccgttgccgcgcgcgagcatcttcgtgatctcgtactgtgccttgttggtgtcttggtactcgtcgaccaggatgtacctgaaacggcgcccgtactcgtcgcgcacgtcggtgttgtcactgagcaggatgtacgtgtagaagagcaggtcgtcgaagtcgagcgcgttggcccgcagcagccgctgctggtaggtcctgtagatgcgggcgacggccttgtccgcggggtcgccgacgcgcggcacgtagccgtcggggccgacgagctcgtttttggccgcggagatacgcgagcgcatggtgttctccgaaagcgtcttcgtgttgtacccgctgtcggacatgatggatttgatcaggcgcttggagtcgtcggtgtcgtagatcgtgaagttttccgtgaaccccagccggtcggcatctgccctgagcatgcgcacgcacatgctgtggaacgtgtagatccacatgccgcggatgccggattgcatgagcttgtgcagcctctcgcgcatctcggtcgcggccttgttcgtgaacgtgaccgccaggatgttccagggtgcgacgcccaggtcttcgacgaggtgcgcgatacggtacgtgagcacgcgcgtcttgccggatccggcacccgccaacacgagcaggggcccttcggtcgtctccactgcctctctttgcgcagggttgagtgattcgaggtcgagcatgaaatccaatctgatagtggtgtgccggtacgagatgagcgaggcgctacgcggatgggacctccttcatgaccttgaggatcgtcccgtagatttcgtcgaggtcccccgcgcgcagcgggccctcgccaagcgcatgcaggcgctgcttgatctggtcttcacgggcggggtcgaacacctgcatgccgcatgtcggcttcaaggcccggatggcgagcgagtggcgtgcccgctcgttgagcagggcgacgagctgctcgtcgagcgcgtcgattgcccgccggtgctcggcgatctgccgctgggcccgtgatgaacttgtcct

SEQ ID NO: 4142 - DNA, 3745 bp, Unknown
  16S sequences of unknown bacteria
ggtctggaggtattggttggccttttccggcggaattgtgccgtcgaggatgccgtcggtataacctccaatggtggtcatgggggtctttaattcgtgggagacattggcgataaattcccggcgctgcaactcagtgcgctgcagggaatcggccatggcgttgaaggaatcggccagttcgtcgatctcgtcgatgctgccggatttgaccacgcgctggtcaaaattgccgccggcaaaacggcgggccgccttggcgatgtcttgcaggggcttggtctgctgggcagttaccatggagcacgccaccactgcagtcagaagcaccgtcagtgcggtgaagaaaaagatccccgcaaaagcgcgccacatttccgtcagatctgtggaatccgacaccatagcaacaatgccggtgatctctccgtcgtattggttcaccaccggcatacaaataatgaactcccgatggtggtatagattgccaagatccgtcataccagagtatgtgccgttggtgagcacctcgtatacgatagattcgggcagggacacgctttttcccaccaggtgctcgtcggaagaaagcagcacggtgccgtcggtctggcagattaatacatcatcgccggacagatcggcaagatatgaggcgagctgacggaaattcagcgtaccgtagccggtaatgtcgcctccggcaaaataggcacgggacaattccgaaatcatggctacgtcttttttcatggtgctgcgcttttcgctcagggaataattatagctcagagctaaaaaggataccgccagaacggtcattgccagggccaccatacctgcggtcagcaagaactggtgccagtaaagactttttgagcgcaaagaggaatcacgcctttctccggttggtttttcctttctgcgcgcaacgcggaaagaaaacggccaagtgactgttctggccatgacgcaaggtgccaggcatggctgggcagattgcgtgccgatgccatcgactggaacagtaatcgtttatttggaggcttcggcgccgtcggccagttcaaacttgtatcccacgccccagacggttttcagcgtccattggttgctgacgccctccagtttttcgcgcaggcgcttgatgtgcacatctaccgtgcgggagtcgccgaaataatcaaagccccacacttcatccagcagctggttacgggtatagacccggttgggggactcggccatgtggtaaagcagttccaattctttggggggcgtgtcgatcttttgtccatccaccagcaattcataggaatccagatcaatgaccagtttgtcgaaggtcagttttttgcgggtgtcggtgggcagctccgtgcggcggagcaccgcgttgatccgggccagcagctctttcatttcgaagggttttaccacatagtcgtcagcacccatgttgaggccgttgattttgtcgaaagtttcccccttggctgtgagcataattaccggtacgcgggaggcttcccgcacgcggctgagcacgctccagccgtcgagcacgggcagcatcacgtccaggaggatcagatccggcgcggccttggcaaactcttgcagcgctgtgccgccgtcgggggcaatacgaacgctgaacccctccttttcgagatacatccgcagcagatctgcaatgttatggtcatcctccacgacaagaacgcttcgcgccatgtgccaacacttcctttttgtgcgccgcgctttttgtcgggcggcggtcattcattctgtttcgcttctattataatgggtttggtttgattttcttgaacattttgtaaatttgcgttggttttctgtttcagctgcaggccgtttcggtaactgcgcgaacggtgtagccaccgctgctccaagtgctgcacagaaggttcaaggcggaagcgctgatgttgtcgccgtccatcaaaagctttaccgagccggaggcgttttcgatgcgccgggtgatgcgctgcgcccggctggaggcggtggtgcccagggactggccggacagggaaggggtatagacggcatagcccgccgagtgtactgcatcggcagaatccgtcagcaccatgcgcgtcacggtgccagtgcagcggcgcagctgttcgttgccggcttgcagcccggccatgtccgcatcgttgagtgccagcgccaaccgatggccggaggcgacgattcgccgcagtaagtcgtcctgtccgtccagctctgccggagagaagaaaaaggtggctttgtagccgtagtgatccagggtgttcaggatggcggcggtgttctgcgggttgtcggcgcggatgcccagcaggatgcgggccgtggttttggagggctcttcttccgtttcctgcggaggatccggcgcgatgggatcggtggtggtctcgttgtcaggctttggcgtgggggtgggctttttgctctgttcataggcgttgtaacgggaggccatcagtgtggaggccgcgtcgatgaactggctgtcagagagaacggccgtgtcgctgcgcacccgaaccatgggggccagagctgtgtcgagcaccgaataattcaaagaaaaaaagctgctgacaaaggaaagcgggaagtaaacggagccgtggcgcgcaatagcgctggcgctgtagtaagtgccgagcttgttattggcgccgccccgggccaggtcaaactccagcactttgttgctgctgtacagaatcgcggtttgggccgaagtatcacggacgtaggaaagccccaggtcatatgaggagaatacgctgctgggcaaatagaggtttccgccagaccaaaaaggcatggtgctgtcgtttagggggcagaggctatcgttgactgcggtaaaataaacgttgccggctgccagagggcgcgcggccagaagcggcgcgcccagcgaaagcgaaagcgccagtgccagcaatatgctccaaatgcgccgtttcacaatagatccctcccccttctatcctttccgctattttagcatattagttgtcgcttgccaaggttttcggggtgtatggggcgacagtgacgccggtataataccactccagaatttccagataagttttcccctgctgggccatggtattggcgccgtactgactcatgccgacgccgtgaccgtagccggtcacatgaaatacaatgttcccgtcctcggctgctacagtgaaagcggcgctgcgcagcgcgaacaggctgcgcacctgggtgccttttacggtgacgccgccaatggagatggaaagcaccatgtcggaatcgttgcgtgtgggggcgccgaaccaggtattggtacttccggaaaagtccgcctcagggaactgggacaagaatgtggatttgaattcttcctgggaaaaggtggcaatgctgtagtaattgggcacttcgttttcgccctcagggctttgcacgctttggagatagggcagatcattgatccaaacgtcgccggagttgttggtctgcccgctggcggcagagaaaaaggcagctagaatcggcttgtcctgatacaggatcgtcattccgtcggtttcgcgtacggcggtggcgatttttgcgctgtagtagtctgcgttctcaccccaggcggcctgggcatcttcttcggttttataagcctggcagcagttgatgttattgcagatgtcagcatcgggatggt

SEQ ID NO: 4143 - DNA, 24362 bp, Unknown
  16S sequences of unknown bacteria
atagtaccggatggtaccgctcaggccgttcttttccatgtagtccttggcggcaacagcggctgccatagcgccggcgcccagagcattgtgtccgcagccatgaccgggaccgcccttgacgatttccttgtgctcccagcagccggcttcctggctcaggctgggaagggcatcaaactcgcccaggataccgatcaccggtttgccgctgccccaggttccgataaacgctgtgggaatgccatccacgccttcctgtacctcaaagccctcttccttcagagccttgatgagaatggcagcggatttggtttcgtggaagtacagctccggcacggcccatacttcatcgctgactctggcgaacttttcacgcttcgcctcaaccagttcccggatctgacggaccttgttttccatatccattgtcgttcctcctttgtctgttctgagtgatctatattctgttctttacggcctgatgccgcgaaatcctatctcagtcctcttttaccaccttgacgatgcccagcttgaacatgatgtaagccagcaggatggtcagcggaatggtaacgatcatggtatagccttccttgcccttgatcggcattaccagatagtggaaggcaataacgcaggccataggggccagcatggtcaggatgcggttcttgatgcggtactcacccgacttgctgttggccacatttgtaaccaccatgcttccgaacagagccggcagcatatagctggtggcaacctggacggtgggattttccagaatgggctgcagcggaaccagcagcaccacgccaatggcgatgacaatcatggtcaccatcgacgaaacgctgacagcaatggccgaaacggtatcaccccgctcggttcccagcggagaatcggtcatctccatggcattgagggcacagggaatcttcatattgcccacgttgccggtgatgaaggtgatgtagcaggcggtgcccagcatgggggtatagctgataacctccgatagggcggtgggtacatagacagccagcaggccgatagcggtggtgaacacctcgccgaatgtcggcattacatcatagatgaagcagaccaccagcggaatgccgaccatgaacaggatcgcaatcacggtgccgatccggcccagacgatgggctcggttgaaatagctgtttttatcgtttgtcatggattgcttcctcccctcatccaatcagatagttccagaacacagcactgaccatacccaggatcagcgcatctgccatcacgaagttggaaagccacttgaccttgtacttcttgatgatccagcggtgtgccatggtaatcagggcgctggtaatcagggtcagagtggccacagtgcccatgaaaatgcttcgggcgggagcgaaaactgccatcagcgccataacaaagcagctcatgaccagcgcgccccaggcgccgctcttttcacggaaggaagccatactggtctggatgcccttgcccaggaacagacagccgactacaccgccgatgatgccaaagctcatggcaagcattacagcgcccgctacaccagggtcgttgacctcaaccagagcggcaagggactcatatccggcgcccacagcagccatatccgcagcgataagctcataactcaccgatccgataaccgacagacggtaccaggaccacggcacgccaatcactgcctgaagcgagaacaggcccactacaaccgagatggacggtacaatactgaacagggccgaagacttgataacacccatgatctcctctttggaaagcccgagttccagtgcgcgctgccgggcctgtttcagcgtaaccagacagagtgcgaatacaaataacaatcccgcaattaccagtatgtaaagcggaaaactgttcatgatcgacatgaatgtcacaagtcatcaactccttagtcttattcgatttttccgtactccttgtttctttccggcgacagaatatctatgcaaatctgtctgtccagtaaaaacacctttattttggttataacattatttgaaataattatcaatattttttaacaaaataaataaattttagcaaatatattaaaagatagcctgatttcttgtataatccacaaatacaactaaatacacaaaacaataaaagaatcccatctacagcatactgccacagatggggttctcacttttggggattattcctatttgaaatacatgaacagctggcatttgatcatgccgttgtagagcttgcggcgcttgtcagccgggcggccgaacagcttctcaaactcctcatggggactgatgatgtagtagctcatgtcctcccggggcctgaatacccggcccatggtccggtagagctcctctgcctgcttgatctccagcagacgctcgccatacggcggattgcagatcactgccgccgggaagtccggcagggtgaagtccgctatatcggcctgtcgaatccgcagccggctgtccactccggcctttttggcgttctccagcgaaagagccgccgcctcggcatccaggtcactgccatagccccggaacctggaatcccggtagatcccggcatgggcctccttgcggatctcagtccagcgctcctccggcacgcccccccagcgctcagctgcaaagtgccggcgcatacccggggcaatcttcatggcatgcatggcagactcgatcaggaaggtacccgaaccgcagaacgggtccatcacaaccgtatcccggcgcacatgggccaggtcaatgatgccggctgccagagtctccttgatgggcgccagtgtggatacctgccggtatccgcgcttgtgcagcggcgcgccggatgtgtccagcatgatggtcgcctgatccttcagaatggaaaactggatctgccgggccggaccgctctcctcaaaccaggatttgcggtacatctcccccagccgcttgactgccgccttctttacaatggactggcagtccggaacgctgtgcagctgagaattgagcgaccagcccttgaccgggaaggcgtccatgctgccgatgaaatcctcgaagggcagcttcactgtgccgtcaaacagctcagtgaaggtccgggccggaaaactgcccaggacaatgagcacccgctctgcggtgcgcagatagatgttcgcccggatcaccatggagaaatcaccctcaaaggtgaccttgccatcggtggtctgaatattctgaccgcccatccgcttgatctccccggagaggacactctccaggccaaacagacagggacaacagatcgttagtgttcccataaagtaccgccttttcgtttatagatctccccttgtgcggggttctttctttttaataatgcgttttgcttcccgatgcgtacacccgctatcagagacagactctgcgggcgcaagccgggaagaaccgctgcccaccgggggaagccattcggacagaaaaccgcccgccgatcacccggtcataagagcaagcctaacagccgtcttgcggctattgtatcatgaagcgtcaatgaaatggtatcattaaccattgggacggatcgtccgaccataaaaattaagtataatagctgctttgcagctattataccatatttcccctgttttggcgagccgggaatggctcctggcctggcttttttcgcagtcccggcaccgctctcacatacagtgaatattcactatcttgcagaatcgatattttcccgtccattccggcatcgctcctgctccccgccaatcgccgcctttccgatcaattcacggctcattgcagtttttctcttcggagaaacgcaggatgttttttgaaaaaaagccacaaaaaagaattgacaaccggtcattcaggtgatatgatacagaaagaatattcatcatttatgtataaatttactgcggagggatcgagatggaaatggtaaacgagatcaaaaaacttgtggacgctaagaaggaagctttcctgcataccggcgacctggtctgggaatatgctgaaatcggcttcaaggagttccagtctgccaaggctctgaccgatgttctcaaggccgagggctttgcggtggaggaaggcgttgccggaatccccactgcctttgtaggcagctggggcgaaggcaagcccatcatcggtctgctgggcgaatatgatgccctgcctgccctcaagcatgctgccggcgatccggtggagagctctgagattgtgagcgagaacggtcatggctgcggtcacaacctactgggcgccggtgcgctgggtgccgctgtggcagtcaaggattatatgcaggcccatggcctcaagggtaccatccggtactatggctgccccggtgaggagttcggctccggcaaaatgtttatggcccgggcaggactctttgacgacctggatgctgcctttacctggcacggcggcgcttacaacgccatcactgccgaccactctctggctaacctctgcgcttacttcaagttcaagggacgcaccagccacgctgccggttcccctcatctgggacgcagcgccctggatgcctgcgaactgatgaatgtgggctgcaactatctccgggagcatatcctgcccgatgagcgcatccactatgcctataccgatgtgggcggctcggcccccaacgtggtacaggatcacgcctgcgtcttctactatgtacggtctccccggctgtatcaggtgctggatctctatgagcgggtcaaggatgtggcccggggtgctgctctgatgaccggcacccagctcgagatcgtcctcaacgacggcctgtgcgattatgttcccaacgacaccctctccaagctgctctatgagtccttctgtgaggctggcggtcccaagttctcggaggaggaaaaggctctggctgcggagttcgccaagaccttcgatcccgccgctgtggcagacaaggcccgtaccctggctgctcacttcggtccggaagtggctgaaaaatacaaggatcagatcctggtggaggacatcttcccctatcatgccagcgatatgatttccagcggcagcaccgatgttggcgatgtgagctactgcgctcctaccgctcagatgaatgtatccacctgggcactctgcaccaccggtcatacctggcaggtgactgctcagtcgggcagcgacatcggacgcaccggcactgtcaaggccgctgaggtactggccctggcttccatcaaggccatgcagaatccggagctgctcgaaaaggccaaggaagagtggaaaaagaccaccggcggcaagtatgtctgcccggtaaccgacgatgttcagccggccctctaaggctataaaatgaatgtatacccagtaattcctgcaaaatatacccatatttcttgactttgccagggaaagctggtaaactatgaaaaagcaatgttgggtccgtgtcactctggcacggattcagctgtatatcgaagattaacggaggtatctgtaatggctgatgttcagaagatcaaagccctggtggacgaaaaggccgataagtttgtcaatgtggcaaaccaggtctggagcacacccgaactgggctttaaggaagagaaatccgctgctgccctgattgctgccctggaaagcgaaggtttcaaggtcaccactggcctggctggcattcccaccgcttttgtcggtgtctggggcgaaggtcatccggcaatcgctctgctcggcgagttcgatgctctgcccagcctgagccaggaggccggcaacgatgtccatactcccatctgtgagggcggtaatggtcatggctgcggtcataacctgctgggcgccggttctctggctgccgctgtggctgtcaaggactacatggaacagaatggcatcaagggttcggttcactacttcggctgccccggtgaggagttcggctgcggcaagatgttcatggcccgtgccggtgccttcgatggcattgatgccgccttcacctggcatcccagcaacctcaacagcgtctggggcgtcagctcgctggcaaacaacagcatctactacaagttcaagggccgtaccagccatgccgctgcctctccccatctgggacgcagcgccctggatgcctgtgaactcatgagcgtcggctgcaactatctcagagaacatatcattcccgaagcccgtctgcactatgcctaccgggatgtgggcggttccgctcccaatgtagtacaggatcacgcctgcgtcaactactttatccgtgcgcccaagatcacccaggtactggagctcatcgagcgggtcaacgatgttgcccgcggcgctgccctcatgaccggcaccgagctggagatccagactgccgctggtctgtgcgactatcagcccaacgatgtcctctcccagctgctctgcgactgcctgatggagaccggcgctcctgaattcgaccaggctgactacgatctggcccggaagttctgggacgattacagcgatgctgagatcgaatcctccctggccaacatcaagggcgttgccccggatgaggtctatgaggaagtgcgcaagagcccgctgaccgagtacattgccccctacaagcacattgactatgcaatgcccggctccaccgatgtaggcgatgtgagctactgcactcccactgctcagctgggtacctgctgctgggccaacggtactcccggtcacacctggcaggttgctgcccaggatggctgcagcatcggtcacaagggtatgatcgccgcttccaaggctctggccctggctgtgatccgcaccatggaagatcctgagctgctcaagaaggcccatgaggaatatgtcaagaccaccggcggcaagtacatctgccccgttcctccggagactgttcccctgtttgactgatcctgaatcaacacatcaaaaaaacggacagcggctgctgtccgttttttcttgtccgcggcggaagattccatgctccgccgcggtttttatattgttatgccgggatcagtacagctcggttccctctgccgaaacccgtcccagaatcagcttgggactctcgggcagcggttccggagaaatggtcactgcctccaggaacagacgctctgcctcatcaaaccgtgccgggtcacccgaggtgaagagccgtgcaaactcaaagccgccgtccacctgttcgcccaggttcatcttgaagtagatgcccgctgtgtagtcgatggcatcgcccttggcctgccgtccggcgcccagcatggcagccgcaaggccgcatttctcggcgtcaatatgggtgatataaccgtccattggcgccttgacccggcggaagtcagaggcagccgggagcttctgggtatcctcgatcaccgatacatcgccgccctgtgccgctaccatctccttgaactttgccagggccgctccggtcagaatggcttcccgggccagcttgttgcagtggataatatcccccttgcctgccaggtacagcatattggctgccagctcccggcagatggtggtcagttccgaggggccatgaccttccagagtctccaccgcctcccggacctccagggtattgcccaccgcattgcccagcggcgcatccatgttggtgatcagcgccactgtgcgccgtcccaccgcttctccgatctgcaccatggactccgccagacgcaccgcgtcctccagcgtcttcatgaacgcaccgctgcccacctttacatccagcacaatgccgtctgctccggcagcgatcttcttggacatgatgctcgccgcaatcagcggaatactctccacagtggcagtcacgtcccgcagcgcatagagcttcttgtccgccggcgccaggtcgccgctctggcccaccacacaggcgcctacggtattgacggtgcggataaattcctccggggaaagctccacacagaagccgggaatggattccagcttatccacagtgccgccggtgtgtcccagaccacgcccggacatctttgccaccggcactccgcaggctgccacaatgggagccaccaccatggtggtcttgtcccccacgccgccggtggaatgcttatccgccttgaagccctgaatccccgaaagatccaccagatctcccgaatgggccatccggtcggtgaggacagcggtttcatggggatcaagcccctggaagtagatcgccatcatcagggccgaaagctgataatccggaatggaaccatcggtacagccctggaccacaaagctgatctcttcatcggtcaatgggaatccgtcacgttttttatggatgatgtcatacattctcatagtcagacactcctttatgatttcaaaagaccggaacagccgcccgggacatgactgaccacagacggctgttcataaacaaagacttggattttaccgggcacccttctcataggggacaccgtctgccttgggagccacagccttgccgacaaacagcaccagtaccaggattgtgagcacatagggcagcatggacagcagctggggcgaaatgctggagctgccgccgccgagcataaccaccagtgcctgtgcaaaggcaaagaccagacaggccaggaatgctccatggggagtccacttgccgaagatcactgccgccatggcgataaagccctgacccgaaatgaccgtgggggtgaacagcgaaaccacagccagcgactgagccgcgccgccgaagccagcgaggacgccggaaatgataacagccgcataccgcaccgcatagacattgacacccagggtatccgcggcggcgggatgctcacccactgcccgcagacgcaggccccacttggtacggtagagcacgaaccagatcacaccggtgagcaccagggcgatcacgaaagtgatgtccacatcgaagttgcgcagggcaccctccggctgcaggcccagcaggctcatcagcttgggcatctgcttgggcaccggcttggacatggtagcgccgtcaaagaacagacggcagaggaacagagccaggccctgtccgatgaagttgagggcaacgcccgagatggtctgattggccttgaaggtgatggaggccactgcgtgcagcagagccagcagaccgcctgccagacccgctgccaggaagccgatccaggggctggcgctgtaatagccagctgccgcaccggcaaaggcaccgatcaccatcatgccttccaggccgatgttgatgacgccggagcgctcactgacgacgccgcccagagcggtgaggatcagcggggctgcatacataaatgtaatggtgattgccagaaaaatattacttgccattgcttctgcccctcctcttttccagatagtcagccagcatgcggaaggctcccgacatggcgatgaagaagatgatggtaccgatcacgatgttgatgatctcactgggagcacccagatccgcctgaatggagctgccgccgtactgcagtcccgcgaacagcagtgccgaagcgatcacgcccagcggcgaggtatttgccatcagcgccaccgagataccatcgaagccataaccgggctgggaggtaagggtggtgatgcggtgaggcatggcgccggtgatgacaatggcgccggccagacctgccagagcgcccgcaaaggccagggacaggataatattcttgttgacattgatgccggcaaaccgggcggcctcactgccggagccaacggcccgcatctcatagccccgggtggtgcggttgagaatgaaccataccaggaaggccgcggcaatcgccaggaaaatgccgtagttgaggtcggtcttgatgagcacatcgcccaggatgggatgggtgccgtccagcagccattcccgaccggcatcggaggtcttccactcgttgaggattacgatccaggagctgggaagcacctcataggaagcctcggtctggggcttcttgagccagggcataccgatcatgaagttattgaagtacagggcgatccagttgagcatgatgcccgagataacctcatggatgccgaacttggccttgagtacacccaccagggcgccccacaggccagcagcggcgatggctgccagagccaccgcgatgaagtggatcaccggcgggagctcgatgcagtagccgaccacgactgctgccaccatgcccatgatggcctggccctcagcgccgatattgaacataccggtcttgaaggcgaaggagatgctcagtccggtgaagatgagcggtgtggcccggatgatcacctggacaatatacttgggtttggaaaaaatgccgctgatcatcgaagcataggcagctgccggattgtagcccgcaatggacaggacaatggctccgacaataaagcccatcacgatcgagatcaggataccggtgatcggccggcgaagtgctttttcgagttgtttcatcccttctttcctcctgccatcagaaggccgatgtggttctcatccgcgttttccgcgtcaatggtgtccacaatcgttccgtcataaataattgcgatccggtcagatacatccatgacctcgtccagttccagcgataccagcagtaccgccttgccctgatcccgggcttcgatcagcgccttgtgcacatactcaatggcgcctacatccagtcctcgggtgggctgcaccgcaatgagcacatccgggtcgttgtccacttcccgggcaatgatgagcttctgctggttgccgcccgaaagtccccgggccgcactgttttcacagcccgcaggccgcacatcgaaccgttcgatcagctcggtggcatggctgcggatggccttgagattcagcacacccttccgggagaagggctcccggcggaacttctcaatgacgaagttctctgccactgtgaagtccagcaccagaccatgcttgtgccggtcctcgggaatggtggcgattccggctgccagtgtatccgacggggtacggttctggatctccttatcccgtacccggatgctgcccgccttggacggcaccatgttcatgatggcttccaccagttcatgctgtccgttgccgtcaatgccggcgatgcccaggatctcgccccggcgcacctccaggctgaggttcttcacccgctcgattccacgggtatcctcaacagtcaggcctgcaatcgagaacagcacctcaccgggattggccttctccttggcaacggtgagctttacttcccgtcccaccatcatcgaggccagttccatctcatccacatccgaaaccttgactgtatcaatgtatctgccccggcggataatggtgcagtagtctgccgacttcttgatctcaccgagcttatgggtgatgatgatgatggtcttgccatcgttggccagacggtgcatgatctcaatgagttcattgatctcctgaggagtcagcacagcggtgggctcgtccaggatcaggatctccgcaccgcggtacagagccttgaggatctccacacgctgctgcattcccaccgaaatatcctcgatcttggcatcgggatcgatggtcaggccatatttttccgaaagctccagtacatccttccgggtggctgcctcatcaatgacgccgccaaaccgtgttttttccataccgagcatgatattctgtgtaactgtgaacggttccaccagcatgaagtgctgatgcaccatgccgattcccagcttgatggctgtattgggattcttgataaccgctttctgaccgttgatccggatctcgccttcatccgcctgatacagtccgtataggacattcatcaatgtggatttaccggcgccgttctcgcccagaagcgcgtggatgcttcccttttccacgctgagctgcacgccgttcagtgcgcagaaggagccaaaatacttgctgatcccctgcatttcaacggcatacactttttctgaagctgctgacacgctcttcaccctctctgacagattgttgatacagcccaatctcagtattgacctggtacaagccatatatattaagtatatcgtagtttgacgaaaaatgctaccagaaaatcccgtgcttccgcctgctcattctcgtaaatattaacaaaattttaattccagattttatctatgatacaaaaaggaactgccttcccccttccggagaaagacagttccttcgtttcagatcaaagatgccggttacagtctggctgcctgtgctgccacacgctcacccagggtgacaaactgttccttctgctcttccacatgaccgcccagcgcaatggcgcccagatgggtcagcggttcgcccagtgcacagccgcccgagtataccagcatgcccttgcagagcatccgtaccacattgttctgcagcgcgatctcgcagccgccctgcaggtatccggcagtgccgaaggtggcgccgatctttccggcgagcggcagcttggtttcatcaaagaacttcttcatctgccagcaggtatctgcatagaaggtcggtgcgccgaataccacagccttggcctcagctacaaatgcctcgtcgatcttgtccagctcaaacaggcccacttccgcgcctgccttcttcatgccttcagccacatactccgcagcctgcttggtattgcccgattccgaatagtatacgattgccagtttcattttccgttctcctttacatcactgccggtgccgatcaccggtattatcagtttcaatatactacttgcccggtatggattcaagctgtttccgctccattctcccaccggcacaaatctgtacggaaaaatctggtcactttgactgacgctccgccacagcctgcagcagatcctcccggctgaacgccgtttccagctcataataggtaaacacccagaccgtatccccggactggacgatcatctcattccgaccgctccagaccccatcgaaccgggaatcattcaggcgggtgtagtccgccgggctgctgctccaggcgctgtcccacatgagcgattccacaaaggaatccgccatctgcggccggcgcaggcggtagacatcctgataaagccagacaatatcctccttctcgggctggtagacctgttcattggtgtaccagttctcgctgagcaggcccttctcatagcgtagcccgctgggcccattggtgaaataggaatgccgctccccttccacccccagttcctccagggtcagataggggccgtcggacactgccggcatatcgccccggtaggcacccagatactggaaccccatcacggtcagggaatacaccacggcacaggccgacatcagccggatgcctttatagaaccagtttctccttctgggggtgtggtccatgggtatgcccttgcgcaggcggcggtacagctgtccgatgcggatgttcccatagagcagtgagaacaatccccagaacagcatcgccgccagtgtcagcacaatgccggtatccgatacaaacacatggtaccagcttccccaccagttgccgaaggtgcggctgccgaaggaaaagtagaacagagtattgaccgtaaatatcacaatgagcagaatccagctggacacatagctccggcgcagtccacggagcaccagggcctgctgacggggatcggtatagaattccggggcatcgctgtccgccggggaggagaagatgtggaaaagcccatgtccggtgacatacttccagccgcattcctcatagacgctgatctgctcctccggcaggccgtgatccgggtccaggaagcgcagatccgccagctccacccggtagcgcatggctgccggctccccgcggcggaaccgggagaaccaggcgccccgcttctccaggaaccacccctttgccgccatttcagaataaaactgttcggtttccccgatggcaaattccatcggatgcagtgcgtaccgccgtttcatttgagttcctcctccagtatgtttccatcctgtaccatggtcttgagccgccggtattcctccagcagcgcctgtgtccccgcctcggtgatggcgtagaccttgcgccggccctccgcactctccaggcggatatacccctcagtgtgcatccgggtcagaatgccgtacagcgtccccggtcccagcaccagccgtcccccggacagctcccggacccgctgcatgaccccatatccatgcaccggatgcagcagcgccaacagaatataatacatggcttcgctcatgggctgacgctccggcatatccgggtccctccttctgctcaactattacgcgtcacgatatatcgtctgacataataatagcataaccggaacaccaatgcaacaaatttcatatcaatccacaaacttattcccccaaaatagaatgaaatgtcgaatttggaaattgtttggaaatttttattgaactttgtcaataaaagtaataaaataattgtgcaagaatttaattttaacacaataaagttgggagcgagaacgttgaaaagcatacgcacaaaaatcatggcgggtattgtctgtaccgttacagtatttctactgattgtcggcggagtgagcatctatatgagctactccagttctgtcagccagctggaagattccatgaagaccacagctgccatcacagccagccgtatcgaaaaagagctggaagcctatcggaatgtagctgtatccttcggtgcccggagcgacatcgccggaaacaccatgatcactgaagaaaaagagaccctgatgaaccagtgggctcagaaatacaacatgacacgttccaatatcctggatgccaacggtataggcctgtttgacggaaacgactattccgaccgtgactactatactgagtgcatgaagggcaacagctacatctccactccggttgtgagcaaggtaaccggtgaactgaccatcatcgttgccgctcccctgtgggaaaacggcgttgtggacagcaatgtcatcggcgtggtatacttcgtaccccacgagaccttcctcaatgatattgtaagctccatcaacatcagcgaaaacggcagcgcctacatgctggataagaacggcaacaccattgcccatgaggatatccagatggtgcgcaaccaggacaataccatcgctgattccaagaacgatcccactctgaaggatctggctgcatacgaatccaagatgatcgccggtgagtcgggcagcggcacctatgagtacaacggcgagaccaagtacatcgcatacagccctgttgctaataccgacggctggagtgttgccatcaatgctcctgtcagcgacttcactcaggccactgtacaggctatctgggttgtgattgccctggtgatcgtttccattattgtggctgtgctgatcggcttccgtctggcagctctcatctccaagcccatcaccctctgcgccaatcgtctgaaccttctggcagaaggcgacctgcgcacccccgttccgcagatcactaccaaggacgaaaccggagttctggcaaagtccaccggtattattgtagataccctgtctgccctgatcgacgacgagtgctacctgctggaatccatggcagccggcaacttcgatgtggactccaaggataagagcctgtatcgcggtgacttcaccaccctgctgacctccattgaaaacatcatcgacaagctcagcgataccctgcatcagatcaacattgcggctgatcaggtatccgccggatcggatcaggtatcggctggtgcgcaggctctgagccagggcgccaccgaacaggcctcctcggtacaggagctggctgctaccatcaccgagatttccaacaacaccctcaatacttccaatgctgcccgtcaggccagtgatactgctaccaacgccggcaaccagctgatgaccaccaaggataagatggaagaactggtttccgctatgcaggacatcaagaacagctcgaaccagatccgcaatatcatcaagaccattgaggacattgcgttccagaccaatatcctggctctgaacgctgctgtggaagcagcccgtgcaggcgctgccggacgcggcttcgcagttgtagccgatgaagtccgcaacctcgcctccaagagctcggaggcctccaagaacacctctgctctgatcgctgattccatcgtttcggtagagcgtggctccaacatcgtggacgaagtggctggcctcatggatacaaccgctgagggcgcccgtgccgcagttgccatcatggatactatttcccaggaaactgacaacgaagcccaggcaatcaagcaggttactgtgggcatcgatcagatctccagcgttgttcagaccaactccgctactgctgagcagagcgctgccgccagcgaagagctgtccggtcaggccaatatgctccgtgagctgatcagcggcttcaagctgcgcaatgtcagcaccggatcttcctggcagtccttcggaatgtctgactccgcttcgaacacttcggatcgtgaatccgttccgttcggcagcgacaagtactaatccagaaatctgaaaaggccgggctttatgcccggtctttttatatgcagtccgatgcctgaaccttttcccggcctccgccagacagagcagaagctgtcaggcctgccgcatcacctctgccccatatcccaaggcaaatgaaaatcccctggctcatctggaagccaggggatttttctctctgcggtcagaacttaggattgcgctgtttatacatctctgcggcctgcaaggcaaacatgtcctgatacagccggttctcttcctcctgtgtcagctccacgaactgacagccatagaagtatccgccctctgccaggccgcgcatccgcaccaccttgcatttgacagtatgttccggcccgcgcacccggaaccgctgccgggtcagctccagaatgtcgccgatctggaacaagcccgggctctgcagagcgatacccgtggcgctgacattgaggatggtacagggcacctccctgagctcctcgttgaccttggaaagcgctgccggacgcatgatattctgccggtaattgtcccgggcctcctccttgatgaccgcctgtacagcctggatcatcaggaacaggctcatggatttgactaccttgccttcgatcaggatcagttcgcctttgttccgggtcagcttgatgaagagcttgactgtcgagccttccggcgcgctgttccggggaatcagccgccgttcgtagtccaccagccggatcatatctgcttctggatcataatgggtgatcctgcccacaaacaaaaactgattatcttttgtcagaacagtgcagcgcaaatccaccgcacattcgataaaatccttcattgtcatagtatcacccccgagtctgcctggaatcacaggcctgcggaacctgcgccgctttccgatgccagcagcctgtatacatcatcgagttccatgggcttgtggtaataatagccctggatcagatcacagcccgattcccggatcagggtgttttcctcagcggtttccacgccctccatgcacaccatctttccaaaccggtgacaggcatatacaatactggatatgaaattcatcttatcagccgattccaccatttcacccagcagggaacgatccagcttgatgatgttggtgggatactgaagcagcatccggagtgaagaatagccgctgccgaaatcgtccagtgcaatgcggatgcccagcttccggcagactgtgacaaagtgcagcagtttttccggcttctcgtccatgcagctctcggtcatttccgccaccagatggcagccgtccacctgatacttcccgagggtctcctccatgaagtccaggaaatgggaatcggacagctgatagaggctcacattgaagctgagatagaaatcgggatcataggacaccagccgcatgcaggcacagacagcctgttcaaacacccagcggcctgccagatggatcatattgtccttttccagcatggggacaaagactgccggagaaacatccttgcctccgaatttccagcgcagcagcacttcgccgccgatggcccgtccgttcagtgtggaaacgatgggctggatcacaatacggaagttctccatgccgcacagcacatcccggctgagggccagcgccatattggacatatactttacacgctcgatgttgctctccgaatagccggcatagagctgcttggtatcgtgcttggcaacacggatcagcgaaaccagctgttccaggaagtcagccggcatcaggttagactgcgggtactccatcaccgcaaaggaacaggtatgctgcagggaaatccccatgagatggtaccagctgtccacaatggcacggatctgttccaccagctcttcccgactctcggtacagccggcatccaggatcgctgcgcagcgcattccctccagacggtagaaggacatcttatccgacagcttttccatcagatctgtggcaatattctcgaccagatggtcgctgtatgtacggccccgggtgctgttgatctccgcgatgctgttgaagctgaatccaatcgccagcgcggtgctcttcttccccttcacctcgtccagatagctcagcagagcctgttcccgtgggaagttggtgaccgggtcaatgacaaacgcatcatcctgatggctcacacggcccgagaagaacagcggcagggtcttatcctcgttccacttgaggatgccatagcaccgcacccacatggattttccgttggtgtcccgcacctggtaccgcaggtcgtggatggagcgcttctccttgatcatggagtccagctcctcccagtacatatcacggtacttcactgaagtgatccgctgtgcccaggcctggagcagccccggtacgatgttgctctggaatccgaattcgtcccgcatattgtcggatacatagaagatattcttctgcatatcgccaaaatagaaataggcggttgtattctgctgggaaatggagcggaataccatttccgcatcataataggtcgtatgcaggaagttgtagaacaggctgtcgccgtcatgggccaacaccggaacccggtctgcttcccggcggcgttccactcccggcagcatccggttcgccgcgtaatagtcccgcttgtcctggtacatgaccttgtctgcccgggaaatcattgcctccacactgaacggctgctccccgcaccaggcataacccacagcaatatgctgcttggatttatggactgccgcatgcaggtccgataccttggtccagaacgcctcctgctcaatgtccgggaatactgccacaaattcatctccgccggtccggtagacccagggggtgtccagctcattccggatcagctgataactgtgccggatcagcagatcaccagcgtcatgtcccatcgaatcattgacctgcttgaggccggtaatatcacagtataccacgcccatggtcttgcacttgtccgcaaaggtattgtgctcaaagagcgcattgcggttgtaagcgccggtgagcgggtcatggaagctgagtgtattcagatgcttgagcagatccctgcgccgcagcagcgagatcacaaaatagccgatcatcttgagcagcgaagcgatcagccccatcatatccgggtccggattgtccacgccgaaaaagcccaccagcttgccatccgaaaggatcggtccagcagccagccgctcgatcttctgcggcttgagcactgcataggcagcgggatactcggtccggatctcctccagatccctgatcatcaccagttcattcttctcaaagaggtcgatccaccaactgatgaacgaaatcggaaggttctgcaggatctcctgctgcggtgccgcagacggatcgcaccattcataggtattgttggctgaatcgccgtcgagctcaaagatatagacacggtcacagctgaaagtccgtcccacataggagagaatctgtcccagagccgcctccggactggcgtccgaaaaggcctgctgcagacatccattcaggatgctttcactccgggcatagtaatagggagtctggcagacaacctccgaatccacatcaatggcaatctcaatgcgatactttctgtcgtcgtaataaaatacactgtcctttataagaaagcgcttgttcattaccggattgatatgcgtccaggaatggaaatgattggtgcagaatgaacaaggctggtcatatccctgcagcactttatagcacatctgaccctggtactgagcatggttttcaaatcccagagcattccgcagatgccggttcatatacacaagctcattggtttccatatccgagatatagaccatctcgtccaggtcctcaaaaaaattcagtaaatattccatctatccgccctctttccaaacagctttgcaattccttgatcctcaaaatatctgtacgatttgcacacaattttactgtgcgtaattgccgaatattgattatattttattatatcattgaacttttccttttgacaagacaaaattcataaatacatctaagcaaagttttaggattatagacatctccacaaagcgctgctggaaatatagcacaaaagcgccaaaaaagtacgcaggtaagccatttttcgcatcataatccatcggtgatgcatacagaaattcattccggatttacagcctcgggggcacggcaaaacagcaaaagcttatcttcgggcacagaaaaacgcttccccggcaaaatccagggaagcgttcgacagatttcgactaaaaattcacaaattctgcatatctattcgtgccagatcggtggtttcctgcaccgccggacagggctggcccttctcaggaacagaaccgcagacagcttttggcagatgcacttatacgcgccggggaatgggcagaaggtcacagagcaggccgttatcccgcagtttcttctgtgcagccagtgcctggggtcgggtcagccccgaaagccggctgcgcagttcctcccaggacatccgcacaacctcccggtcagaacagcccagaacctcgcccaaagccgcgctctggttctcatggagcagcttggctttgaccgctgcctccgcattccggtcaaaccgcaccataaaccgggaccggaggatcacacgggtcagggctccgtttccgttccgctcacagcgcacccagtggcgatccatagtcagcagaagcgtgccatcctcctccgtctgcacccggtccggataacagcggcagtactcctccagggtgtggttctggaaatagacatagggcccaaaggaggccaggtcgatctccatctcctccatctccggatcgatccagcggattccctgaatgtcgggaggaatgatctggcagtgatgataatcggtctgctcattgaggctggtaaaggattcccctatgttataggaattgaccctccggcgttttagctcctccaggaattccttcgggcgtccgggtactgccagatagcgcttccaggctgccttgacattgatggactccccctcgatgatccgacagttggcatccggatgatcggagcagctcagccatgggatttttaccaagagccggattgccgggccattattcgggaacgcatcatccaggtagttgccgccgtaccagaactttggctgggtgatctcagcgccgcactccggacatcttgctttcatggagcgcttgacagtccagatcacatagcagtgatcccgtgcctgccaggcacagtacagtaattcccccagccccatataccggacaaagtcctccagatcggcctgttccggcaccggacggggcggctcctgctgttcctggaaacggcggatctcctttttagggaagcgatacccctcttcccccagcagtgctgccgtctgttccagataccaggcccagaacttcatttcttccacacgctgttttccggtgctggcgtcctcgtcccggcccgcccaggctactgccgcacaccaggcagcgtcccagtcgtagaaatcaaggtcttcctccctgcacccaatgcggtcagggctcagcagcggctcatcatagaggacagtcactgctccgttccaggctgccagcgccgccagcggagcattgctgtaccgctcctcatctatcagggacatgaagtcggttttcgacagaagctgatccagctcttctgctgtgcattttccgcccagataggcactgatctttcgcagcagagcctggggacgcttatcctcggcatcataggcgttccacactctggatacctttttcccgcaggccagagcgagctgtgcccgctttctcaccgcctcggtgagcggcccggggtgctgttcgttcacctctgccgggcccagagccagccagagctgctgacgggccgcaacactcaggctcccggtctcggaaatctccttttgggctttttctatgatggtcagcatacctttcccctccatgatccactggctttgcgtccggcttccgtctctctgctataagaaaagtatagcatatccccctctcattttccacggcttctccgcactctccttttctgagaacaggcgcaaaaaggcgccctgccggacgccttgtgctgtttgatattcgcaaagtatatgcgggatgctcttttgccatgctatgcccccatataggcattgaggacatagtcggtgaagtaggcgcggggcgtgtaggagctctgacagctgctggtgatgaccgtcaccagctgaagctccggcaccacatagataaactgccctgcatgcccgaacgcgaaataggtgtcataactggctgccggatagggtgtggcgtaggttccatattcccctgcggtatgggtgcgcacccaccactggtagccataggcccctgtggcatcgccaggcccgccattctgccgggaagtggactcctctacccagtctgcgggaaccagctgctgcccattccatgtgccgccgttcagataaagctgcccgaatctggcagcatcccgtgaggtgatgacaagtccgttgcctccatcggcgatcccctgcggatcggtgtgccagtaggcctcctcgctgattcccatggggtcaaacaggcgggtgcggcaatactcctcctgggtcatgccggtggctgactgcaatactgccgagagcagatgggtattgccggtgctgtaattaaagactgttccgggatcgtggatcagggcccggctcaggatatagtccacccagttatccgcagagcggaactcggtccagttgctgtacccgctgccccattcataccattccagaccggaggtctgggtcagcagatgccgcagcgtcaggtcgtgcttccgggtatcctcctgttccagcacctccgggagataatcggatacccggtcatccaccccgccgatgtatccctcgtcgattgcaatgccgatcagcgccccggtaaaggatttggaggccgagtacagctcaaaaagactgttctcatcgtagccgtccccatagtactcgtcgatgatgaccccatccttgacagttaccatcgtatggatgccgctgccgggcaatgcctgatgcagggcctcgaacacctccgggtccatctgatggttctccggggaatcgaactgccagctgttgtcctgctcccgggcctccggagccgcttgagcagacgattcctccgggctctgtgcggtggactccggctcagatccagactgagcggtgccacaggctgtcagggagagcatcagcgacaaaatcataaggaacggcaggaactttttcatgggcaaaactccttgttatcttaaaacaccgccagaggccagtctgtcatatagttcatggcggcggaaagcggatgtcttctgacctttggaaatcggctcttccaggcagtagaccgccgaaaaaactattccccaggtgccaaaaatggctgtacttcgtctgctcagattccaagctccgagagc

SEQ ID NO: 4144 - DNA, 32759 bp, Unknown
  16S sequences of unknown bacteria
ttcagatcggaaagctccttggaaagttccgcaggcaggcggtcgccgaactgcttgtagaactcttcgatgccttccgcttccttcgcccaggtctctttgtcgaccgtgaggatctcttcgagcgtttctttggtcacgtcggtgccatcgaggttgatgtcctcggccttgggcacgtagccgatgggcgtttccaccgcgtccacttcgccctcgcagcgcttgatgatccattcgagcacgcgcatattctcaccgaatccgggccacaggaatttgccgtcgtcgtcgaggcggaaccagttgacgttaaagatcttaggctggtttttgacctttttgcccatctcgatccaatgtttgaagtagtcacccatgtgatagcccgcgaacggacgcatcgccatagggtcgcggcgcacgacgccgaccgcgcccgtagccgcggcggtcgtttccgacgccatgatggagcctacgaacacgccgttgttccaatccttggactgatacaccagcggagcggtcttggcgcgtctgccgccgaacacgatggcggacaggggcacgcccttgggattatcgaattccttgctgatgcaggggcagttgcgcgcgggagcggtgaaacgggagttgggatgcgcgcccttgacgccttccgcctgctctttctccgtccagggattgcccttccagtcgatggcgtccttgggaggatttttatccagcccttcccaccacacggtattgttttcgaggttgtgcacgacgttggtgaagatcgtgccctttttggtggattccagagcgttgggattggacttcgcgttggtgccgggcgccacgccgaagaaaccgttttcggggttcatcgcccacagtctgccgtccgcgcccacgcggatccacgcgatatcgtcgcccacgcaccagatcttatagcctttcttgcgataactttcggggggaatgagcatggcgaggttggtcttgccgcaggcggaagggaacgccgccgcgatgtatttcacttcgccgtcgggtttttcgaaccctaaaataagcatatgttccgccatccagccctcgttcttgcccaaataggacgcgatgcgcagcgcaaagcactttttgcccaaaagcacgttgccgccgtagccggaattgaccgaccagatggtgttatcctcggggaaatgcagaatgtagcgtttgctttcgtcgatatccgctctcgcgtgcaggcctttgacgaaatcgccgttctcgcccatggcttccagaacgtttttgcccactctggtcatgatggtcatgttcagtacgacgtagatgctgtccgtgagttcgatgccgcatttggcgaattcgctgcccacgatgcccatggaatagggtataacgtacatggttctgcccttcatggcgcctttgaagatctcgcccgccattttataggcggccgcaggatccatccagttgttgatggggccggcgtcttccttgtttttgcagcagataaacgttctgtcctctacgcgcgcaacgtcgttgacggcggttctgtggagaaagcattcggggagaagatcctcgttgagcctgatcatttcgcccgtggagcaagcctccgcgcgcaaattttcgatctgctctttgctgccgtctatccagacgatcttgtcgggctgacaaagcgccgcgctctcgtcgataaactgcaaaaccttcttgttgttggtcattgccattgttatatctccttttttcaaagaatttaacgtatttaatctctattattatataccaaattttataaaaagtaaaacgaattgatgaggttacaaaaaacccgttgcgcaggcttttagacgcttttcggcgtttcgcgacaaaaaagtatgttttatgcggggaaagaatatattactatcataataagaaatacgggcggggattcgcgcccttgtacggaatggatttatgagtaattactgtaaaaaaatgtgcgtcctgaaacaactttctacgggattcgcctccgacggaaaaaaagtttcggggcttttgaccgcggaaaaatacgggacgcggctgacggcgtgtttttcgctcatcaacttcgcgcccctttccgaggggcggtacgtggcggcgatttccgacacgcgcggcgggctggaatttttcgaactttccgcaacgggcggcactctcaaacgggaaagtacgctttctttggaggacggattctgctgtcttatctgccacgttgcgttccgcgcggcgccagcggcgttcggcaagagcggcgaggacgtgtacgacgtaaaaaaactgtgcgccgccgttgaggaaaaggagcggggcaaggcggcgcctgccgccaaagaggaacgggaggagacgccgcccgagaacgctccctacgacgatgagatcgtggcgacggagaattattacgaatatcccgacgcgaacgtggaaaatttgacgataaaggagaaatcacatgaagaacaaccaggccttagcgctgttgatgcagttgccgatgcagtcgatacgggcgaagaacgcgcagaagaaacggcttgcggagcggacgctgatgcggatgaagatgctgtgcgcctattcaaagtcgaaagtccgggaaacgaaaacggaagcgcccgttattacgattcggtaaagggtgaactcgacgaactgttcgaaaagtacccttccgaagacaatttgcagcgcgcggtggaagattcgcgctgggtgaagatcgaattcgcgccgcaaaagtattacacggtgggtttgatgttcgaaaagggcaagccgcgctatatctgctacggcgtacccgcggcgaataagagcgagccgcccgccgctttgaagggtttttgctcgtatcttcccctttcgctgttcgatctgcgcggcaagggctactggatgatgtaccaggacgcggacacgggccgctgcgtggaaatttcggcaacttagttcacgaaatttgttcgaaagggacgaacaaatttccgttagttttgaaagacaaccgccgttcgcgcaactttgtacgctctgcggcgtttttctctcttcgaaaatttgttacggctctcctattgtcacaattttcgaattcactcttttccccgagcgcttgacgcgcaaattgagtttcgctgcgcaaaaacgcggttttgcttgcaaaagttagatttttattcacgaaatttttttaatagacacgattcggcgagccccgttatacggggctcgctttttccgttaaaaagtcggcgcagcagacgccgaccaaaagacctttgcggattccgtttatcaaatattcgtcttctttcagcgcggcgatatcgccgataaattcgtaaaagtcgttaacgctcctctttttcgccgcggaaacgttcgatcatcttttcgttttcgcggatattttgcgcaacccgctcgcggtccgaactgacgcccacgctctcacgcgtcagtctgccgctcaatacccgatagagcacggaatattttttatcgaacacgcccgacgtttcaagccccgcaagaacaccgaagacaaaacctgcgccgtaataatcttcgaaggcgacggcgctcgccttgtcccatccctcgacgatctcgtcgaatttctttttttcgctctcggcgaacagttcttgcagcgacgcaagggctttttctttttccgccgcaagcgctttcaactccgtttgcacgctttcacagaatgcgacttgctcgcctttcagcatttgttgtatgatttttcgcatatttgcctcctttatatacttattatactttataaaaaaacataattgttaaaaataaagtatgctttgcgcttttttttccttacacaaagaaaagccccgacggtcaccgtcggggcttttcctgaggttatgttataagagattacgttatggataatcagggtttaggtttgtcgtccggctttttctcgttcgagtgacacgccgatttgcacgaacagcagtcgcagccgcaatcgcagccgctcttgccctgctttttgcgcacgtaaccgtatatcagcgtgaacacgacgatgccgaccgccaatacgccgacggcgacggaaacgatggttccgaccgcggctgaaagggagagtatcataaaaactccgttattcgttgcgctgtttggattttttgccccaacggatcatacctttgttccgaaaaacgaagaagatcacgacgagggcaatgagcgcaacgaggataaatgccgtccaccaccaggatagcaccgtatagacgatggttgccgtgagataggacgtaatcatccagaatgcgaccgtatttttgaatttgcccttaggcgtttcgccgcgcactgccgccgccgccgcgaaacagggtatggtaagcatattgaacacacagaaagcgatcagcccctgccaggtgacgcccgtggactccatcagagccatcaccgcgccgatgccgctttcgccgtcgtcccaatcgggaagcaccgcgccgatggcgggtacgagcacgtagaaagtggtgatgacgttttctttcgcgatcagccccgtgaccgccgcgacgacgaacacccagccgaatttgccgagttgcaggccgaagcccatgggggtgcagatccactgcacgaacgtgcctatattatataatatgctgtcttcgatgccgacgagttgccaactccacgaaaaattggataaaaaccagatgacgatggacgaagccagaataatggtaaacgcctttttgatataatgcttcagtttatcccaaaggtgtagcatcaaattgcggaactgcggcgcgtgatacgcgggaagttccatgatgaagggcggcacttcgccgcgcatggaagtctgccgcatgaacgcgaccgtgacgaccgccattaccatgccgaacacgtagagcgcgaaagtcagaagaccgccgtccagattggtgtaatgcgccgcgagcgcgccgcacacagccgcgaggatgggcgcctttgcgccgcacgtgaagaaggggatcacgcggttggtcatgatgcgttccttttcgtccgccagcgttctggtgttgatcgccgcgggaacggaacagccaaagcccatgatcatggggatgaacgcgcggcccgaaagcccgaatttgcggaacgctctgtcgagaatgaacgccacgcgcgccatatagccgctgtcttccagaatagagatgaacagaaacagcacgaggatctgcggaataaaggacaatatgcccgaaagaccgccccagataccgtcgttgaccagcccctgcgcccattccgccgcacctgcgttttccattcccagcgcgatgccgccgccgatctggtcggtgataaagcccattaaattaaagacgatggcgcccggcgtggagatcccttccgacgagtaaaagaccgtcacaaaggcatcgagtactccgttgcccgtatttacgtcgttcgcgaatccgaaaatggcgttgagatacaaaagatcggtgccgaacgtcaagtgaaagacggcgaacagaatgaccagaaagatgggaatgccccagatgcggtgcgtgagcaccttatccgctttgtccgatttcgataaattttcctttttcggaacgcgggtgagcgcgcccgaaaaatgggtggatatgtatttgtagcgctcgtccgccaccatggcttcgaaatcgccctcgaacacgtcgtccttgaactgcgccttgaattcctctaccatgcgcatctcttcggggtgggaggcgacttccaactcgtcgccctcggtgagtttgaccgcgtggaacagaggattatccacgcctttgcctttgagcgcgatgcgcacgtccgagatcacgtggtcgagcggcgtgcccgcgagcacggttttgccgtcgcgtttctgttttgccgcttcgagcgcgcgctccatgagttctttcacgccctcttctttgagcgcggaaatttccacgacgggcacgccgatctctctttccagttttttcgcgtccagtttgtcgccgctctttttcacgacgtcgatcatgttgagcgcgaccacgacgggcacgtcgatctccatgatctgcgtcgtcagatacagattgcgttcgaggttggtcgcgtccacgatgttgatgacgcagtcgggcttttcttccaggataaagtttctcgacacgacttcttcgggggtgtagggagagagggaataaatgcccggcaaatctacgatattgatatgctcggaaagttttttatatacgccttcgcgcttatccaccgtgacgccgggccagttgcccacgtgcgccgtggaacccgtcaaggtgttgaagagcgtcgttttgccgcagttggggttgcccgcgagcgcaaatttaagcatttttcacctccatacaaacgcaggaggcttctgcctttcgcaaagtgagttcgtaaccgcgcacggtgatctccaaagggtcgccgagcggcgcgagtttgcgcagataaatttccgcgccgggggtcacgcccatatcgaataatcttcggcgtatcttgccttcgccctcgatcttcagaacgactcccttttctcccaccgagaattcgttgagttttttttgcatttctttctatcctctatatatattctttataccagaattttcattgcctgcgttctgtcgagcgcgagtctgccttcgcgcacctttaatatcacgtttccgcccacctgcgataccaccgtgatcttcgatccgatggtaatgcccaggttttcgaaatgcctcttgttcttatcgtccagcaatacttttttcaccgtgagttcttcgcccgcgggagctatcggcaacggcataattcgctcgtcctccctgtccctgttctctgttttcgatgagagtttaccataattaactttttatgtcaagcattcgcgggaattttttgaaaaaatattttttatcacaaatttcgacgaaatcaaggcggatattaaacgcgcgagatctgcgttaaaataagaaaggagcgcggtgacttcgcgctcctttcttattttaatatcttataaattttccgctttgcgagcgcctctttcgcctcgccgttgccctgcgccgccgccttttcgtaccactttatcgcctgtacgaaatcctgcggcacaagttcgcccgcttccagacagagcgcgtacagatactgcgcctcggcgtttccgctctccgccgcgcgtttataccagtaggcttccttttccgcgattctgggcacgccgtcgccgccgtggtaacagtagccgagcgagagcattgcttccgcactgcccttttccgccgcctttttgtaccagcgggcgccttcgaacacgtccttttcgcagccgcggcccgcgctgtaacaggcgcccacgatgaactgcgcgtccgcgtcgccgcgctctgcggcaaacagataccaggaaaaggcggcgcggctgttcttttccacgccgcggcccgtatcgtaacattccgcaatggcgaaaaacgcctcgcggcagccgaattgcgcggcgcgctcgtaccactttgccgcgcgtttcatgtcccgccgcacgttatctccccgctcgtagcgcaggcctatcttgtagcacagatcgccgtcgccctgcgcggcggtctttttgtaccagaataaggatttttttgcgtcctttttcacgccttcgcccgtttcgtagcagattgccagattgtactgcgcctcttttagcccgcgctccgccgcttttttataccattgcaccgctttctttgcgtcttttctgacgccttcgccgttttcgaaggagagcgcgagattgtactgcgcgtccgcatcgccctgccgcgccgcctgttcgtaccagtacgcggctttttttgcgtcctttttcacgccttcgcccgtttcgtagcagagcgcgaggttatactgcgccgaaatgtgccctttccgcgccgcctgttccagccagaaggccgcggctgccgcatctttttcggcgtccgttccttcgccgagccgcaccgccagattgtactgtgcgacggcgtcgccgttttccgccgctttttcagttcttccgtctgcatccgcgcctcccgtatcattttcattttatgcagaattatagccgaacgccgcccgtttgtcaaacggacggcgttttgatttacttatacttctcattcgcggttgcgcatatcaaacagcgcgtcgatattttcggtaggcacgtcgcgttcgagcgcctggctcgccatgaggatatagcccccgtttgcgccgagcgcgcgaacgtagcggcggcactccgcgcgcacctcttccggcgagccgaagggcagaagcgactgcgtgtcaatgccgccgtgaaaggcgatctttccgccgaattcttgctgcaaactttcggggtccagcccgtcgaccttttgcagcggttccaaaacgtccgcgccgcacccgatcaacgcgggaatgagcgcacgcaccgcaccgcaactgtgctgttgataaaaacagtggtagcgatgggcgagatccgccaactttttggtgttttccgaaaaaaattcttcgaacagcgcgggagaaaaaagcaggctctgctgtgtgccgtaatcgtcgtgcgggcgcatgatatcaatctgcccgtcgcccgcaatcaaaatgcgctcgtaaaattccaactcgaactgcacgaaacggtcaaaaagcgcctttgccgtttcgggttccaacatcatcttggaaaacagatccgacatttccatcataaacgtggcgatctgaaaggggccttcatgcccgaaaatcagcgccttgtcctcatgcgcgccgcactttctcttcacgctctcgtaatcgaaatcgtcgggcgtgatccagtcgaaagataaaatgtcttttacagtcgtttgctcggaaaacggatagcggtgcatgacggaatgcgtttcgccgccgttatctttgagccgcacctcgccgccgtaaatagactgcgccagcgcgatatccccctctttccacactttggtgcggccgccgatatagtcgggatgacagtcgcaaatatcgatctgataatacgcggcgagcccgtcgaagttccgacaatttttctcgcgcaaaagcctgttcacgaccgcgggcgtcgcctcgaatccgacgggaacgcggtcgggcgcgcgatgcgagatcgcgcgccttacccgttcttttgacgtcatcagaactgtaccttttccgcgccgctctcgatcgaacagacggtgaactgatttttttgatagtttttcatctcgtcggtatcgctcgccttaggcccggaattccagttctgcaaataaaactggaagtaagcctcgccgctgggaaagagcgcgttgaaacgcgattcggtgatatttccgccctgacttaaagcacggccgtcgaaatacagagtgtaaaatacgcccaactcgtccgattcttttttcaactcgaacgtatgttttttgccgacgacggcgttctcttcctgcggattatcgcccttctgcacgaaattgttgcccttttcgttgactagaatggacatttccgcgcccgcgctcacctgcgcgaagggttttaagagcatgacgaagccctgcgcgaacgtgcccgacgtgtcggtcacggtattgaacatagtcgccttgtcggtgaacgcgaaggcgaaccaactgtcccacaccccgccgctgttcgtatcgttcttatggccgatctcgtcgatgataaaagtgactttgaacccgttttcctttatgttaaactttttcgtgtataccccgccgcacgccgcgccgctctcgctgccgtcgtctttctgccagaaaccgccggttcccgaaaaagtgacgcccgcatcggtatcttcgatctttccgtcggtatagtattctttacccgcgcccgtcacgctttcctcgtattttttgccgcccgtcgtgatcttccaatcctcgagcacggctacgtgcgagccgccgcctccgcatccgacgagcgcaaggccgaacagcgcggccaacagtatgacaagacatttctttttcatgatatttgatctcctttcagtttattttcaagttccgcattttcccgctcttcctgtctttgctcgatctgggcattgttggcgagcacgatgcggttgacgacaaaatagaatatcggaaacatgaggatcgcgagaaattcgctcgtataaacggcaacgagcaaaacgatcagcgcgacgcagacctccgtgagagtctgcaacaggtgcccgaacgcgtacagcgcggaatttgcgaacagccgcggcacgttcgattgcgaatacgccgcgacgggatagtgcatcgtcaggcaaaacgcgagcacggcgcaaaactgcgagacgtaatacacggcgctttgcgagactggaagcgacaagagaaacacgaccgccgcgaatacaagcgtatacgggatcccgcagacgatctttttgcgaaagacgcgaaaaaattcgctcacggtgaatttatcgtcctgcgccagcgcgcgcagcgccgcattgtaggcgatcagcgcgccgccgaacgtgacgatcggcaacgtgcacagcattaaaaacagcgtaaagagcagaactttatgcaaattgataaaaaaattcataaacccttcgccgatatagcgcggggaaaggtacagcgtcatggcgtcctttctcatagtttcagccccgaggcgaaatcgccgttgacgaaatatttcagcccgaacagggtggtgaacacgagcggaataccgcttaaaagatacatcgcgtaggacaccccctgtttgccgctgctctgggcgacctgcgccagatttttcaaaacgggcatgaggggctgtttggacgtttcctgtatgatgatcgtaggccatagaaaatcgttatacgcggaggcgaaagagttgaccgcctgaatacagagcactggtatggcgagcggcagacagatggaaacaaacattttcagttcgcccgcgccgtcgatcttcgccgcctcgaagagttccttgggctgttggcggaaaaacgtggaaaacaggaaaatggcggatacctgcccgcccgcgaccgtggggaaccagatcgcgaaccaggtgttttcgatatgcagcgcggcgcagaggatatacagcggcgtgagcgtgatgatggagggaatgagcatcagcaaaatgacgagtttgaaaagcacgtttttgccgagaaaatccattcgcacgaacacgtacgcggagatcgcgccgataaacacggtaaaaaaggtggaaaccagcgcgatgaggatactgttgagcatattcggcaaaatttccgtaaatccgaatttccagttgctccacatgatctttgtcgggatcgaccagatgccctgcaacagatcgtaattgcttttcagggaaagcatgattgtcaaaagcacggggagaagcacgagaaacaccacgatcgccatgatggtatatacggcggcctgcgagatcggcccgtcgatccccttgccgcggttgagagatcttttgttcgttttatcactcataactgtccaccgtctttaatttcagattgatgagcgtagccaccatcagcaccaaaaataagatcagccccatcgcggccgccataccgaggttattgaatttcgtcaggttatagtacatttccagcatgggcacgtatgtgcccgcggcgccttccgtggtcagatagatgcgctggaaatcctgcaccgaaccgatgaacgtgatgacgaaaatatatttgagttggggcgatacgagaggaagatcgatcatgaccatacgcttgaaccaggtacagccgtccagtttcgccgcctcgtaaaaggatttcggaacgcccatcagcgcgccgtataaaatgatataactgccgatccaggggaatccgaaaaagataagcgacgggagcgccacgccctctttccccaaaaagttgaccgattggccgccaagcgccgtgatgatgccgtttaaaagtccctcgttgccgaaaatgccgttctgccacattaaaagcgccgcgacgcccggtatgatgcccgggagataaagaagcacgcgcgtgacgtactgggcgcgcgacgagcgcatggcgatgatgagctgcgcgaacaaaaaggcggggatcagtcccttgacgatatccgtgacgagaaagatgaccatattccccatgcccgaccagaaataggtcttggaaaacagatctatgaaattctgccagccgacaaaggtgttcacgccgccgatatccacctcgtaaaaggcgagtaccagcccgcggaacgagggataataggcgaatatcgcgcacaaaagcaaagtcggcaacagcaggcaataggcgatcttgcccgcatacagtcgtttgcccgtcgatctcaaagaaaccgtgacgcgccgataacggcgttcgctgaaaagccccagcgcggcaatgacggtgcacgcgagcgcggcgagcagcaatacgatgccgacgtacgcgagaacgacgtacagagtataaaagcgcatctcggaccaatcatagcggtcgaccgtcgccgagccctgcgtccagatggaaaacccgtcgtccgcgccgagatacacgccttcgatcttgcctttgagcgtctgccgcaatacgacgttgccctgcatgtcgagttcggtacagcgtccgttctgatcgctgacgatgatcttatccgtaccgacagccatcgcccgattcgcggaattgagattttccagataaaaacttttttcaagttgcccgtcgaacgcgcctatgccgcccgcatcgtctaaaacgagcagtctgccgtcatccagaaatttacccgcgatcgggttataatccagtcccagcgcggcgtgcagttcgcccctgccgtcgtattggttgatgacgccgtacgaggaaaggacggtcagaagatcgctttcccgatcgtagccgaccgtgacgacggggatttcgagaaacagcgcgttgatgcgctcgcggtagatgagatcgctctcgttcgcgccctgcggctcgtgcaccgtgtcgggcgtgagatccaaaagattcagattttcgtcgaaacggtacaccttgttgcggttgactttcgtactgcccgcgacgaacagatcgcccgcagatacgctgaatgcgacgggattatagttgatcgccgtctgcgcctcgatcccgccgttttcattaaaaagagtgatctttctgtcttccgtggcgacggcgagattttcgccgagtttttcaaggagtaaaattttacttcccagatcggcgaacgttttcacgccgctttcgtctgcgcgctctatttttccgtcggtctcgccgtagtactcgtaacgttcgtcggcaaagacggcgctcacgtcgcttttgaggcggattttttcgggacggatcaagagcgaggaaaacagtacgctcagtaaggcgataaccgccgccaggatcagtgcggaaaagagaaaaaacatctttcttttacgcgatgcggctttccaaaaattgttcattttcattacctcgcgggatccagcgcgggattttgcgttgcgtccgtacggtactgcatactgcgaagccagtaaggaatgctgtttttacaggcgcgctcctgtaaatcattgcaatattttacaaggtcgccgcccgaaccgtaataagcctgagaaagttccacgtattcgcgcacgccttcgggttcgtccataaagccgcgggaaaacgcggcgagcgggttgctgtccgcactgcccgaaaattcgatgtcgtactttcccacccactgttcgggcatggtgacgtccttgacgagggaaatgccctgcggcgcgatattttcgcgcgccatggtttcgaggtagagcgtctgcccgcgcggcgagatcaagaacatgagaaaatccatcgccagatccgattgttttttgtttttgtaaataacgccgtagttaccgctggcgccgcccgtatcgcgggtataatccacgcctacgtcaactccctgcgtatgcgacaccatcggcggatactggaatacgcccacctcgaacttttccacgcccgtatcttcgaacgtacgttcgatgcccgcgtagaaactcatcagatcgatatagatcgccgcctcgccgcgcaaaaagtatttgaccgcgtcgtcgggcttgagcgacgtgaagttgggcggcacaaatgcgggcaccaaacgggacagatttttgatcatgtcctgaaatttgggatgcgcggggccgatctcaccgtcctccaccagtttcgcaaggcgtattttattgacgatgtagccgtcttcggtatcgttaaatttgtcctctttatcgaaaaaccaggaagtctgcaactcctcgtcgtacagataatccccgggctgcgcgacgaccaactcttccatgtcgcggaaatactggtcggtatagacgcggtacagccaaccgaactgccaagaccagaaactcgcgtaatcgccgccgatcgccagagggatcacgccgccctgctgcaaaatttcgcacgcggcgatcagatcgtcccagttccattcggaaacgctcttgcccacggcttgttccacgcccagttcctcgaagatctcctgattgtaaaaccatgcggtaacgacctgttcggtgttcaggctgtatatctgcccctccgtcgtcgattcggggtacgctaccttttccatcagcgttttccagaccgcgttctccgcgtagggattggggcggttcagatactgcgaaaaatcgacgaatttgcccttattgaaaaaggacgccgcgccgttgttgatgacaatatccgcagtgggcgttcctaccgtgagttggttggacagccaggtgttgtaagtgctgccctctttctgatcaagtttgatctccacgttttcgcgctgtttgcagtattcctccgcgatatgttcccagacgggcttttccacgccgaaatcccaggcgagcaccagcgtgctcttgcttgcgccgctctgataggtacagccgatcaacgaaaacaggaaacacacggcaagcgccacggaaagcgttttcaaaattcgtgcgagtcgcctcttcatgattcctcctgatttataaatattcgccctcccgccgcacggcgggagggccgacgccgttcgatcaacctctctttctgcggatcatcgcggcggcagcgccgagcgcaagcaagcccgcgatgccgatccccgcgcccgcaaatacggcggatccgcagcctttatccccttccttgtccgtatcgtcgggagggggcgcgatcgtttcttccttgacgacgatcttgatgctcgccgtcttttggttaacggtcgtgaccgtgatcgtcgcttcgccctctttcagcgtttcgatctctccgctcttcgcgtctactttggcaacggtttcgttgtccgaactccacgtcacgtccgtttcggtgatgcccgtcgcaggtttgaacgtatgaggcaaaacgaatttttcgccgggttttttctgcatttccgtaatgctgccgtttccgatctgtacggattcgggatacactttctgcacgttgaccgtcttgacgagaaagacgaactcttcgacgttttcgcccgcgacggcgggctgcgccatgccgatatgcagatacgcttcgttgttttcaaaatccgaaacgtgcatctgatagggcttcaacgttgcggaagggtcgttctgcgttcccgcataggggtcgcactgcgcggggaagatcgcgtccgcctggaaatcgaaattatccggattttccgcgttggctttcaccgcgtaagtatgttctccgatcgtgggaaacgcgccccagtcggtgttgcaggacaaattttcctcgccctgccaataaccgttttccatcagtttggtcttcatgccccacatcatgtaggtcacgcccttggcgctttcggaaaacaagtctgtattggctttctgatggaaaccgaccgaccaccattgcacttttttgttgaagtgcgcctgcggcgcgtcgctcccgtccgtggggccgagcactttcagcgtgacggacgcgttcgtgacgttcagcggcagtttcatatacacgtagccgttggtgaacgtgtcgtctttcgcaacgggcgtcattttcacgagcagtcccgtatccccctcgacgccgttgtaatcggtgacgtcttccatggaaatggtcacgttgggcccggccttttcggcaaagtattccttttttgccgcgttgaaatacgcgggctcctcctcggcggcaagggcgctgatacccgacagcatgcagcctaagcatagcgcgagaactgcaagcatactgacaaattttttcatgatttcctccttttattttgtatatgccttcaaagataagtcgctcatcgaaaacgtacaatcccagtttcccatgttttcccagccgacctggtaaaaactcaggcgcgtacgcggaattactgatatcgttataagaattgtagcggacggtcagtttcccctgcttgtcgctttccaatgactttacgaatttgggattcgattcgtacaaagacggataatggtcgtgcagatagtcgttgtactgttcgatcagcattttcgcggaagaattttccttgacttcgctcttgacgcaaagtcggaaatcgtgcagttcgtccacgggggaaccgagttcgtccacgatattctttttggcgccctcttccaattcccagaaggtatcgttttccgcgccgctcgacgtcacgccgtcttctttggtcgctttgcctacgggctgaatataaatatcctgcccgatatcgcggtaggtgaggggaacgccctttttcagcgcgttgtcgcccgtaaaactggtgccgtagatccagcccgcgccgaagccgcgatcgaactttctatcctcgaacaactgtatccagccgtcgccgctctgcgaccagtcgggcggatccttttcgttctccttgcctgaagatgcgcagcctgccagactcgtcatagccaataaacctcctaaaatcaatgcaagcccctttttattcatcgttttcctcccttttttatcttgcgcggtacttgcggtaaaactcgtcgtaccacagcgcgttatccacgggcgtgttgggcggtatgtgatttcccaccgccattacgaatccaggatagcgttttccgaactccatgacccgcttgacctctctttcgatgtcctctttgcttcccgaaagcagtacgcgcgtatcgacgtcgccgacgaacccgtgcgtctttccgtgtttctttgcgaacccttccatgtcggaatgcggttcgaaaaagagcatatccgcgccgcagtccacgattgcgtcggtaaactcaccgtaatttccgtccgaggtgaaaaggatctttttccctgcgcgtttgcagggttccagaagttttttcagatacggcaacacgttttgatcgtaccatgcgcgcgaggcgaacttgccgctcgtccaggtgatatcgtcgtgcatcatcagaacgggaacgttacttttggcgaaagcctcgtaaaattgtttcacccactcgtaataactctgcatgactctgtcgaattcttcatacgccatgcattccaaaaacatttcccagccgtacacgtacgtcagacccgataccagagtgatgtacaccccgcccatattcaccgtatccggataatcgcggcacatcgcctcgtattcccgctcgtaggtcgcgatgagttccgattgatcgaattcgccgtaaaatttcgtgcaatcgagcgcgagcgcttcgtccacgtctttgaacagtactgacgtgttttcgtccttatccgagccgcccgcagatgattccgcatataccgcgtgtcccatattggaaatttttccgaaccgttcgagatagtttttatggatgttcgcgtaccacagaagggaaaaatcccagtttttgataaacgcggcgctcgcgcggtcgcggttttcgatttttttcgtatcgatgcccgtcactttttcgacgagttcccaatgcacgtgcgcgctgtattcggtgcggggcactgcgtccggcatctgcatattgatcgcctgccagccctctttaaatcccattcgccgctctctccttctttagaaattttatcgtatattcgccgccttgcagccgttttggaagatttccgccctcgtaaagccattgcccgcggaatccttcgtcgaattcggcataacagcccgtcggaatacggagaaataagtttaaattttcttccttgcgttcccatgcgatcgccgcttcgccgtacacggtgcggaccgacgcggaggcattgtccaaaagtttgcagcacagaggactgacgcggatttttttcgcgctgccgatctcaccgatatccagacccgccacgaaacggtacattacggcgagcacggaaccgaacatgggatgattatgcgatacgggatagcccttgttgagcgtgcccgccgcgtccgcgtaatcgggggaaacgtcctcggaccagcattcccaaagcgtcgtggcgccctgtttcagcatatagccgtaagacggatagtctgtcttttgcaaaattttcagcgcgatatccgcacgatgccgttcaaacagcatacggaacagtatttccgtgccgaaaatacccgtatcgacgtgaaaaagcgtatcttcggagtaatgctctacacaattttgccagcacgtttcacgcaaagacaaaggcacgacgcccgcgtccaacgcgaaaaggtttgcgccctgtacgttgccgcaataattgccgtccgcagccaaaaatgcgcggttgaccgcatccgccgccgcctcgatctcttgggtaacgttttcccgttcgcccgaaagtcgtgaaaatttctgctgacggcgaagagattttatgtacacgagcgtattgacgaattcgggcggaatgagtactctctcgggacagaaccattcaccgagacaccagtcgcgttcctcgcggtcgataagtccctctgcgttcatgcgcgtctttaagtatttcgtccagcggcgaacgtgcggaagggcttccttcacgatctttttatcgcccgtgtgcctgtacaatatttcgggcacggcgcagatcgcatagccccaggaaggaccgccgcccccgcccgaaaagggcgcggtgtgcgggacgaatcccgtgacgccgtcctgcgcatcctcgatatctataagccatttgcggtaaaagacttccgcctccacggcgtagaacaccgcttcgcaggtgatctgtccgtcgcccgtatagccgcgccgctccctgtgcgggcaatcgctcggaattcctccgtgcatattggaaacgaacgtctgcgtacagacgtccgtcagccgttccaactgtcggtcggaacaggtaaattttgacggctcccccacataactgtgggtttcctgtgaaactacgctcagaattttacagggtgaatcccatacgatctccgcatatcggtaggcgtgcacggtaaattccgcggcgaatcgatcctcttcgccgctcaaaatcaagcggtcgttctgaataagaacgccccaactggacgaatagtggtcgacgtgacggtcgggcgtcatcttttcaccgtaaacgacgcgcacgtgcgcaccgcggattcccgaaatttttattgatagatttcccgcatgatttttaccgaaatccagcgtgacgctgttttcgaaataataactggcaacgggcaaaatacaatttgccgcgtaatcgccgcaagcgggcgccgcgcacaattttcccgtagggatctttttacagatgtccgccctgtcttttgcgatcagtttcgtcagatctgatttttcccgaaaatccacgcgctcgccgcgaaacagcgtggcttcgcgttcggtttcatagacaaaacacgtttcgtcgctcgcgacgatcgcagaggttccgtcggcatactccagatgcagttcgaaaagcgttttgggaatcccgtaagaatagtctccctcgacgctcttttccttatggtgataccacccgttgccgagaagtacggatagtacgttttccccctctttcaaaagaggtaaaacgtcgaacgcgttataataaatgcgccgtttcggctgctgcaccgcatagcagaggatattttcgagagcgcgttcgtcgtattcgctgacgagcggtttcagatatagttcgtcggtacgcgcgccgttgagataggatacatagtatcccagtcccgtcacgtagagccgcgcccgttcaagcgcgccccgcacgcaaaatgttttttggaacaggggcaattttccgcggtaagaagaaagttcgatccatcggccgctgcaaaacttgcccaagagtccgcgctcgaaataactctcttcggactctgcgacaagtttcccgttctcgtaaccccgaacgcgccagaatactttctcgcgcgcttcgcccgcactcacgtatgcctcttgcctccccgcctctatgggaacgcgaaaagccattttttcccgttcggttcttccttccgcgaaaaaccgtatggcgtcgttatgatcgcgtctcttttttatttcaaacgtcagccgcaccgtctttgcgtcggtgattgggcagatctccccgtttgtttttaaattgtcaatgatccatgcagtatccatcgttacggccattttacattattcatgcgccgttttcttgctttttcttaatataaaattgcttttttttgatatttctcttgaaaaacatggctatttgtgttagaattttgaacggaggaaagtttcatgaatcaacacaatcccggagatctgtaccatccgctcacctatgcggtctccttcgaagtcaatgaaaagcactgccacacgtcgtgggagttcacgatcattttgcgcggcagcgcgaaaagttttatcaatgaaaaggcttatttcgtgcagcgcggcagttttttcctttcaaaacccggcgactggcattattttcgcgtgacggacaaaaagaattacgaacaccgcgacctgtatttaggcgacgacgaaatgaaaaaggtctgcggcgcgctctcgcccgatctgtacgaaagactgaccgtcggcagccgcgaatgccccgtcgtgcagttgggcgaagaactgttgacgattttagacagaaaactgcggctcttgcaactcgccaatcccgacgacatcacggaaaacgacaggatcgtgcaaaaatctctggcggcgtttatgctgggcatcctcttcgaaaacgaaaaaaattccaaatatccgccctggctgaccaacgtactgacggaaatgaacagttaccgcatcatctgcggcccgctggaaaacgtggtgacgctgaccgactattcgcacgaacacctcacgcgcgaattcaaaaaatacgtgggagtttcccccatcgaatatctcatccgccaaaaaatgaattatgccgccctacttttgcggcagacggataaatcggttttacagatatcctcgcagatcgggtacgattcgctcagttattttatttcgcaatttaaaaaacgcttcggtgcgtcgcccggacaatatcgtaaaaagggaaaaaactaaaaaaaccccgcctttttaaaggcggggctcttttattttcagttgatttttacattggaaaactgtttcggaaggcgtagatcgtacgcgccgagatcgggacagtcggtagaaattttcagcgttttttgttccgtatcccattcgaggctgacggtatattgaaacagccgcagattttttgcccttccctttcgtaacgcggcgggcagagcgggcagtatttccactctgtttgcttcgcagtgaagaagcatttcctgcacggcgcagacgaaaccgagatttgcgtccaactggacgggcacgatatcgtccgagtgcaggctcatccccatccctctccaatcgttgtgcacggtcatcagattttgcaatacgtcgctcttcacgagaaatttcaggcattcgtacgccctttcgccgtcgtgcaggcggcagtacagattgcaaaggtgcgtgagcgaccagccgctctggtgatgcagcccgttttccgtgcggcgctctaaagcgcggcggcaggcttcaaaccactcgctttcctctttgatctcgtcccctggccaaagaggatacaggtgcgcaaagtggcggtgattatgattttccgaaaacccgtcgaagcaccattccttgaacgcgccgtcctccgtccgatacgcgggcaggcgattcagaatttgccgcatttttttttcgttttcatcggtttgccccgctcttgccgaaagagaaagatattgcgtaaaaacttctctgacgagtgcgacatccatcgccgcgttgattgccgagggcatgggatgcgagagcgtttccgcattttccccgacaaaattcttcggtgaattttcgggagatacggaaggatagatctcgatttccccgcgttcgttcagataaagaaaatcgagatagaacaggcagacttcttttaaaaacggaagcgcgcgcgaaacgagaaaggtttcgtcttgggtaaactcgaaatacttcacgtaaaaatgcgcgatccatgccgctgcacccgtccagttggtgatgacgggcacatttaccgccacgccccccatattcgggcaactatatgcgtgtatacaaatgccgcggcagccgaaaagttttttcgccgcttcgcggtattcttcgagattgctctcgaaataatcgaacacgggcagcaggcggtcgatcaaattaccgcaaaaagactgctcgtaaatcatttccagattttcgttgagtacgttttggctccactgcgcattgtaatcgccgaaccacagcccgtactgcgcgaacgggagcgcgcccgcactcgtgccgctgacgaacagatatcgcccgtaccgaaacattttttcgatgagttccgtcgaaagtccgtctttttgcgcttgcagcagcaactcttcgtttgcgtggctttttccccggtataagttgatctccgttccgcgatactgccttttaaaagcctttttatgccttgcaaagagcgtttcgtatcccttagtcaatttgatcgtttcctgaacgggacgttcgcggtttgcgtataatccgacgcaaagcagcgtatccgtagcgccgctcacgcggatttcggcgtttgaaacgctgatttttccgtccgtctttaaacacagattcgcgccgaaatacagtccgtcgtcgtttcgggcggaatattcgacgcgcccgttttcggcgcttacggccgcgctttccgcgacgtacggagggcagggaaactgactgtcgcgctcgtcgcgcgtgcgcaaacgcagaataaaggaatcttctatcgaactgcggataccgatatatgcgcggtcgtccgctgcgtcgacaaaatatcttcgctcgaaagcgtttccttcgcttttccagcgcacgcatatctcgccgctgtccatatcgagagaacgaaggtaattttcaaagatgccgcccttttcccgaacgatgtccagttgtcccaaaggaagaggaacggaacacgacgctttatagcctttttggacgagcgcgtcgcaaatcgcgcggtcggcctgtaaaaactgaccctttttgcgcagttcccgcatctgtttcaaagcatccgacacgtcggggagggacgtctttttcagcccggtccaaaggtcgccgcggttcaagagcacagtttcatgctgtacggcgccgagcacgttgatgcccgtccggccgttgcccgcgacgaatccttctcgccataaatttctatgccattgcgcgggataataagaatacagaacgttcggtttcatgatctcctcggttttttcttttattatagcggaaaaggaaaagccgttcttgttttttcatgataaaaagatgctttcttttgacaagaaaacatcttttttcttacagatcgaacagatccccgctttcgggcgcgcgggtgacggtcgccacgttcaaaacgagttcgccctcggcgatcttctcgctcttgccttctttcagaaaaaaaactttgcggccgttggtgcagacgacgccgccttccgcaaggctgaaatcgcagatcccgcttttcatctcctcttcctctccgccgcggatccgcacgagtttccaactcgcgggaataaaagcgaggtctttatccttgaactttttgttgcgcgcgatctccttgtccacttcgatcacgttgccgcggatgatcatttgacgggaatcggtatccctgcctttggcggggttattgccgccgcccgtcatcgtttttcccgtaaaaaacaccacgaagatctgtatgaagttgacgatcgccatcagcaatctatacggaatgagcaggatctccacgacgggattgtgccggtcccgctctttggcgggcttgcggatacagtaaatatcgccgttttcgtcctccacgggcttgatataagaatatttttcgctcgcgcggatctctttcaagtcgagggtattgaggtcgtactcgtaaacggccgcgggcgcgtattcaacgaattcgccgcgcgcgttcctgcccgccgccagagaatcgtacagaatgacgcccgggcgctttttggaaaacgacgggttttcgtcgcgcgaatcgccgtcggtgatgctgacgtaatcgccgcgctcggtatctaacaacacgaggtcggaagagatctctccccgtttgagttcggcgacgaatttgccgtccgtcacgttgtaatcggaagagaggagttccccgtcgttggtatgcaaaataaagcgttcgccgtctttttttgcggaaagcgttttttcgatgacgcccgacgtctgattcacggtaaacgtatagagcaccttatcctcgcccgcggcatgtacggaatttatgtacgcgtccacgcgcgtttccgaatccatgccgacttcggacatggtatccccgcggaacatcgcgcccataccgctgtgtttccattccttgttcttgaccatgcggcgcatgcgctcgcggtagtccgcgatatattggctcgcgtacgttccctcttccccttcgtccagaacgcggatgctgtccccgtcgctgaatacgattttttccattttctcacctaccgaaaaaagggcggaatcctccccgccgggaaattccgcccgaaaaaattactcttttccttcctcttcttctttgtcgtcctctttttgcggcgcgacgatcttgggcagggaaagccccgccatattgtacatttcttctaaggggggcaggctcttcaaaagcccgctcaaaaagttcgccgttgtggattttccgtccgcgttgttgccgccgtcccatacggtcactttgtcgatcttgatattcttgatcgcctcgacctgttcggaaacgagctgttcgagtttatcggcgatcatcaggcgcaccgcgtcgtccgctttgccgcccgcggcggaaaccagtttggcaataccttcgccctgtttggacagtttttctttcataccgcgcgcttccgcttccattttcgcgaagatggcgtccgcttcgccgcgtgcgatacggcggctctgctccgcgatggcatccgcttcgatctctttcttgcgcttttcgatctcgctcttgatgatgacgtccgcttcctgcgtggctttttctttcgcggcgcgcgtaagttccgcctgcttttcggcgacgtaactctcttcgagcgcctttgccgcctgtactttttccgcggtgacggcgagtttcaatgcctccgcttcctgttctctgagcgccgcgcgcgttctcgcgatctccgctttcgccttggattcgcccttgatcgcctggctctccgcttccgcgaccatgacgcgctcttctcttttcgcgttcgcttcgccgatggaaccgttcttatccgcttccgcgacggagatcttcgcgtcgttgatggctttcgccgccgcttctttgccgagcgcgacgatatagcccgattcgtcggaaatatccgtcacgttgacgttgatcagacgaaggccgatctttttcagttcgccctccacgttgcgggagatcgcttcctgaaatttatcgcggtcggtattgatctcttcgatattcatcgtcgcgatgaccagacgcaactggccgaaaatgatatctttggcgacgtcctggatctcggtgagtttcagccctttgagcctttccgccgcgttttccatgatggtgggttcggtggaaatgccgaccgtgaagatggagggcacgtcgatacggatattctggcgcgaaagcgcgctcttcaagtcgacggcgatggaaatgggcgtcagatcgagataggtatacgactgcacgagcggccagataaacgccgcgccgccgtggatacacttcgcgctgcggttgtttccttctttatccgagccgactttaccgaagatgaccatgatcttatcgggcgggcacttcttgtagcgcgtgacgagcatcaagaacatcatgaacagcacgagcaccacgactacgatgagtacgatgataaaaggttgcatatttctctccttatatttgatttaagttttgttacgcttctttgcgtttgacgatgaggcagtcgccgacgacttcgacgacttccaccgtttcgtcgacgggaatgcgctcttcctcgtcgctgaccgcgtcgagttcggtgaatcttccctgcgccgtcatggtgactttgccgcgcccgcttcttttgggcgggatgctgacgtaaacggtcgccgtttttccgacgatcttttccatgaccagcgtgccgttatcctgcaatttcagaatggaacggagaatgagccaaaccgcgacgagcgccgcgcctcccgcgacgagcgatacgatgacggataccgccacgtgcacgtcgtaagagagcatcaggagccccgtccagccgccgactgcaaaaaacgccacgatgcctttgacggaaaagggcgtaacgcccgaatcgccgccgccgtcggatgcgccgtcaccgtcgatatccccgtcggcgtccgcgtcgccgtcgcccccgaacaccataaataatatctgtatgatcagaaacaccgacgccacgcaggcgatgatgaaatacgtcttttccaatgcggaaagactgttgaaccaacccatagaaacctccttttcgaaaaaatttcttatactcttctattatacgtacaaaatgcggatatttttcgatttcgcataatttacggtataaaacgtgccgcctttctcttcgcgcaggtaggcgatcagcagatcgcccatgtccgccatgtagcggttcctgtcgaaataacagcccgtctgatagcgcggatacagaacgactttcccgtcgctcgcttccacgtaatttttatacacttctttctgccgcggcgaaaacttttcttcctgccccgcaaaggggatacaggcgacgatcgcgatatcgtacgtttcgcgcagtttatagagcacgcggcagcacgccgtatcgaaacccacggccatacccgaaagaaacagcgtaaaaccctcgccgatcagacggacgaaaatttctttaagttgcgtttcgtcgaaatcgtagcccagtttcctgtgccccgtgagcgcgcagatcttgcctcccgccgccagtttttgcaattcttcctttgtcacagcggttttccccgctctttcccgttaccgcgcggataagccgcgggggtggaaaaaattttttccgcgacgatgagcgtacgcttacccatttcctcggggagatcgtaccgctcgcaggcgaccgtttttactcccagaacgcggaacgcgttttcggcttcccgaagttcctcttctgcgctgcccttatacgcgataaagcggccgccgatctttacgaaaggcacgcagtattcggaaagggtattgagccgcgcgaccgcacgggcgcagcacacgtcgaatttttcgcggtacgcgcggttttttccgccgtcttcggcgcgcatgtggataacttgtatatttttcaggccgagttctttgaccgcctcgcgtaaaaaaacgcactttttttcgacggactccaccaatgcgaatgaaagatcgtcccgcacgattttaagcggcagcgagggaaaccctgcgccggatccgatctccgcgacgtttgcgcccgcgggaaagtacgtttcggcgcagatactgtccaaaaaatgcttgatgcggcattcttcgcgcccgataatgcgagtaagattgaacttttcgttataaaatacgagaagatcgtagaaagcctgcattttttgcgcgatttcatctctttccagtatatcgagatatttttgcgcccattgtgtatccatgaatttattatatcatacactttgcgaatttacaacatttttttcgaaacattgtccccaccccgatttttccacaagtggacaactttctgtggaaatcgggacaactcccttttttgtggttccacactccttttcgggaaaaaacacttccttccggcgccgggaagatttccacttatccacgaattgcccacaggtatctccacaaaaaaaagcctgcttgtccacatcttttgtgcgcaaagttgcttgctttttcgggcgtttttctatataataaaagcacctctcaccgtttcgggggagtttgtccacatttcaacagaacatattaataaatataatacctataaataaaaaaagtaaagtatcattcttcccgttcgggaaagggaattcgtttccattacggaggtttttatgaaagttatatgcgaagggctggatctttccgatgcggttatgaaagtcgtcaaggcgtgcagcaccaagaccaccaaccccattctggaatgtattaaaatttcggcgaagaacgacggattgacgcttgtatccaccgacggcgagatcgccatacagaaaaaaatcaacgcggaagttttcgaagaaggcgaaatcgccgttcccggaaagtatttttccgactttatcaagaaattggagaacgtgcagattaccctttccaccgacggggacaaactgaccatccaatatgcggacgcggagagcgtcatacaacttctgaacgcggatgattttccctccatcgacatggaaatcggcgagaatcagttcacgcttttgcagaaagatctgaaagaactgatcgcgcgcaccacgttctgctgcgcgcaggacgattcgcgccccgtgctcaaaggctgcctcatcgaggcgaaagaaggaatggtgactttcaccgccctcgacggttaccgcatggcggtgtgcaagcgcaacgtcatctccatgagcgaggatatttccgtcatctgtcccgcgcgcaccctcaacgagatcgcgcgcatgcttgcgggcgaaggagaggaaatcgtcgtctacgtgcagaagggcatgatgctcgtcagcgtggacgataccgttcttaccagccgcctttacgacggcgagttcgtcaaccgcgcgaatatcatacccaagtcgttttccagcgagatcgtcgtcgattgcgcggcgctcgccgcgagcgtcgatcgggcgagcatcctcgcgaggacggataaaaacagcatcatcgtgttcgatatcaaagacggcgcggcgaacgtcagttccaatacttccataggaagagtcaacgagagcgtaaagatcatgctcgacggcaaggacgtcaccatcgcgctcaactccaagttcgtgagcgagtgcatcaacgccgtcagcgacgaaaagacgcgcataggctttaacggcgcggtggctccttgcgtgatttatcccgtaaacggggacgcgtatctgtatttgttgctccccgtgcgcacaaacgcgtaaaaacggttgacagagcgcggcgtttttaggtataatattttgagcaaaaactaaaattaggagaaatctatcatgaaaagaacatatcagccgaaaaagagacagagaagcaaagtacacggtttccgcaaaagaatgaagacgcagggcggaagaaaaactttaaagagaagaagagacaaaggcagagcgaaactctccgcttaatttattttgtataccagactcaaaaaaaacaacgagtttcagagaatgtttgcgcggggaaaaaaatctttttccccctatttgcttatgatgtatatgcccgccgcgaaagtttcgctgggactgtgcgtcagtaaaaagcacggaaagagcgttatgcgaaaccgtataaaaaggcttttgagagaagcgttccgcgccgaatgcggacatctcaaatcgccctgtgcgatcgttctcgtacccaaacaagccgacgagtattctttggagaactttcgaaaaggccttcgggcgatgtttaaaaaagaaggcttatataaatgagtcggcaaaatttcagaaagacaatcaaatatcttcgcaggcacgtgtttaaaccgtatatcaaaatgttctgtatgcgggcgattctcttttaccaaagatatttttccaaaggaacgtgcctttaccgccctacctgttcgcagtatatgctggaatgcatcaataaccagggcgtcattttagggatattgctcgggtgctggcggcttttgcgctgcaatccgttttccaaagggggatacgatcccgctcccgagaatttcatccggaaacgatgggtcctgtgaatcagggacaagccatccgcgcgttttgcgcaaaaatccctttaaaaagagaaggacaacacaaagaatgttaaattatttattgcagagcaatatcatcactctgttctttaacggcgacagcgtgagtatgaattggatcgccaaactcatcaacgggctgatcaacgcgatcggcatcgttggcgttggcgtagtcgttttcactttgatattaaaactgatcacgctgccgctcgacgtctattccaaggcgtcgatgcggaaaaacagcctgaaaatggaaaaaatgcggccgcagttggaaaaattgcagaaacagtacgccaacgaccagcagatgtacaatgccaaaatgatggaactgtacaagaaaaacggctattccatgctcggagcctgtctgcccctcatcgtgtcgctcgtcgtattcatgctcgttttgaacgcgttcaacagttattccagatatacagacctgcaagttttcaaccagatggcgaacgattattctgccgccgttctggaatacgccccctcccgcgatttggatcccgagcccgtctatacctgttcggaatacgggaagaatgcggaaggagtcatgcagtataaagttacgatgaccaaaactttccgcgaagacggaaaatatatctcttttgaagaaacccagacgaagatcaccacgaataaagacgaccgcgattttgccgataccgatgcctatcccgtcagcacagtctactatgtggaaacggagacgatggtcgccgatccgtctatcgaggaaagtttagacgcgctgcgagccgaacatgagggagaggacgacgattttatctgccgtcggtatatgcagaatatcggacgcgccgcttcggaagaatcttatcacgaaaaccaggtcagtttcctgtgggtgaaaaatatctggtatcccgataccgcgttcaatcatcccatgaaaaattataaagatttcaagagttttctgggaatcaaagacaacggtaactttatcagcgaaactttttacaacgagatcacagccaatttgcagagcgaactgaaagagcccaacggatactttatcctgatcgtcgtatccatcggcacgatgttcctttcgcagttcgttatgtccaagagccagaaagcgcagaacgaattgcagacggcaaacggacagggcgcaaagacgcagaagatcatgatgatcgtcatgccgatcatgttcggtatattctcgttcatgtacagcgcggcgttcagtatttacatgatcgtaagttcggtgttcggtattttaagttcgctcggcaccaacttcatcatcgacaaaaagtataaaaaacttgaagaaaaagaacttcaggagaaatataacaggaggattccgcaaagcgcgaagagcgaagtcatcacgcggaatgaaaagaaaaagagatgaaagagtacgaattcatcggcaaatcggtcgaagcggccgtggaggaagggttaaaatccctgaatctgagcaaagaagaggcggaaataaccgtactggaagaggggaaaaaagggctgttcaaatccacgcccgcgaaagtg

SEQ ID NO: 4145 - DNA, 32759 bp, Unknown
  16S sequences of unknown bacteria
ctatgaaaggcaaatctaaaaaatcaacctattccacaacctttggtgttgacccaaaatgttccccggcagggattcgaaccccgactagatgaaccaaaatcatctgtgctaccattacaccaccagggaatttaaatacgataaatggagatgatcgggttcgaaccgacgacccccacaatgccattgtggtgctcttccaactgagctacatccccgtaaaattattttttgattacgacatttatagcccgcacagtcaattctattttttcttttttttcaaatttttggttgaaactttcaacgcgcgcatacattttatttcttgattacgcgcaaacacaagcgcataattataaaactgtttgcaaagtctaaatgggggattcgttttattttttgcaagcaaggcattaaaaatgccaaatagcacataaaactaacatattgcaaataaataatttacaaaaataagcaatgccaggccagcttacaaaattagtttacgcatcgactctcgctcttcttgtggcgctttcttacggctgcaaggaaaagtacgagcaaaaaaaattgccgcccgcagatactgtcgaggtcgccctcccggtcagaaaggacgtcgaagtttgggactcatatacggcaagaatcgaaggcgtcaaatccgtgcaaatccgcgcgcgcgtctcgggatacctcgaaaaaattatgttcactgacggcgactacgtccagcagggcgacgtcctcttccaaatcgacccgcgcccgttccaggcaatcgccgaagcctgcaaggcgtctgtaatggaaaccaacgcgcgcattgaactggcaagaagcaacctcaaacgcgccgaggagctcttcgcccaaaacgcaatctcaaaagaagtttacgaaacccgcaaaagcgagctgctttccgcagaggccgtcttaatatccgacaaggcaaaactaaaagaagcagagctcgacctcgaatttacacgcatcacttctcccatatctggatatgtaagccgcaggctcgtcgatgaaggcaacctcatcaacgcctcgtcaacccttatggcgagcgttgtatcgcgcgataccgtgtacgcatactttgaaatcagcgagcgcgacattataaaatacaataaaatcaggctctttgacaccatcgattcaaaaaagcgccaaggcccgcccgtccgcttaaaactccttgacgaaatcgcgccttcgcacttcgggcaagtgacgtatgttgacaacactctcaacgcctcaagccttgaactccgcgctgaaatcgacaactcttccggcgccctctacccgggcatgtacgctactgtcgagctccgcgcgggcgccccggcaaagcgcttgctcgtgccagaggccgcaataggaactgaccttgtaggacgcttcgtgtatatcgtaaactccgacaatatcgtcgaataccgcgcggtgaccgccggtgaactcgtcggaaagctgcaagttgtcacggcaggccttgacggctcggaaaaagtcgtcgtaaacggcctccagcgcgccgcccccaagaaaaaggtcacacccgttttaaagaagctgtaatactatgaaattttcccacttctttatagacaggccaattttcgcgacggttatctccgtattcatcgtatttgttggcctcatagcgttctcgcagctttcgctcacccagtacccaaatatcgccccgccgactattacggtaagcggctcgtactcgggcgcctccccggaggtcattatgaataccactctcgctccgctcgaacaaaagctcaacggcgtcgagggaatgatttacatgtccagcgaggctacctccgaaggctcgtggtccatcagcattacgtttgagacgggcgttgacatcgacatggcgcaggttctcgtgcaaaaccgcgtaaggcaggctgaaaacaggcttccgcaagaggttagggacgtcgggctaaacgtctataagcgcaaccccgatattcttttgactatcaacctcgtatctccaaacggcacacgcgataaaatatacctgtccaactatgcaatcacgcaaatgcaggacaggctcgcccgcatatacggcgtcagcgaattcggcgtgtggggcgcgaaggagtacagcatgcgaatatggctcaatccggaccgccttgcagccgtaaatctgtcgccgattgaagttatcgacgcgctgaaagaacaaaacacgcaggttgcggcgggaaggctcaatcagcctccaagcgatacgggcgccgcgttcgagcttctaatcaacgcccgcggaaggctcgaaacccccgacgaattcggagacataatcgtaaaatatacgccggacggacgcataatacacttaaaagacatcgcgagaattgagctcggggcatacagctattccaacgaatcatacatcaaccaaaagagctcggtgtccatgggcgtgtaccagcttcctgggacaaacgccattgaaactgtaaagcggttgcgtgcggaattggaggagatgaaaaaatcattccccgacgacgtcgattatattatcgggtatgacacgactgaatatgtgcaggaatcaatcaacgccctttacagaacaatttttgaggcggtaatactggttgtcttggtgattatagtattccttcaaaattggcgcgctgcgatgattccgctatttgcaattcccgtatccctaatcggaacgtttgcgatgatgtacgcgtcgggatttaccatcaataaccttacgctgtttgggttggttttggcgatagggatagtagtggacgacgcgatagtcgttgttgaaaacgtcgagaggaatatgaaagccgggttggacgcgcgcgaggcgacaaaacaggctatgagccagattcagggcgcgcttattgcgattgttctcgtactcagctccgcctttttgccgaccgcctttttgcccggcatatccggacagttttacaggcagttcgcgatgacgatttcaacctctaccatcatttcaggattggtttcgctgactctgactcccgcgctgtgcgcactttttatgcgccactcaacccacaaaagcaagagcatattcgactattgctgggagtattcaatagggttcatactaaaatattttaatcttggatttgataaatttgcggaattttacggaaagtttgtaaagtttgtggtgaggatttcgctgataatgctcatattgtactgcggaatgatttgggcgacaaaggaaattttcgttgaaaccccgactggcttcattcccaagcaggacagaggctcctttaacgcatggctaaggcttcccgacggaggttccttcgagagaacggaggaggctgtcataaaggcgggcaaactcctgtccgacatagagggcattcgctacgccgtcacgacctcggggcagggcggctcgagcgtcggaaggataaatttcaggttgtcggacagaaaagagcgagacaaaaacggttggagcctcgactatataatggacaaagtaaaaaaagtcctcgaccgcgaaatactcgaagcaacaatcaatgtgactacccccgcgacagtgcccggcatcggaagcggaagcgacttcaagctgcaagttcaggacagagtcggtctcggggtattcgagcttgaaaagtacacaaaccagctcatcgagcagataaacgccctgccggctgtgtcagacgcctacacaacctacacaactaacaatccgcagctgtacgcgacaatcgaccgcgaaagggctcaaaagctaaatgtatcaatagactctatctttaagaccctgcaattcaacctcgggtctgtctatgtcaacgacttcaatattctcgggcgcgtttaccgcgtagttgcgcaagcggaggctggcaataggaaagatattgacgacatatacaagctaaaagtccccaacgaccttggacagaacgtacctttggggtcggtcgtatctataaggcgcggcatcgggccatataaaattatacgctacaatttgtatccgagcgcggaaatccaagggaacttgaaccacggatacagtactgggtacgtaatgggcgaaatagaaaagcttgcggcaaaaatccttccgcagggaatgggtattgaatggaccgaccttgcataccagcagaaaaaagcggggaattcctccatatacatatttgcggtgtgcgtgatattcgtatttttgctgctctcggcattgtacgaaagttggacgcttccgctttcggtcatactcgtcgtgccgctcgtgattttgtttgcgatgataggcgtcaacatcagggggctcgacaacaatctaatgacgcaaatcggatttgtcgttctgattgggctggcgtgcaaaaatgcaattctgattgtggagttcgcaaaacagcgcgaggaccacggagaggaaattgtgtcggcagtgagcacagccgcgaaaaaccgcctgaggcccattgttatgacgtctttggcgtttattctcggggtggctccgctcgcttacgggacgggctcgggcttcgagcttcgccagtctctcgggacttccgttatgtttggaatgataggggtgacaatttttgggtgtgtatttacaccagtattctattatgtcataaggaaactttttgcctccaagaagaaggcgcccgccgaggcttaggacgtttgctggattgacatttatttagtagtgtacatatcgaaataaatatgaaaaaactatttcttattgtagttgccgcaatggcggcgtctgtctgcgcatattcgcagcaggcaaaatcgccgcaagaaggtgtagcagccgacggcaaaacggcagtggcggaagcgactgttgcatctgcagagaaacccgccgaagctgcaaaagccggcgccgagcctgcaagcggcgggcaagagcaggctgccaagactgcccaagatactcaaaaagcgggcgaagataagataaagctccccgaaaccgaaaaaaaactgactcccgaagaattggagcatattaaagagcagaaaatgcgcgaccgcgcagctctaaaagaagcatacacaatcaaaggtcggatagggcaatttgtaaaatcgatagtatctgaaagcgatacgcttaaacaatttgttgcccaaaaagtatttggtttgtatgtagcgcaatacattctcgtttcggtaatacttcttgttacgctgatttttgcaaaatatctgctcgggtatttattcaaatttctctacaagacttcaaagcgcggggattctgagaacttcgcaagccttttctttaaaaaagtaaaaaagccgataactacgcttgtttgcgtgatggggctatatctcgccgcaatggtgatagtcacccagaagggctcgctcattatattgaacagggcggcggctgtcgcgttttgggcgactgtattttggctaatcctcaatacgttcgacgttttctttgcattcgccgaaacaaagctcggcaaaaaatccatagctgctgcaagcctcataaacttcttgcggaaagtcgtaaagacaatcgtgatagtaattgcgctgctgtccattctcgacaatatgggcgcaaacgtaaacgcgattctggcttctcttggtatcggcggtatggctcttgcgtttgcttcgcaagatacaatcgcaaatttcttcggttcggtttcgattatcatcgaccgcccctttattgtaggcgactggataaaaacgctctcttacgaggggaatgtcgaagtaataggcttccgctcgacgagggtcaggactttcgacaaaacgcttgtgacaatcccgaattcaattctcgcgaaggagtctgtggaaaacttttcgagaatgccgacaaggagggtcgtggatgtcattgggcttacatattcgacaacagcaaagcagcttgaagacataataccggaaatacgcactactattctttcggtggagggggtcgatccgttctcagtgtcggcgcgcttcgacagctttggcgcgtcgtctttaaatataaaaataatatactataccaaaaagataaattacgattttcacacggatgttaagtcgaaagtcaattttgccattatgaagcttattgccgacaggggactgtctttcgccttcccgtcaacctcggtgtacgtggaaagcatgccgagcgttgctgcggaaaagtaaatgccgaaaatgttttaatttttatcctgcgaagtttctcatatccgcagtggaaagcgcgccaatttattttggcgcgtttttttgtgtgtctaaataccgataaagttttaatccaaaaaaaattccctttttttaaaagtgttttgccctttttttgttttttttgttttttttgggttattgtttaaaatttttcttgaaaattccacatttttataatttcataagtaaaaaaccaaaatattgccgaaagactcagtccaaaaacggcggataaagtttcggcaagcgacttcaaatatgaattttacaaaagataccccccgaggtgaaatagagcggataattcgcgagacggtttaccgcgaaatgaaccttccccttccaaggcgcacggaaggcccgaatccgctcgtggtaaacgtaagcgcgcggcacgtacatttgacgcaggaagcggtcgaagctttatttggcaaaggatacaaactttcagtgcataaaaatttgtaccaagaggggcagtttgccgcgaaggagtcggtcactctcatagggccgcgaagcagggtgatttcaaatctgagaatactcggcccgtgcagaagcgcatgccaagttgagcttgcgctaaccgacgcccgcgcgctaggctttgaagttccaatccgcaatagcggcgacaccaaagggacgcccggctgcatgctcatggggcctgcgggtttttacgaaatgcgcgaaggcgtaatccgcgcggcgcgccatgtgcatatgcaccccgacgacgcaaaattttacggcgtgcaaaacggagactttatgaaacttaaagtctatggcgaaaacgcctccatttttgaaaatgtgttgtgcagggtcgataaagccctaaaactcgaagtccatatagataccgacgaaggcaatgcctgcgacttgggcccaacctctatatgcgaacttgtaaaataaaattttaaatcgaaaaattgaaaggcaaaatatgagtcaatcactcggaatgatagaaactcgcggattcgccggcgccgtggaggcgaccgacgccatggtcaaggcggcggacgtagaattcgtgaaacaggtgcaaatcggaagcggatacgtcaccgtcatagtgcgcggggacgtcggcagcgtcaaggcggctgtcgaagccgggacacaggcggcgcagtcagtcggcgagctcgtctgctcgaacataatcgcgcgcccgcacgcggcgctgctcgaaaaaatgggcctctaatttgaaaggattttagataatatgaaacaggcattggcaatggttgaaacaaagggctttgtagcggctatggaagccgcggacgcggctctcaaatcggcgagcgttgaactcctcggctggaagaaagtcggcggcgggctcgttgcgatattctttaccggagatgtggcttctgcaaaagcagccctcgaatcggcagttgatgccgcttcgaaagtcggaactgtcgaatcggccgcagtcatcgcgcgcccccacgaagatctctcaaagctcggctgcttctaagctcaattacggcgcgcaaggtgaaaaaaatcctcatagcaaacgtcggctccacgagctataaaaacacccttttcggaatatctgaatcgggggagtgcacggaattgttccgctcgggaatcgagcgcgtgtccgactttgaatccgcgataagggagtcgcttgaggctctcgaaaaggcgggattctcgccggacagcgtagatgccgtagcctttaagacggttttgggcaaagacctttccggcctgcgcgaagccgacgacaatgtgctagaggcgctggaagctatgagctttgtcgcacccgcgcacaatccgccgtacgcggcggcgattcgcgccttcaagaaagttttgccgcgcgcgcgccgcatagcattgtttgagacgtcttttttccaatgggccgcgcctgaatggaagaggtacgccgtgccgaaaagctgggagtctgccgggatatgccgcaacggattccacggggcaagccacaagtacgcggcagaacgctccgcggagctgtgcgggcgcccagatgccgcggaaagcgcaaaatacctctaccaaaacaacggccgcgcgaaactcgaaactccgttcaggctcgtcaactgccatctcggaggttcttcgtcggtctgcggaatactcgacggcgcggcggtgggctcgagcatggggtttagtccgcaaagcggccttccgcaaaacaaccgagtcggcgacttggatccgtcggttctgccgtatgctatgagcaagctcggaataacggcggaggaggctttgcgccagctttcaaaggaaagcgggcttctcggaataagcggtgtttcaaacgacgcccgcgacatcgaaaaagccgccgcagacggcaacgccgacgcagctctcgcgctgaatgtcttggcatattccgcgcgctcatacatcggggcattcgccgcaaacctcggcgggcttgacgccataagctttagcgggggcataggggaaaattccccccaaacgcgcgagaaaatactcgccccgctcgaatttatgggcgtagttgtcgaccgagaaaaaaatgaggagtgcgtccgcaaaaaggagggaataatttcatctcccgaatcaaagataaaagttgcggtaataagcgcaaatgaagaaatcgtaatcgcccgcgaagccgcaaaacttctctcaaagacttcaaaaatttaaaattcaaaaaaaggaaaacatcatggcaaacgcaataggcatactcgaaacaaaaggactaaccgctctcgtcaagggagttgacgccatgctcaaagccgccaacgtcaccctcgcgggacaatataaagacgcagggagcgcttacgtttccgcgtacgtcacaggcgacgtcgcaagcgtcaaggctgcaatagaggcgggctccgccgcagcgtcggaagtcggcaaggttgtcagcgtagacgtcatcgcaaggccccatgaggacctctccaaaacggttctcgccgccgctgccaccaaagcccccgctaaaaaataaaagcattccgcaaccatgtttttggcgaaagtaataggcaatgtcgtatcctcgcaaaaggacgacaaacttacgggcaacaaattgctcgtgcttcgcccgcttacaatagagggggaaaatcccccgaagtttgcggagggtaaaaacaccgtagttgcggtcgataactgcggcgcgggtgttgggcagctcgttttgttcacacagggctcgagcgcaaggcaggcgactggcatgaaagaactgccgattgacgcggctgtaatcggactcgtggacaaagttgaggcccattctaaaaaaatattcgacaaacagtaaaatccgccgcgcaatccgcgcggcaaaaggcatattcaaatgaatttgaatctggacgaagaatccatacgcaacatcgtgcgcgacgtcatcggaaagatgaacggcgttcagcgcgcgccttcccggcccgcagaatttcagcagtccctcggaattttccctgacggggcatctgcggcggcggccgcgcgtgagggatacgcgcaactgtgcaagggcggaatcgcggcgcgcaaggaagtcgtggacattgtaaagtctatgactgtatccaacgcaaaagagtggggcgcctttgaatacaacgaaactaaaatcggcaggcttgaagacaagataggaaaactcgagattgtaaaactcgtccccggcgtcgaatggatagcgcccgacgcgtatagcggagacaacggaataatgcttgaagaatacgccccgtacggcgtaatcggcgcgataactccggtcactcactctgttccgacaatcgcgggaaacattataaatatggtcgcggctggcaatgccgtagtgtttaatccgcaccccggcggcgttaagagcgctgttatggcaatatccgcatacaatgccgaaatagagcgccgcctcggcatcagaaatttgatttgctgcgtgggcaacccgactctcgaatcatacgaggcgattgccaagagcgacgacgttgcgataatgtgcataacgggcggccccggagttgtaaaagccgccatgaagtccggcaaaaaatccatttgcgcgggaccgggcaatccgccggttattgttgacgaaactgccgacccgaaaaaggctgcttgcgacataatagcaggcggtgcttttgacaacaaccttctgtgcataggcgaaaaagagattttcgtcactgaagccgccgcgagcgcctttatgcgcgagctcgaaaacaacggcgccgaacgcatatcttcggccgccctcgacaggcttacaagcgaggtctttgaaaagaaaaacggcgggtacgcgctgcgccgcgcgctcgtgggcaaagacccgcaagtgctcgctcgtgccgcgggcgctgagatatccccaaagacgaaaatgctgtttgccgagaccgacgcaaaccacccgttcgtaatcgaggagcaaatgatgccgatggttccggtggtggtcgtaaagaactttgaggaggctgtccgcgcggcggcgaaagccgagcgcaattacaggcatagcgcgattatccactcgctcgacgtgacgagaatgaccgaaatggcgagggttctaaacacgacgctgtttgttaaaaacggtccgtcaaccgccgggctcgggctcggaggcgaagggtatttgtcgtactcgatagcgactgccacgggcgaaggcatttcaaatccgaaaacctttacgcgccgccgcaggtgcgtaatggtcggcaacctgaatatattctaatatggtagtcgccaaaatagtggggaatgtggttcttgcctgcgcgcacccgagcgcgctgcgcaacgcccttttcctctgccagccgctcgacgaaaacgggactgaaatatcggacccgatagtggccataagcccgttcggcggcggaatcggctctaaagtactggtttcaacagacggatctgcggcgcgcgaatatgtcggcgacccaaacagcccaatcagaaactcgataatctgcgttatagacgaaaaatgaaacttgcaaaagtcataggcagagtagttctttcaaaaaaagacgaatcgcttccgaacggatttctcacgattctttcaccgcttcaaaaaagcgccgtttatggcttgaacgctgaaaccgcaagcgcgggcgagccttttaagctcgttgcgtacgactcaaacggggcggttcccggagatacagttgcgtacgttgaaggggcggaagctactgcgccattcgattctcccacgcccgtcgatgcgtattgcgtcggaatcgtcgaaaaaataaactcaatttacagatagatttatgaagaaagtttttacagcaaaagacatagccgaactaaaacgttcaggcggcgctcttccacctgacgctattttgactccccaggcaaaagaggttctctcgggcggggcaaagatttccacgtctgcgccagcgccaaaggcggcagcggtttcggctgttggcaggaaagaatataaaattcccgaaaaggagtataaatggactcccggaggcgatcccaaaactccgcaagagcttgaaaaatttttcttttcaccgcaaatccaggcgttgaaaaagttgatagtagacctcggcaggcgttcgtacggcaaaaactacaacgacggaaacggcggaaatttttctgtgagggtaggcgacaatctcgttctttgcacgccaacaatgatatccaaaggctcaatgagcgttgacgacatgtgcttagttgacctcgacggcaaccagcttgccggaaaccgcaagcgcacgagcgaaattctcgcgcatcttgcgataatgaagcgccagcccatggcgaaagcctgctgccacgcccatcccccgcacgctactgcgttcgcaatatccggcaaaaccccgccgcgctgcgtaaatccggaaactgaaatttttatagggcaagtggggcttgccgactacgggactcccggcacacagaaaatggccgacgccgtcggcgtatgcggaatcgaccacgactgcgtatttatggtcaaccacggtgtaatgacctgggcaaacgatatcgaaacggctttctggaaaatggaaaacgtcgaggcgcactgccacacttcaatgctcgctttccaaattggcggcccaataaaattctctgaaaaagacgcaaaggaactcgtaaagattagggacgcgatgggaatggtccaccaggacagccttaaagaatgcggactctgcgattcctccgacgatgcgcgcggctgcgtatgcgcctcaaagagcacggcttccgacgctggctacgattgcgaggccgaaaagctcgtgtcaaaaataacaaacatgataatttcggagcttaaaaaatgaaagtttcaataatcggaggcggcggccgagtgggagcatgcgccgcgtacgcgctcgaatgccaggggttggtgtcggacatccagataatcgacgccaacgcagatgcggcagagggcgaggcgctcgaccttctccacggcgcggctgtgctcggcggacagagaatttttacaggctgttacaagcgcgcggcaaataccgatatttttataataactgcggggctgcgcagaaagcccgacgaaagcaggctcgacctcgtaaaccgcaacgtgtcgctcttccggcaaattttggcttctgttaaggagggcggatataagcgtgacgcaatagtgtttgtcgtctcaaaccctgttgatatcttgacgtacattgcggaaagggagctcgatcttccgggcgggcatgtgatagggcttggcacaatgcttgacacttccaggttccgctcgctcatagccaaggagctcaaagtgcccgcaaaccaagttagcgcaatgattcttggcgaacatggcgactctatgttccccgtatggagcggggccactgtaaacgggctgcccctaaaaagctacaaaggcttcgacgtaaatttccaaaacaggatatttgagcgcacgcgctcgagcggcgcggaagtaataaagcgcaagggcggagcaggctgggcggtaggggcttcaatagccgctgtcgtaaaggctgtcgcgctcgacactcgcgaaattcttccgatttcctcggttcaaaacggggcgtacggcataagggacgtggctcttagcgtgcccacaatagttggcaaagacggcgcgcaaaaaagcgtggagctcgaactttggcctgttgaaatgcaggggcttcgcaattcggcgtcggcgctgaaatcgaccctcgcaaagtgcctctaagcctgccagccccgcaaaaagcgggcaaggggagcgcatttattgatttatctcaaaaggtttgaggaaggcttaacagggcttaattgggcttaaaaacctttaaaaatcgggagttgtgggcggttggtggtgttgggattggtttgaggaaaaaaacgccgttcgggccgataatccgcaaaaaaatcgaacgtttgaggaaaaaacggctctttgcggacaaacaggaatcgactgcgttgggaatcggattgtctgtgatcacgctccggaagatgcggggatgtcggtaaaaatgttgtcgctcggcaaatctaaaagccgttaaaacccattgaaggactaaaaaaagggcctgcaagcgcgttgcagaccccgtaaaacagccttgaaaaccccatgcagactatttgcaaggcgttagaaagcccgcctttagaaggtcagccactgtgttgtcgaaggtatccgtacggatcgtcgatccgtcataggttttgcagcgctccgccaaagcgcgcacaaatgcctccgtatcggcctccgggttgaaagacgaggctcttatcgcctcgacaacttctcgggcgttgtcgcccgatattgtccctccgccgcgcatttcgtattttgccatattttatctcctttcgaacttttgtttgcgttgtttgtagaaatctaccaggcctctgtcgaggaatttctcaagggctcgctcgcctccgcgatcgagtttttcgcgctttgaaaaatcgacgaatcgcgcgcaaaagagcagccagtttctgattttgtcaaattctatcgtgccgctgtgctggcgaaactccaccgtcccgtgcctccagtagctttggctgttgagcttaaagtagcggctacggtttgttacggctctttcaaggtcaacaagcgtttgggcggaatccatcttttcgcgccagttgcaaactttaaggcttgagcaatatctgttatgtctgcggctcggcggcatgaaggcgtcgatgtcctcttcgagcgttgcgtagtttgtgtagaggttgcgccagaccgaaatgctttctttgaagtcgtccgtcccgaagtgggcgtggaatccgcagcttttatttatcaaggctccgacttcggaaagtgcctcgcagacggcttttacttcgtccagcccgctctgccctttgagcaccggacttacaagctcgtagccgccgttaaccgaggcgtcggatacgattttccaatatctgcgcgtcgaatggttgtacccttcgatttcgcaggggataccgcgcgagcggatggcgtcgcggagctgcctttgcttgcggtggacgatttcaagctcgatgccgaagctgcggctgaaaacaaaaccgccctctactgagagagggcggttggagaagtatttagcgtagacgttttggacgaatccgtatccgactcccaagagaagggcgacctcctttcgggtcttgccctcgtcgaagaggcggcgcattttgtccgatttcgtaaggcttgagtttaatatttcttctacattcatggctgttttttattgtggtgcgtacacacgctctacagccgtttgaagtcaagtctctctggacgatttttttcacttttttttcgcggcatgaacgccgtcatcggatgggttgaatggataatccggatgggtggcaaactctatcattgccagattggcgatatctacgagatgctcgcggttgtggtcgctcttatatatagagagacgtttttcgattgaacctacattgtcgtactttgccttgccgatttgagactggaggctgccatagcgaaagtagcccatcaacatgcggtttttgcggtaggtctcgaactgcgggcaggattgaagacgtgcgatatcatcgaggctcggagcgggctctacgggcgcaaaaatacccgcctgttcgagcaagcgggcgcggagataatcatggacggtcttaggcatattgggcgagtctccttaaaacccactcggcaacgtccactgtcacggcgttcccgcaagccttatatcgcggcaaatcgggacacttttcggcggatttcccccgatacggaatccgtgtccagttgtcggggaaaccttgcaacctctcgcattcgagcggcgtaaggcggcgaacgccaagtgtgtcgggcaacattgaaacgtttctgccgctcgcgtttgaattggtattcagtgtaggcgaaatgtctccgccacgaatttctccgagctgattttgcgaaaacgcgactccgtgaacccccgttgtattgagcgtgtaggacagctcttcctgcgctccaattccgtttccgccgttttcgaccttgcgcccgattacattttcggcaatacaaacggcttgactcgacttgacgccgagggcatgcgcgtgttcggtcgaacatataggatcttgcgaagcatggacacaaatcggcgtattattaccgcctgtgcccatttttgcggagagcgtaggagcgacgcttccgctttctttgatgcgggaatcttgcgaattgttttcaaaaacgataaagttttccgtttccgcatcgtagcgatttccggttgtgagagttttgccgacgagtgttccggcaatcaaagttccccctccgccctttatatccccgcctatgcggagagttaccgcgtttctcgattgattgtaagctccaatgccttggttagcaaagtaggcaatgtttttccccgccgtttcgcccgacgcaatattcccgcgcacgccttcgcgctcaaagagtatttcgggtcggggcgtacttccaagacttgcgacaaggtagattctgcgccgtctttgggagattccgaaaaaccgcgtatcgagaatcctataagtgacggagtagtctgactctgttcgtgagcggacaaagcccgctcctccccatttacgggcgtcaagattccaccctgtaaattcggagaggactcgcgcaaaatctcgacctttgttcgacgagagagcaccgggaacattttcccatacgacgaactttgcgccgagttctcgcgcgacgcgaagttgcccgctaaatagatggcttctattatctccaaatcctcgttgtaatccggcgacagagaatccttgacaggggcttccaccgcagacaatgtcgatttttttaaggcctgttttttcataaaaagattttttagttagagttctaatgtcgtcgaaaatcggtatttcgggaaagcggtgtcttaaaaccgcctgcgggaaaggctcgatttcgcaatgcgcgacgacctcgaatcctgcgaggtgggctgcgatagagaatccgccaataccgctgaataagtcgagtatcttcatctcagaacgggaagtcgtcgggatcggcttcgacgtagccgctttcttcggcgggtttttcattattatatagagtgcgtcccttgcgctcggcggatttcttgcgggctttgcaggtaatgaaaagatcgtgcatctcgcaggcaaggaggtcgcgccatgcggttgtgccgaacctgtcccttgatatggcggcaatgtaggctggcggcatctggagttcgtcgattagcttggctacgcgacgggcttccccctccatgtatgcccagatgattttttcggggaatattgcaagttgcgactgggcgagcaactcgcgcatcgcgccgaacactacatcgtaatcgccgtgggaaaagactttgtggctcttgtgcgttccgaatatttcaagcgtaagttcgcggcgcatttcctctttttgggcgttcgaccagccgaatttgcgggcgatttcccgccacattccccagtatttggattcttctccgcccatcttgcgttcgccgcgaacgacctttgcaaccgccctgcgggcggattgcaacggtttggaaaacggtttgcaaacggttgtcatggctattctccaacctccttgtcggttttaggctccacatagaaacgctcgacaacttccatttcaaagagttcttcaatttgcgagtcgcgcttttttagcgcttttttgatgccggttttatcgaggctgtaagagactttggcgcaatctgtgcgcttgcgttcgacaagctcgcaggctacaacattgtcgggtttgccgctcttgttgcggatagttgtctgccctgtgcggaagccatacattgaaagcggcgaagatgcgctcttattgcgccccataagctccgccttgcgcgcggatacgaacggcgcaagagcaagctcgcgggcgtcgcgctcggcctcaagctcctttatttgcggattgtattgctcgtttatcttcaaagtcgcggcgtcgcgcgcgacggtaagtttgcgaatttgaacctttattttagcgatggcgtcggcctccgcttcaatggcctcgcgcgttttcggttctttaaatatgactgccatgatttttcctttctttaatctattacatcaaaaaaattgtacatttttgcggcgcggattgcgtcggcgcgcgttggataagaaccccaagtaattgtgccgtccggagtctggaaatgccacttgccgtcggagtctttgaagacgcgcacgctctcgacttcactaaaattgtcagtgccgaagattcgtcgcagcgcgtttatcaagattgtgatcacgttcatgctattcccagtccgactttgaaattctttgtgcttgaatgtaaagatgtgcggcaacgaagctttcccaagagacgactcccttgccaagcttgcgcgcgtagcgtatgcgctcggtaatgcttttaaggccgtcctcgcgcgcgaggacgcgcagaatctcatacggctgttcggtgacccgctttacttgaatcgtcatcgagcgttcggggaactcaagcccgcttgattttatgattgcggctacgtccgcgcgcgtcggataaggcgggagttttattttgtgcacgcccctgcggtagagctgctcgagaactccgttgcgctcgcgcattacgctcgtctcaaacatctccgttccgcatagaaccatgccgcagccagtctcgtcgtaaatctctcgcaggacttcaagcgcttgaaagtaggtgtaggatttacttgtaaggttgagttcatggagctcgtcgagtataagcagcatgttgccgcgcacggcgttttttatacgcgcaagcagtgcgtcgcgcttgtcgttaggagacactcctatcgccgttgcgagcgtttcaagaaagcccgtgaggccgcgcgccgggcggattctgacgtaaggtgagcgcccgtggttgtgggtgcgcgaatattgcgtcagagcaaacgtcttgccgatgtggctcgggccccaaaggaacacgggtgttccgctttcgcgggcgaggtcgcaagcggtaaatatgcggcgcgccgtgggagtctcgacaaattcggtcgtgccaagcacgagtcttttgcgctcggtctcgaggaagtctcgcatgccctttgccatatttgcgggaatgccgtatttttcgcccgtggcgggattggcgtaagctccgcggtatatgcgcatcaccgtggtgtggtcgtactttatcttctggcaaaactcgcgaaaggctatgccctctttaacgcagaacagaaagcagtctgcgagcaactgccgctcgtcctcgctgtattcggcggtgtcgcgccggatttggtcgagagagtagttccatgttgcgcggggcgtcaggctctttgccttgtgctccgcaagctgtgtcgattggttttcttccattgtattcctttgctgtgttaaatcaaatcagaggagtcggcgaagtcgtcaagaccgccgtcaaaggattcggggacgctcggcgcgccgacgagccttgatgtgtctgaaaaatccgcaatccgtctgccgtctgagagagtcttttcgcgaatttcggcagccgccatggcctctcctatttgggcgttgttctccagcacggcctcgttgtggacgcggatttcgcggtaggtattgccgatttcggaaaggtgctcggccatctttttggcctctatcattctgtcgcggtggactatgccgctttggcggatgatcgcctcctggtcggtaatgtccacatagtcccaacttggcgcgccgcacacgaagccttcggatttcgtgaagagccacgccgtcttgtggtcgggtgtaaacgccgctatcagttccctgccttcgagttcccgcaacttcggggagcggaagtaaagcggttcccttcggaaagaggatatttcggttttgatttcgccgttgcggactttaacgagacgcttgtcgcacatgcacggatagagcgcgggcgtttcaatgcgcgtgaactcgttttgcgcgcgcaggcgcgtccagcgctcaaaggggctttcggggcgcgattcaaatttcagctccgcaagctccgtaaccgaaagcgtcggcggaaggttctccctgcggcaatattcggcgtttggcagcaggcattcatagatcgtctgaaagccctgcaacttgtggttagtgcggttgttgaagatgtttacgattctttcaaacaccaaaaagaactcctcctctgtgagcgcaggaaactttaggcggctcatgtctatgccctttgcgctggcgcgcttttcgagggcttcgcagtattcgataattttttcatgcacactgtggcggtcgtcgaagcgcggcgcggtcgctcccgcaaggtggcacaggcgtatgtgcagcggcttaaagggactttccaaccatcctttttgaaaggggaagccgtgcttgtcgataaggccgtaattggcgaactcgcgcttggccattcgggtgttttctattacgaaccgaccaggcagcatggtcatgagcatgtcctcgtcgagctcgttaagccgcgcggaattgttttccaaaagcaggcgcatcggatagtttgccggaagcccgtatcttagaattgcgctcaataaaacggcgttgacgtctttgcgcgtcaataccttccccgagccttcgggaacgtacggaaggtctttgtcggtgagaatcgggcggacgccccagccgattatcatgcggcttgcaacgtccatagcgacgaccgcctgcgcggttctaaggcgcatgtaggggccgattttaaacatcacctgtatgtcgagttccacgtcgtccatcgtgacgagctgtagcggcttcagtttggacatgtcgcggcgcaactgtgcttctgcgtcgtgcgccctaagttccccgaaggcggcgcgaaggcgcatagcgcctctgcgcggagccgcggcggctatcagtttttgaatgtttccccgagaccacccctgcggtacaaaggggcgttttgcgcgaattctcggcggatacggagcgttaggctgcgtggaatcccagaaatctttgaatgtaccgtatcctggaacgggcttgccaaccgcccaaaagtcgtgaaaaagcctctcgcagacgccgcctaccacatctgtacgccccttgcattcgagcgcaagccgcacgataaagtctttgaattcccgcggctgtccaggctttgaaccgcgccatttacgcgtcaatacgccccagtcatagccgctttttaaataagcagcatagaggcgctcgaggctctttgccgaaaatcccttgcgccctccgttcaccgccgctatcgacgcaaacgcatcgcccttcttgccctcaaatgcgctaatcgttttgaaagcgtcgagcaggtctataatacgcacctgctcttttttaggcaagcggacaaattcaagctgctcatgggcggcaatgccaaacggctttggcggcagtttttgcgagaccgaaagggagtgatccgacatgttaatccctcttttccttggcgaggttaagtatggccttgccctgctcgataagatagttgccgaggtcgcccatctcctctttcgagagctggaggaagcgcgggtcgttttcgcgtttgatttccacggtagctctaacctcttcaaaaagctcgttaaagaatgtcatctgcccgccgccggtacttccgccttgcaggccgcggaggccaacagcctttttagatgattctattgagcggcgctcttcatcctcggcttctatggcggcggcgttggcggtttttaatatattaagaaaggttttgaacggcaaattggcagaaacgtgggcgacgaaatcggaggtcagcttcgcgtcggaaaatatctcctcggccccgttctttatattgacggccgctataaattcgcaaatgcgcacggatataatatcagtttgtttttcagcagttgaaatttttgcaatcagatatttcgcggcttctatccatgaataagccgtcgatttgctcatctgtccgccgagtacgcctttaagccaatcgccgaattttccatgcccaataatcggctttacggagagcgcgagcaaaccgaagccgaccatcgccgcgatatttgcgccttgaatttttgtagttctatcataggcctctcgtatgagtgtgtcgagccgacttgcatcgggcttgaactgcttctgcaaggccgtttcaagaggggttatttcagtggatttttgagattttttcataattcttactggtcgagccaggatttgtcgttaaggatttgtaaaatatcgtggtgaatcgccacgagggcggcgcgcggcagagcgcgcaggaactttgcgcggaggtctccggaataggctcgcaaaacaaaatcccgataggcttccacaggaatccgcacgagtttccgcgtccggcctggcgcgaggttcaggctgccgaattcgccctcgtctattaggttcaatatgtgctgttccgacacgccgagacgctccgccacctccccgactttcagcgtccaacgctcaggaaaatcgagggagtaaaacgggaacgaaagctgtcgggtgtcgccggacattattatttcacttttacgagcgtgaagtcggcgatggcgtctatcttgccgttgcgctcctcccatagaggatctgcggaggtatccttaattgtcaaagttccccctgaaaacctccggatgtcggcgcgcacaagttccaaaaatacagagctccacttgcggcagaaatccgccgtgatttcttcccacagcccttgcgtcttaaaaaaggcggtcacatgttctccggccttccattcgcactttttgcagtcgccgtaatacgggctcgggtcgtagtctatcgatacgataacgcgcctgaattgcctttcgacaaatcccttgtgccacggtttttgttttttcatcctttgcctttttgttgtattgttaaaaaatcagattgattaatacgctattattcattgtcttttaatgaacatggattggattactgcattagtttcccttttgagcgctataatcggtggttgtattggcagttacgcaaaagttcatagtcttagaataatgcggaaaatgagggaaagagataaaagacgcgcgattgcccgaaaaatcagacttctcaagcctgcgcaccgtagggcaatcggaagacttatcgcgaaaaagaatccgattttcgtcaatggcgacctcaaaaccctcctcgatcgcgagagtaccgaaattgactatctctgtaaaattgggttcgtttcgagcaatggtggaggactcaggaatgaaatgggggaaacttacactattatttatacgctcgatgaccttgtcgcagacgtttattgcgaattgttcgcaacagaagtggctaagaagaaaacacccaaacccactaagggctccaagaaccgttgaaatttcatattcaagcttcattatctccccctccttgcggcacgggagacgcgctcgggtttgggcggtagcggaataatgccgtcgcacagttgaagtatccgaagcgataagctctttgatttgcgataaccgttgacgaccttgtataaatgagtccagtgaacgccaagcgcaggagctgcacggcgatagctgattttcttttcgcaaagtttgcgttttaatattgtttcttttggcatttaggattgcgatttgattaccaatttttaattattgtaagcgcgattataaacaataggtaaaaaatgcaagaaaaaaatttaacatttggtaaattttctctccggctacgtgaattaatggaaacgagcgggatgaaacagaatgaaattgcaacgaaattgggctttacctccacagctttggttcattggaagagtggacgtagcattccaggtggaatagaactatacacgctcgcaaaattctttggttgttcaatggaatggctattgactggcgaagatgacgatggaaagcccaatcaagcagttgctatttataaagaacgcgcggacgtggcagaaaaacggcttgaagacttaaaaaaatcgctaatcggcgttataaaaaaattttaactaactgtaagcgcggttatacttgaaacaactaacaatctgtgaaatatagaaaaaaagggcttacacttaaaatcgcaactaactaacaatcaataatcgaaaattccactccggtggaaatttgaaaggccaaaatggacgaaagagacaaaaatttgctgaatataggagtgctcctaagcgaggatatggagcggattgaggtcatgtacgagggtttcgacatgggctgtttcattctcgggatgttggacgccgaaatgcgcggcctgaactcccccgaagccctggaacatctgcgcgccctgtacggtatgttcagttccccagcgcgcgcccgctacgaaatccgctcgctcgtctggaagaaccgcgtcgccgccgcgaacgataaaaatttggcagaaaataactcggataaacaatcatgaagaaagataatataatttgtccatcgtttgaattggatgcttttaattgtccacattgtggagcctattccaggcagtattggtatgctttgtttttctatgctgctggaacgagaaatgatacaaaatggaagatcgcaatatgtgagcattgtaaaaattattctatttggtttaaagaaacggattctcatggtattcagttttatcctacttccacaatcgttgagcctccaaatgaagacttaaacgatggaatcaaaagattgtataatgaagctgctgaaataaaagacaagtctccaagagccgctgcagccctcttgaggttggcattgcaggaattgtgtaaacaactcggagaaggaggaaagcatataaatgacgatattgccgaacttgtcaaaaagggattaacgccacatgttcaaaaagccttggattccgtaagagttgtcggcaacaatgctgtccatcctgggcaaatagatttcgacgataatcaagaaattgtaaatgctctcttcggaattattaatttcatcgccaatcaaacgataacgcgccaaaaagaaatagactctttttacgaaaatcttccctctggagcgcggcaagcaatagaaaaaagagataaaaaagcataggcaaaatccctctaagaaaaacttagggggattttttgtgcccagaaaaggcgtcctgcctacaaaaaatccggaaaaaacaccttttccggataagcaaccaacgttcccaatggcggcgttttcatgatttgggaaacgtgataatctgcctgcgttatgcaaaaagcaggccagaagagtcaacaaaaaagcggcaatctaaaagtttatgcttttgaagtttcgcgcataaatgcggcgacactcgcacttaaactgcgcatgcttggcggagtgtcgtctgtccgcacaatagctgtgtcggagctgccaaattgcatttcgcaaatagattccgcgctggcggacggcgttgacaagattgaaatcaatgtcggttcgggtgtttgcgccatatctccagtacttttaaaaaatttaaaaacgagcctttcttcatatcacgctgtgtcgggcggcagtggcgcgcaagtcgtccgtaaaggcgtttcaacgccggtaaaatccaaagcgcccgcgcgtgcggcggcagtgccgcattgcgcgtcagattttaacgaagaacgggataggcgtattgcgaaagcaagcgccgtaagggcggagcccttcaatggaagcggcactgccgccgacgattttgaaaatcaacttgcgcgcattgtcggcgatgagctgcgcaaggcagtaatgccgctcttggctgaaatagacgccattgccgctctcgtaaaggagtgtgcggccgaattggccgccgtatcaaaaaagtttacaacccgcgtgcgcatcgaaaccgaaaagcgggataggcgtattgcgaaagcaagcgccgtaagggcggagcccttcaatggaagcggcactgccgccgagggctccatttccacgcggcgcggccgcacgtcggttgtagttggccgtcgcaaggtatcttaactcaaaagaactatgaaaataataatagcatcaatatttgcgctgctgcttttggcaggctgcgcttctacaacggtgacggaatatgacgaagctggcaacgtcgtcaaggtgactgaaagcgacgagagcgcaatggcaatcgccgcgcaaagcatcaccaccaaagacaatatgctccatgcaagcggttgggccgtcggtgtacaaccaagcgctggcatatatggcgttggcgcgttcgatgtacttgcggcctctatcgagggcgaaaggggcgctgtcaacgcggcaagctacgccacaatgataaacgcgtcaaaggtgtcacttgacgtgtcggctaacgcagatggcataacggcaaaggcggagggcaactcaaatgcaaatgcggctgcaacgcctgattcaaacgcaggcacagaaacggcggagggcaaataaaatggcgaatgaaaaccccgttgcgcaaagcggcaagcaggctattggctcctggcttaaatcaaaaggcactgcaataggcgttgccgttggagtagccctcacaagcctgggcgactacctcttgggagatactgggctgatagcattttgtatcggactcgtgaaacaggcgatagccttcttttaatgcgcaaggtattgcagttcttaaaagaccgcgtgcgcctatgtttcgagcgcgggcgtcgcgggctaaaaatttttaaagtaaagataaggttttaatgattataaaagagacttttggcggcgcggctttgttggcgtcctttgcaggcgtggacgctacttggctatccaacgcgatgatattcatcgcggcggcggcagccacgattttttacataaagggcgctgtaaaaaaaagcccgccagacactgagaaataccgccatgtcacggagtgcgacaagctctgcaaagcgaaccttgacgcccacgaaaaactcgaccgcgagatgaatgagcgcctcacctctatgagcgggcactcagctgcaagccgaaaagtcatctatgaaagcgtccgcaaactctccgaagacgtagccgcattaaagtcgtcaaacgaataccgtacgcagcaactccacgctcttgagtctaagatcgataaaatttgggagattttgagcaaatgactgccgaacaaaaaatactcttaagagaaaatcttttaaaacagcttgccgaggcgcgcccgtttggagtgcttgccgcgcggctttgcgtgggcgcgcgcatgtggaactttaatctggcggaggacgaaattgagacggagctcaagatactcgcgcgcaaagggcttgttgaggcgaaagccgacgcaatggcgattgaatcggcgcttcattggaagatcaccgccgccggcttaaagacgttggacgaaaggggatactgattgatgggcaagtccaagatagagtcggagctttcggaagagcagttgcaagacttttgcaaccgccttgcaaatacgccgaagttgacgcttaaaaagctccagtcaatggcggcggagcttggcatagaagtgtcgctcatgggcgcaaagagtttccgcgacggcgcgtttgccgagcatatagaaaaaatgcgccgcgcaaaagagcttgcactgcaactccgtgaggtcggcaacgcggacgctgcaggatccatagcggacgcgggagcccttgtgcttatgcagcaggtctatgacgccctcacaaagggagacgaggtggacttcgacactttctcaaaaatcatcgcgcgcctgcgcagcggagatcaccgcctgcgcgaagtaaacgcaaaactgcgcgagtacgagcgccgcgaggccgaatgggaacgcaaagaagccgagcgcgaagcggcgaagaaaaaagcaatagaagatatacgcagcggcgccggcctttccgacgaggctctcgcaaaacttgaagcgcaaataggcaatttgtaatttgtgaaagaaatccgcacagtcaaagccaagaacaggcccaagctcgagatgggaatcttcctgccgtaccaatggaggtggattcaagaccgttcgcgcataaagcttgtcgagaagagccgccagataggcttttcctgggctaccgcctacgacatcgtgcgccagcaatcgcgcaaggcggtaaagctcgattcttggatttcctcccgcgatgaaatccaggcgcggctctttttgcaggattgcaggaagtttgcggggcttttaaacattgccgcctccgaaatcggcgagcgggtttataagatagacgaagcgcgctccgtcacagcctttgaaatgtcctttgctaacggcactgttgcgcactcaatgtcatccaatcccgatgcgcaggcgggcaagcgcggcacgcgcgtgcttgacgaatttgcgctgcaccagaatccgcaggttctttactcaatcgcattacctggtattacatggggcgggcagatggcaatagtctccacccatcgtggggcgcataatttcttcaacaaacttgtccaagaagcgcgctacggcgaaaacaaaaagcggatttccttgcacagggtaagcctccaagacgcgcttgacgatggtttcctttggactctccagcaaaaactgcccgaaggcgacgagcgccaggaaatggacgaggcggcctattttgattacgtcaaagaccagtgtgccgacgaggagagcttccttcaagagtatatgtgcgagcctgcggacgaatcgagcgtgtttatcacgtcggatttgtacgacggcgtgacatacggtctttcagaaaactggcagaagccgctctccgagtgtgaagacctttatgtgggcatagacgtaggacacaagcatgaccgcaccacctgctgggtgtgggaaaaagtgggcaatatctatttccaaaggctgttgaaagtcttgcaaaatatgaagttctcggcgcaggaggaggagatttatccaattcttgcgatgccaaatatgcgccgctgttgcgttgattccacgggcataggtgcgcagtttgccgaacgcatgcaggaacgcttcggaaaataccgcattgaagcggtcgcattcacgaacgccgtcaaggccgacatggcatacaagctgcgcgccgcttttgaagatcgcaatatacgcattgccgatgataaagacacccgcgccgattttcgcagcataaagaaggagataacgagctccggagccgttcgcttcgacgcagagcgcaccgaagccctcggacacggagaccgcttctggggcgcggctcttggatattatgccggagcaaaacctgcggagtcgtatttcattccaatcgcgcggcgcagcgacaggaggcttttttaaatgaaatctgaaatcaccgacgaaagaattttatgggagaagcgttcgcgctataatcctttgttgggtttgcggccgcagacgctacgcgcggcaaacgacgctttcaagacgggatacatgtcgaaggcggcacgcatttgggaggaagtcgaggaatgcgacggaattgtctccaccgtgcgcgccaagcggcgcaagagcgtatcgcgccttgcctggaacatcgttccgttcggcaacgcctccgaggataccgccaaagagcacgccgccaggcttgaggatttttacaacaatgtgtcttggacacactcgtgcgacaagcaccgcacgggcggattttcgcgccttgtagaggccatgctcgattgtatcggcaagaaatactccgtgcatgaaatcgtttggagccctaatccgcaagagcgcatactacgcgcgaattttaagtttgtgcctctttacttctttgaggacaccgtgggcaaattgcgcctcttgcgctcgccaaatgccgtatttggcgacgaattgaagccggacaagtggcttatctccgcaactgattatcctctcatgtcggcctgctcggtttattatctaatgaaacagatgagccttgccgactggctcgtattctcgcgccgctttggttcagctttggcctggctaaaaacagacgagcccgcccattccgaaaagtgggaagccatggcctccgccctcgcgaacatcgacaacgaatcgagcctgatgaccggcaacgccgatactctaacgctcttgcaggcttccggccagaacgcccctttcaaggaagtaatagaccatctcacgcgccttgtgatcacgatgtggctcggcagcgaccttgccacaatgtcctcacaggacggtgcgggggctagcctgcaaggagaatcgtcggcaatgctcgaggacgacgactgcctactaatcgaggagactttggcgaataccgtatcacgttttgtaatccgctattacttcggaaacgtagagcctgccgcatatctgcaattccagcgcaccgaccgttccgacaaaaaggccgcgcttgaaattctcgggatgacggcggacaggggtgtgcccgtatcgcaaaaggcgtggcgcgaggcaagcggagtcgccgcgcccgacgagggcgaagctgtaatcgagaaatcgcaggcgccgatgcttcaggattccgcttttggcgcaaacgacgccgaaagcgacatagacgagctttcccgcgccatgagcaccgaaaagaaacaagccctccttgccgagctcgaccgtatagaggctatggacgacgcctcgcagcgcgcagacgccctcgccaatttgcaaagaaatattagcaactactttgacggcggcgatgccgaagcggaggccatgatgaagattttagaaaggagaatttcaaatgaaaaataaaccaagccgaattttggcgttttctgggcttaaatgttccgagacggacaatctatccaaaagcgagagaaaacgattttgcaatgggtttttggcgttttgcaacggggttgcaaagcgcgacggggatagcgacattgcgaagcaatcgcgtaaggggcttgccccttcaatggcaggcgcaccttgcgcctgggcggcgaacgaggccgaggagtgcgagtatgcaatccaggatacggatttgatttgcgcgtcaaatgaggacggcgcttggtatctcgtggccccttacggaaactttaaccatcgcgtgggagtccaacgcttcgacgagcaatccgccgacgaaataatcgacaagtacaaatccatttgggcacgcctgaaacgcgctgccggtttcgggacgacaattcccgtccatctcgggcatccagacgtgggcgatgatggcaggccaggcatttcatcgaaacatctcgataagtccgtgtacggcaaagtggcggaccttgcaaaatctccggaaggcctggtggcaaagatagattggcaaccggactttgggcttttgccgcacggtttgcgcttttcgccattttggctgatgagacccctttcaaagggcgtatatcgcccgacgtttctcgcatcacttggtctaactcaaactcctaatattccggcaaccgccgcagcaaattcaatcgaggaaattttaactgaaaatcaaacaaaggaaaacgaaatgataaaagagttgctaaaacttttgggctattccgacgaagctacccagaagtatattgacaagtcggatggtgcaccttccgaagacgaaatcaagtccaagttaaaggctgttttggacgaggctaaaaatgccgaagccgcggaatctgcacaggcggaagctgaaaaaaagctcgcagaagctaaggccgccgcggcaaacgacagggccgcagctgctgaaattgtggtaaacgccgctataaaggccggcaaactcacggaggctgaccgcgcggcgcgcacggacagtttgaagaaagcaaccgattttgtagcagccgcaaacgagattgaagctctgccggttgttgtggaaaccaagccggagacggacgggctcaagcagggagacgccaaggcaagcgccaaagcggctttcaacgggctcgtcgccaagtacgaggcggaaggcattagccattttgacgctaccatgcgcgccaagcgagaaatgcccgagcagtacaaattggcttttgaatcttaaactcaacaaaaggaacaatcgcaatgaaaaagataattgaaagaatgcgccgcctcttcgctcatggcgtctgggcggcaaacgacacgctcgttgggattcatccagaaggcgcaatcaactgcgtggcgggcggaacaatagttcgcaatagtcttgtggcgctttcatccggaaaagtcgtcgcatgctctgcaagcagccgtccgctcggttttgcacaagatagcgcaagcgaaggcgaagggcttgcggtgaggttgcttggcaacgccgcgggaactgtcgttggaatcgccgcaga

SEQ ID NO: 4146 - DNA, 32759 bp, Unknown
  16S sequences of unknown bacteria
cccgccgtacccttccggaatgccgacgatctcgacgttttccatgttattgagggcatacagcccgatggcgcggatgaccgcgttcagcccggggcaatcgcctccgctcgttaaaattccgatcttcataagattccttcaaatttttggattacgattattgtaacacgctcgtacggcccgtgtcaacgggttttttccgcgcaaacgtcgttgctgccgaaagccagacaagtccgctctatttgtaaagtttctccctttcccgattccattatactacgcaagcagacggttcaatgacttttacgcggcatttaccataaaaaagacgcccgtcaggcgtctttttttatattacctcgaatttttcgtcacgtccgaaagggcgcgcaagagatcttcgcgttcgacgggcttggcgaggtggcggtccatgcccgcatccagcgccgcctgtctgtcttccgcataggcgttggcggtcatcgcaaggatgggaattttcttcgcgtcgggctttccgcatgcgcggatggcgcgcgtcgcctgcaatccgtccatgacgggcatcatcacgtccatcaggatcacgtcgaacgtacccgcgggcttttctttgaaaagttccagcgccgctttgccgtcgaaaacgggcgtgacctctgcaaaaccgctttccagtatatatcgggcgatctccatattcatttcattgtcttccgcgatcaatacgcgcagtccggacagatcgatctcttccgaactcttgcttttttcgagtttctccgcattgccgaagggaagaacgaagcgcacggtaaactcgctcccctttcccggtgcgctttttaaagaaattttgccgcccatgatatccagaagttgcttgacgatcgccatgcccagccccgtgccctggtactcgctgcgcccgcttgcggtttcctgcgagaacggctcgaagatccgctcctgatattcggggctcatcccgacgcccgtatcgcgcacgcacacggtgagcgatgcttcgcgctcattttccgaaacggttgaggcggaaaagaaaatctgcccgccttccggcgtgaatttgacggcgttgcccaaaatattgatgagaatttgtctaaggcgtatctcgtcgccctccagcacatccgcctcgatcgggctgaaatccgtttcgattcggatatttttttggatcgcctgccccgcgacgacgctgtaacagccgtcgagaaggacggaaacataaaacggcttatcctcgatgacgactttgccgctctcgatgcggctcatgtccagcacgtcgttgatgagcgagagaagatgatgggaggaagaatcgatctttttgaggcaatcgacgaggcgctctctgtcgtcgatattgcggagcgcgatgtccgtcatgcccagaacgccgttgatgggcgtgcggatatcgtgcgacatatgcgagagaaagatcgtcttggcgcggttggctttttccgcggcgtccagcgcggcttccagttttttctggatctctttaagtcccgtcacgtcggtcacgtcgatatagatcaaaagatacacgcagccgtccgccagcgtttccacgcattccccgctcacctgcatccaaagcgtctgccctctgcggttttgcagttgtgtgagaaaatgcagaggtttggtctgccgtatatcctcccaaaggttttcgagcacttcggcgtttttttccatattcagtcggaacatttcgttagcatcgtccaaaatcccgtccgaaccgaaaaattcacgaaattggtcgttggcgtagacgatcttcagccgcttgccgcgggagaccaaaaacttggcgacgaaacctgggatattgttgtacgtgatagattggtcggtctgtatgcgcaccagatcgtcgatatcgctcatgacggtataggaaacctgtttgccgtcaacgtattcgtctgtaaacgtgcccgccatgcggatccaaagaaatccgcctcccttgacgggcatgcgcgtatccaacgaatacccgcccttgccctctgaaactgcgcgcgaaaccacggcggcgatctttccgagttcgcttaaaagtccgtggctcgcgtaatatttctgcggattgttttcgaatttttcttcgtattcctcttttgtatatccgatcagatcatagtagtaatcgttggcccatatcagcgtataaaattcatccaaaagatgtttgctgacgctcacccgcaaagaactcatcaacgcgtcgtattcgtaacccgagatcatggtatgctgtttcatttcaaccttcctttgcagagagcgtcttttcaagcgccgcgcgcagaacatcgagatcgacgggctttgcgacgtgcgcgttcatgcccgcctccatcgccgcatgaacgtcttccgcgaaggcgttggcggtcatggcgatcacggggatgctctccgcatcgggacggttaagggcgcgtatggcgcgcgtcgcctcgtaaccgttcatttcgggcatcatgatatccataaagatcgcgtcgaacgtgcccgcctcagacgcggcaaaagcctgcaccgccctgactccgtttaccgccacttgcgtcttcgcgccgcgcatcgaaagaagttcgcagatgatctcggcattgatgcggctgtcctctgcgacgaggaaattacgcccgcggtaaatattttcttcagtctctgcggacagaggcgcgctgacgatctccgccttgagatcggacgcgacctcaaaatccagttgtacgaaaaacgccgtgcccttgcccggctcgctttcggcgcggatgctcccctccatcagatcgacaagccttttcgagatggaaagtcccagtcccgtaccctcgatatccgccgcgcggcggctgcgggcaaagggcgagaacatatgcgccataaattctttctgcatgccgatcccgttgtcgcgcacgacaaagcggtaacgcgcgcgattcgggcgcgaagaggcgatctcttcgatgcagaattccactttgccccccgcgggcgtgaatttaacggcattgctcaaaaggttgatcaaaatctgattgacgcgcaaaggatcgccgtaaaatccctcgtgcgcaatattttcaagtcgggatacgaattcgacgcccgaagcctcggcctgcggctgtatgatggaggaaagttggttttccagagcggacagcgagatcgccacgcggttcaaagtaattttggcgccgtcgagtttgctcatatccagaacgtcgttgatgaggctcaaaaggtgcttggacgatacggaaatttttctgaggcagtcggataccttggctttgttgtcgatatgcgcatcggcgagcgcggtcatgcccgtaatggcgttcatcggcgtgcggatatcgtggctcatggaagaaagaaaatcgcttttggcgcggttcgcatcttccgccgccgaaagcgctttttccagcgcggctttgtttttccgttcggataggatcagatcggtcacgtccgcccgtacaaggcacacggtgcggtgattcagatcgccccacagcacgttgacctgtttaaagagaatttcttcctcctcgcggtaaggaaatacgtaatcgtatcccgcgggctgcgcccgcaagcgttcgagcatggatttcaggcggaactgccgcaccgctgcggacatatccttttccgttccgtaacgggagataaactcttgcatattgcggtcgtattgttccacgacgtgcggcggaagactcttcaaaatggtttcgcgcgtgtacatggtcagccgttctgtggcgatatcgataaaacaagccaggtcgaacgtgtaggcgatcatattcaaaagcccttgctgctcgcgcacggaatcggtgatatcggcgcagaccaggcagacgcgccccaaccgcagatcgatggcggacacactcatgcttttcgtgcggatatccccgctttcgtcgatgagcgaataagaaaacgtatatcccttttcggcggaaaggcgctttttgatcccttcgggttcgagcaacgcgcgatagcgtgccgcgtccttgggaacgacgtgtttttccgccatatccgccacgcgcgcggagtgagtcccgctcggcggaggcgcgcaatgtgccgcctgattgtagacgagcaccgaaaatgagtcctcgtcaagttttaaatcgatgacgtaatcgtaacttgtcaccgacagatggtgcatgatgcggtctgtgatcgtctgctcggtcacgtccgtgacggtgagcacgcccgtgatgtcccccgtatcgggcgtttccaatagatttactttaaactgcacgtagcggcccttttcttctttgggaaatttgacgtaacaactcatcacctgttcggtatcgcggcggtgaaacgccgcaatcgacggttcgttgaaaaatttattgcaaaactccttttgtttttcctcgtcgacgacaaggcgggaaatgccgcggaaaaaatcttcgcgggaagagccgaacgtctttaaaaggtcggaatcggtatggtcgtcgatctccaatatgacgttattcgtaatgttgcaatgtccgaggatgagcacattgggctcggtcactcggtaatgctgcatgatgaattcgtcgtattgtttgcggaactgttcctttgcgcgcacggtatcggaaatatcggtatagacggtgtacaggcgcttgtacccgtcgagcgactgaatgagcgagatcgtgcatttcgtccattgatagacgccgtcccccgtaaggaaacggagttccatttcgagccgcccttctccccccgaaagaaatttttgcagtttttttcgacccgcagccgcgtcttccgcgtgcacgcccgcgaacaaatcgtctttatagcgtccttccgcctgccgcgccgtcattctcatgagcgcggcaaagccgtcggagaggaactcggtggtaaggctcccgtccgattcgcagcggacgacggaaattccgtccggcaaattcttgacgaccgtctggaaatataattccagacgctctttttcccgcctgagttcgacctcttcggtcgcgtcgcggatatactgcacgtatgcggggatcccgttccagtcggtttccttaaagcgggaggtatagtaacgatctcctcccacggcgatttcgtgctcctccccgtccgcacgatattgattcattgtgcaaaaatcgcagggcgcgctgttgccgtgcagcgtttcgtaacatttctgccccgcaaaatgggccgtacccgaaaacatggctttggattcgttgcagtacaaaagttcgtaggttttcttgtcgatgacgtatatgccgtccgccgtttcgtcggcgatgctctgaaagagccgcgtttccgcagacatacccgtaaatacggcataaaagacggtaacgtctgctttgggccccataagacggccgttcaggtggatccagacgatactgccgtccttatgccgcatcctgtaagaaacgtccatcgcctccccgctctcgagcgcggcggaaagagccgcgttcacgcgctcccgatcgggttcgtacaccgcttgcagcatatcgaactcttcccgcgaatagcctacgagcgcagccacgccgtcggacacgaatacgggcgtgagccttccgtcttccgctttgaaacttgcgatgccgcccggaatggaattgacgagatgatcgagttcgcgctgcgtttctttgagtttggaaatattatgaaaaacgcattgcacgagaggaaagccgttttcctcgccgatttgtttcgcctgcgcgtgcacccatacgatatgcccgtcgcggtgctgtttgcggaattcgagttccgccgcggtattcgaggcgatcacgccgcccactgcggcgagtacattctcccgatcttgccaataaatgaggccggaggcgtcgccttgcgtcattttgcggtattcttccgccgtatagccggtaagagcgggcacgccgtcggaaaaatatttcgtttccaaaatatcggaaattttatagatggcgactccgccggggatcgcgttgacgatctcctgcattttttccgtcgtctgcgtcaattcgctttgcagacggagttgctcccctacgtcgttgtaaacgccgtataaaagtttcgaaccgtctttttgctccttgaccgagccgtccagacggatccaaacgtattcgcctttccgatcgttgaatacccgatacgtataacttgtccgaccgttggccgcaatagccctttgtattttcgcttgcagaacgggaaggtcttcttcgtgcacgttcagaaaactggtgtaatgttcgatattgcggatatgctcgacggagtatcccatgatccgataaaaggcgttgttgtgaaagacgggggagatttcccctttgtcgaagcggtaaacggataagccgcaaggaatgctcgcgacggtttcgcgcagatccttttctcgcgcggcgacctgctccgccgcctgttttttttctgtgacgtcctctatgtattcgatatgcgcgagccggcccgcccagtcgatgaatttgccgctcagttgaaatatgcgggcggcggaggcgaatgaaaattcgcggaccagaagcgaatcgcgacgcatatttttcacctggcaaaaagggcagggcacagaaaagcccgccaattcgtagcacttcgctcccgagggaaacgaagaccaccccaaaacttttttcgcggcgcggttcgcatacatcagttcataatcgtccgccgcggtcacgtagatcgccgtcggcgtattatccaatatttccgtcatctgctccatggtcacacggctcggcatttccaccttaaatcccccctctcaacgcgtcgcgcaggcgctccgctcttgaaaactctgctgcgatattcgcatacagcgtgcgataatccgccttttctttggaccgcagcggctccacgatggcgcatacggcggcgtaaagaggctgcaaccccagattgcccgttaccccttttaaagtgtgcgcggcggcaaaggcgccgtcccagtcttcctgctcgacagaatcttgcagattttgcaaattctcatccgcaaacagcatattcaaaatgcgcagatacattttttcattgcctacaaagcgcttgatagtggcagtatagtcgccgccgtaggcctcgaatatttgtctgaaatccgacactttcactccttttcatcgttgcgtttttctttaaatgcgataaaggcgcaggacttcttcctgcgcctttattttgtgcagtgatgccgatacagacggagacgatcgccgcgcgcgacgaaaatcccttccgttccgctcactttcttttacttcattatctgcattgtacgataagtataacagaattcaacgcaaattacaagtgcttgccgcaatttcggcaaaccaaaaaaatccgaccgcaatcattttgcgatcggatctctatattatgcgtttttgccgcagcaattcttatactttttgccgctgccgcaggggcagggatcgttgcggccgatttccttggccgacttggttacgggtttcgccgcgccttccgccgaacggttggtgacgagttccgcgttgtccgtaaggtttttgggcgcttccacgggccgcaccgcgggacggttgacctcgatacgcactttcaggagcatggagatggtgcccgtctggatgcgctcgatcatctcgtcgaacatttcgaaaccttcctgtttgtaggagatgacgggatccacgttgccgtatgcgcgcaggcctatgccctttctgagttgatccatcgcgtcgatctgatcgatccagttgcggtccacgttcatcaggaggaaacggcgctccacgtccgcgtaatcgatgccgaactgctcgcgcacttccgcgatcttttcgtcgtacgccttttccgtctctttgacgatctttttaaaggcgtaatcgtaatcccatttattcagtttatcctgcgtgacgaacccgctcccctcgggaaggaggcgctgttcgagcgcgcggttgagcgcttccgcatcccatttttcgggcatctcgtccacgttgacggcgccctttaacacggtcgtgacgaaatcgggaatgaacttcaccacctcgtcgtgcacgttttcgcccttcaagaccttcattctctccgcatagatgacttcgcgctgtttgttcatgacgtcgtcgtattgcagaatggtctttctgataccgaagttgcggccctcgatggctttctgcgcgttttcgatgccgcgcgagagcatacgcgattgcaggcaggtattgtcgtccttgctgaacacgttgtagatctttttcatcgtttcgccgccgaaacgcttgatcagatcgtcttccagagagaggaaaaatacggatacgccggggtcgccctgtctgcccgaacggccgcgcaactggttgtcgatacggcgggattcgtgacgctcggtgccgagaatgcaaaggccgcccgcctcgatgactttgagtttttccgcatccgtttccgccttgtattcggcgtacagttcctgatagcggcggcgcacttcctccgcctcgccctcgagttccgcataggaagtagcgagttcgataagttcgtgctccacgccctcttctctcaaacgctttttggcgagatattcgggattgccgcccaaaaggatatccgttccgcgccccgccatgttggtggcgatggtgacggcgcccagacggcccgcctgcgccacgatctccgcctcgcgctcgtggttcttcgcgttcaatatattgtgcttgacgccgtttttacgcagaagttttgcgatctcttcggatttttcgacggtcgccgtaccgataaggatgggctgacccgattcgtgccgcgtcatgatctctttcaaaatggcgcgctttttgccctcgacggtggaatacaccatatcgggcatatccttgcggacgacgggcttattggtgggaatttccagaacgtcgagcgaatagatggtacggaactcgccctcctccgtcttggcggtacccgtcatgcccgaaagttttttgtataaacggaagaaattctggaaagtgatggtcgcgtaggtcttgttctcgttgcgcaccttcacgccttccttcgcctcgatcgcctgatgcagaccgtcggaatagcggcggccgatcatgagacgtcccgtgaactcgtctacgatgaccacttcgccgtcgttgacgatgtaatcctcgtcgcggtggaacagtttatgcgctttgagcgcctgctggatatggtggttgagcgccgcgttgtcgatgtcgcccaagttctcgatattgaaaaaccgttcggctttcgccgcgcccagttccgtgatctgcacgctcctgtccttgcggtcgatgacgtaatcccagtcgccgtacttgccgcccgtctggaatttctcgtcgatctcctcttcgatctcgccggtctcttcggaaggctcttcgatctcctcttttttctttttcttctttttcttgtcggtgtcctcttcgtgcacgccgtcgtcgtcaaacccgcctttgagggtacgcacgaatctgtccacgcgctcgtaaagttccgaggacttgtcccccttgcccgaaatgatgagcggcgttctcgcctcgtcgatcaaaatcgagtccacttcgtcgacgatgccgaacgcaagttcgcgctgcaccatcttatcgatatccgttttcagattgtcgcggagataatcgaatccgagttcgttgttggtcgcataggtgatatcgcagttatacgctttcttcttatcgtcgtcgtccatgccgggcacgaccacgccgacggtaagccccaaaaagcggtgcactttgcccatccactcggcgtcgcgctgcgcaagatagtcgttgaccgtgacgatatgcacgcccttgcccgtgagcgccgcgagatacgcggggagcgtcgcgaccagcgtcttgccttcgcccgtcttcatttccgcgatacgcccctgataaagagcgataccgccgatgatctgcacgtggtagtgctttaatttgagaacgcggttcgccgcttcgcgcacgacggcgaacgcgtcgtagaggatgtcgtccgtcgtttcgcccttagcgaggcggtctttcaaaatgcccgtctgacttttgagttcttcgtcgcccatggcggcgtacttcggttccagcgcctcgacttttaaagccatcttgtccaacttttttaaacttcttcttccgtcgctgttcagcatgtaattgataagtcccataacctgctcctatcccttccgcacccgtaacaatgcggttactattgatcttcggcaaatttgccctctttccccgaaagaaaatttacacgaaaatattttacattattttcaaagaaatgtaaaagatttttgccacatatttcaaatttcacacggctttttcgcttttcacccgaaaacgggcggattttctctcctttcaatccctttggggaacgctcgcgacggtcagcaccagcacgcgcgccgcatgcgcggcgaacagaacgcgggaaacggcgtttgccgtggcgcccgtcgtgagaacgtcgtccacgagcaggatcgtctttccctcgcacgctttcctctcgtgcacgcggaaacttcccgttagatttttctcgcgctctccgagcgtcagaaatttctgcgcggcggtatcgcgcgtctttacgagcgccgcggcgcggtgctctatccccagccgcaccgacagttcgtccgcgagcagcgcggactggttgtagccgcgcctgcgcaaactttctccgctcatcggcacgcttacgataaagtcggaaaaatcatattccgcgcgaaacacgggttccgtttcgcgggcaaacgtgcgggcgagatatttcgcgcccgttttgaaacggcggacgagcccgacgatttcgcccccgtagacgaacgcgctgcgcgcagccgtgtagacgggcagttcgcgcttgcattcaaggcacacggggaagtcttcgagaatgcggcggccgcattttttacagaaaaaaccgtcgttccgcggcagcgccctttcgcatgcgggacagaaagaagcgccgtcgaacacttcttttctgcagatctcgcaggtataatgcgcgggaaagagggcgccgcgggcctgctctttgcagcgtttgaaaaaatctttcatcggttcaaaaaaaggcggcaaaacgccgccttttcccctacttataaatattttttaagagactccgccctgtccgtacgctcccaggcaaattcttcacgcccgaaatggccgtacgccgccgttttgcggaatacgggcctgcgcagccccagcgtttcgatgatcgcgtacgggcgaagatcgaaattttcgcggatgatctcgacgagccgatcgtcggaaacgcgccccgtgccgaaactgttgacgaacacggatacgggattcgccacgccgatggcgtacgcgagttcgatctcgcactcgtcggcaaggcccgccgccacgacgttcttgcagatatagcgcgccatgtacgcgccgcttctatccactttggtacagtcttttcccgagaaagaaccgccgccgtgcgcgcagcgcccgccgtacgtatccacgatgatcttgcgccccgtaaggccgctgtcgccctcggggccgcccacttcgaaccgtcccgtggggttgatgagaaatttcgtcctgccgtcgagatatttcggatcgatgacgctttcgatgacgtacttgcggatatccgctttcagttgttcctgcgaaacggcgtcgtcatgctgcgcggaaaccacgacggtatccacgcggacgggcgttctcccgtcgtattccacagtgacctgcgtcttgccgtcggggcgcagatagggcaaaagcccgctctttctcacttccgcaagccgcgccgccatcttgtgcgacagcatgacgggaagaggcatcaattcgggcgtttcgttgaccgcgtagccgaacatcatgccctggtcgcccgcgccgatctggtcggcaatctcgcctcccgctttcttttccaaagacgcatccacgcccatggcgatatcggggctctgcgaatggatggcggtgatgacggcgagggaattataggaaaatccctgcccgtgcacgtagccgatctctttgatggtattcttggcgatcttggaaatatccacgtagcaattcgtggacagttcgcccatcacgagcaccatgcccgtggtcgcgcagcattcgatcgccgcgcgcgcgttttcgtcgttggtcagcaccgcgtccagcaccgcgtccgcgatctggtcgcagaccttgtcgggatgcccttccgttacgctttcgctcgtaaaaaatttgttcatttttcgctcatttcctagaattttaataccctttcagtatatattttttcaaacgaattgtcaacgctttacaattccgaattaaatatgatacacttttatttatggaaacgggatgcagtctgtgccccgtctcgtgcggcgccgaccgcaaaacggaagacggcgcgtgcggcggaggcaatcaaatgaaaatcgccaagtacgggctccacttttacgaggaaccgtgtatttcgtaccgaaacggttcgggcgcaatttttttctgcggctgttcccttcggtgcgccttctgccagaatttcgaactttcgcggaatttgcgcggcaaagagatcggcgccaaagatctcgcagccatttttcaggaactcgaagagcggggcgcggaaaatatcaatctcgtgaccgctgggcattatatcccgcagatattaaaggcgttcgcgctgtaccgcccgaagatccccgtggtgtacaacacccattcttacgaaaaaatagaagcgctgcgcgcgatagatccctttatcgacgtgtatcttcccgacctcaaatatttttcgccgaaaatttcgctgcggtatacgggcaaggcaaactatttcgaatacgcctcgcgcgcggtggaatttatgatggaaaagccgctcgacatgcgggcgggcaaaatgttttcggggtgtatcgtgcggcatctcatcctgccgctgtgctcgaacgacagcctggaaatcgtcagatggtttttcgcgcatacgggcgacgcgtacttttcgctgatgggacagtacacgccctacggcgatattgctgcgtttcccgaactcaatcgccgcatcacgcggcgcgaatacgacaaagtcgcaaatcttgtctgcgcgcagaattccgaccgcatttttttgcagcaactttcgtcggcggacgaaaagtacatccccgattgggatttctgagccgccgcacatatgttttgcggtccatacgggctaattgttgatgaaatcgtccttataacggacaagtttccgaacgagcggcgcgacctttgcgggcggcgccgcggcgagttttgcttccaactcgcggattttacgataagatactgttcgcataacgaaagtatgcggcaacggaaggaaaaatatgttgatcacttgcgaaaacgtctgcttcggctacgacgacaaacgaatattggaaaacgtctcttttacggtgaacgagggcgagcgcatcgggctgatcgggggcaacggcgagggcaagaccacccttttgaaacttctgacgcgcgatcttttgcccgacgagggcaggatcctcaccaagagcaatttaaaaatcggctatctggaacagaacggcggctttgacagcgacaagacggtgttcgaggaaatgcgctcggtcttttcgcgcgtcttttcggcgatcggcgaactgcgttcgctcgaacacgaaatggcaaaaacgcctttcggcagccgcgaatacgcagcgatcgccgcgcgctacgagcggctcaacaaactgatcgccgcggaggacggctacaacgcggaggtgaaaatacgcaccgtactcggcggcatgggtttcgaaaagatgcacgatcaggtcatcaataccatgtcgggcggggaaaagacgcgactcaaactgtgccgcctgcttctggaacaacccgaaattctgtttttggacgagccgacaaaccacctcgacgtttccaccctgttctggctggaagaatacttgcaggattacaggggcgcggtgttcaccgtgtcgcatgacaggtattttctcgacaagacggtcaaaaagatcttcgagttggaaaacaaccgcctgacaacgttccgcggcaattattccaaatataaaattttgaaagcggaaaaatacgaatacgaactgaaagaatacgagcgccagcaggaagagatcgcgtccctcaaagaatacatcgacaaaaatattgtgcgcgccactaccgcaaagagcgcgcagtcgcgcgtgaaaaaactggaaaacatgacgatgctggaaaggcccttgccgccgcccaaaccgcccgtattttccttcaccttcggcgagcgcagcgaggaactttccctttcggtgaacgggctgacgctggaagcgggcggcaaacggctctttaccgacgcggcgttcgaagtgcggcgcggggaaaaattcgccgttgtgggcgaaaacggtacgggaaagagcacgctgatccgcgaacttctgaaaaagacccaccccgccgtaaagtggggaaggttcgtgaaaataggctattacgaccaggaaaacgcaaatctcgacggcgaggatacggtgctcggcgccctgtggttcaaacacaccgccctttcgcagacgcaggcgcgcaatcttttggcgcgcgcgaaactctccgaggaggacgtagacaaaaaagtcaagtcgctttcgggcggcgagcgcgcgaaactctccctcgttttattgcaggcggagaacgcgaacttcctcattctcgacgagccgaccaaccacctcgacctggcggcgcgcgaaagcctggaagcggcgctccgcgcattcgaaggcacgctcctgttcgtttcgcacgaccgatattttatccagaatctcgcagaccacgttctggagatcgagaacgggcgcgtgacggcgttcaaaggctcgtacgacgagtttaacacccgcaagaaggcgcaggccgcgcgcgccgaagaggcggccgcagcggcaaaaaagacggcgcagacgccctcctaccgctccaaggcggaccgcgcggaggacgcccgcaaaaaggcgcggctcaaagaggtggaaatctccatttcccgcaccgaagaggagatcgcggcgctgaacggggagatcgcccgccccgaggtcgccgccgactacaaacttttaacggaaaaatgcgcgcggctggacgaactgcacgcattgtgcgacgggttatacaaagaatacgaaacgctgctgtgatcaaaagagcgctttccttctcggaaagcgctcttattttatgatttggacttataatattcgtcgatcgccgcaaagtaggcgtccacgttttcccatttggaagcggcgggaatgtcgcagccgctggaaatgacgaaattgggatatttttcgcacatatcgttcatcagcgtgagaactcgctcgcgcatgagttcgggcgttccgtccttgaaggcgctcacggggtcgatattgcccatcgcgatcgtgttttcggggaattgcggcaaaatgttgcgcatatccacggcgttgccgaagtgatacgccttgcagcccgtgcgcaggatagaagggatcattctgtccgccgcgttgccgcagttatggtagacgacgataaagttctgatcctgcaccgcttcgaccaccgcgcggacgtacggctcggagaattccgccgccagatcgggcgaaagcacgcccgccaaaggctccgccatgatgatgccgttcgcgccgatctttttatattctttggcgtatttgatcaaaaattccgtgcatttttcgagcaggatcttcatattgtcgggatcttcgtagcacaggatcatcgcctcggaaacgtcggtcagacgccccgccagcgagaacggtcccacgcagcccgcgaatacggggcggtcggtcacgcgtttcaaaagtttttcgatgccctcgatatacagcccgctgcgcgccgctcccacttcgggcactttgagttcggagaccgtggaaaggtcggtgatcagcggatcgtggatggtggggatatcgtcgggatttttcacgacgttcgagccgaaacattccgcctcgacgcttaagtccatcagccccaccgcggcgagcgtgggcgcgcggtccgcgaccgccttcatcatatccgcctgcagatcgctgttcgtgcacacgtcacgcacggtcgcccctatgagctgcgtgccgggaaacgagagaatgggcatggactttttgactttggcgtttttcagatcttcgatccattgatacatattcatatacgttaccttcctaatcttggtttgtgcctctattttaacatgaaaaaaccgccgaaacaagataaactcttgctgaaaaacatcaatattttgcacagttgcagaaaaaaagcgcttatccctttcgggcaagcgctctatgtcagcattctttatcgagcagcgcgcggtgaaacgcggcatagtcggtattcttttcgcggacgcagcggatggcggcgttcgggtgttcgttcaaacgtcccgtcagaaggtacgggatatcgtacccccacaccacgccctgatctttcaacggcagcatatagtcggtgatgaattgcaaaacgggctcgatgcggtatttgggatttttcagaaagccgagcaaaagttccattgcgcagtttcccgcgccgcgccccatgccgttgacggtcgcgtccagaaggctcgcgccccaactcgccgcctcgatggtgttgccgaacgccaactgctggttgttgtgcgcgtgcatgccgatgatctttttgtatttttcgcccgcttcgaggtaggaaagcgtgagtttggcgatctgttcggggtagagcgaaccgtaactgtccacgatatagatgacgtttacggggctttcgcccagaatttccagcgccgaagaaatttcttcctcccgcgccttggaaaccgccatcacgttgacgcacgtttcgtaacccttggcggcgcagtattccaccatgcgcaccgcggcgggaatctcgttcagataagtcgccacgcgcaccatgtcgatgacgctgtccttagcctcgatgatgtccgtttcgtagtcggtgcgccccacgtccgccatgacggaaattttcagcggcgtatcgttgtcgcccaccaccgcgcggatatcctcttcgtcgcagaacttatatttcccgaatttggaagtatcgaaggattttttcgacgctttatagccgaattccatgtaatccacgcccgcggcgagattcatttgatagagcgctttggcgaaatcgtcgccgaaacggaaatcgttcacgagcccgccgtcgcgcagcgtcgcgtcgagcacctgtatatcctcccggaaagagaggagcgagccttttctctgcatcatactttatcctttaagaatgtctttcttcgagttcggcgcatacgtccgaaagtttcacgcccgcgtttgcaagcaggacgagcgtgtgatagaaaaggtcggcgcattcgcccacgatctcttccttgtcgccgttttttgcggcgatgaccaattccaccgcctcttcgcccgtctttttggcgatcttgtccacgcctttttcaaacaggtagcaggtgtaggagccctcttcggggcgatcgcggcggtcttccacgacgcgttggagccgtccgagcatttccgcgcccgcgccgccctcttttacggtgttgaaaaaacaggaataatttcccgtatgacaggcggcgcccgtctgacgcacgcgcagcagaacgcagtcgccgtcgcaatcgagggaaacggaaacgacctcctgcaaatgcccgctctcctctccctttttccagagtttttgccgcgagcggctgtaatagtgcgcatagcccgtttccagcgtcttttcgtatgcttcgagattcatataagcctgcatgagcacttcgccgctctcgcagtcttgcgcgacggcgcatatgagccctttttcgtcaaatttaagttgcatcttccaccgtcctcacgcggatgcccgcgtctttcagatattgtttaagcgcgcgcatctcgatctccccgaaatggaagagcgatgccgcgagcgccgcgtccgcctttccctcgaggaacacgtcgtaaaaatcgcgcatattccccgcgccgcccgaggcgatgacgggaatattgactgcctccgccgccgcgcgggtgagttccagatcgtagcccgccttcgtgccgtcgcggtccatgctggtcaaaagcacttcgcccgcgccaagtttttcggcgcggcggatccattcgatcgcgtccagccccgtattcacgcggccgccgttgcggtacacgtcccagccgcccttttcgtttttcttcgcgtccacagccagaaccacgcattgcgagccgaatttctgcgccgcttcgccgatcagcgaagggtttccgatcgccgcggaattgacggcgatcttgtccgcacccgccgagagcatggcgcggaagtcctccgccgtacggatgccgccgcccaccgtgagcggtatgaatacctgctcgctcgcgcggcggatgatatcgtacgccgtggcgcggttttcgcaactggcggtgatatccagaaagacgatctcgtccgcaccgatccgatcgtacgctttcgccgtttccacgggatcgcccgcgtcgacgagatcgacgaaattgacgcccttcaccacgcgccccttgtcgatatcgaggcagggtatgatgcgtttacacagcatagaaactcctatatttttgttcacgaaatttgttcgaaagagacgaacaaatttccgtaagttttgagcgacaaccgccgttcatgcgctactcgcgcatttctgcggcgtttttctctctgtgaaaattcgttacggctctcttattatcacaattttcgcattcactctttttcccaaagcgctttacgcgcaaattgaggttcgctgcgcaaaaacgcggttttgcttgcgagaattattttatattcacgaaattattcgtccatctttttatttcgcggcgcggatggcttcggaaagatcgagcgcgccgtcgtagatcgcgcggccgagcaccgcgccgtatatgccgctctctttcaatctgacgatatcgtccagggtggacacgccgcccgacgcgatgacgttgagacccgtttcacggctcatgttcacggtcgcctccacgttggcgccgccgagcacgccgtccttggaaatatccgtgaacagcgcgtattccagacccatgcggcgcacctttttgccgaaatcgaccgccttcacgtccgtctgctccgtccagccgctcacggcgaaatagccgtccttcgcgtcgatgcccgccacgattttattgccgaatttatagaccgccaaggcgaattcgtcgggatggcagattgccatggtgccgatgatgacgcggtccgcgcccgcgtccagccgccgctcgatatcctcgatgctgcgaaggccgccgccgctctcaatgggaatgccgaatttcgatttgatctcgcggatcacatcgtcgatgccgctctcgcccgaaaacgcgcccgaaagatcaaccacgtgcagatactccgcgcccgcttccgcccacatttccgcaaagtcgagcggttctccgtacaccgtcgcctgcgacttgtcgccgtgtttcaggcgcaccgcccttccgtccagaatgtcgattgcaggaaataagatcattaattgtgtccccctttgatttcaattatcttgaattttcgcaaaatttttcaatagtttcagtcccgcttccccgctcttttcgggatggaactgcacgccgtacacgttgccgtaacatatcgccgagggatattcgacgtagtattccgtcatcgccgcggcgaaccactcttcggttttggcgcggtaactgtgcacgaaataaaactgcgtgccctccgcaatgcccgcaaacagcggcgttctcagccgcgttacgctattccagccgatctgcggtatttttccctcttcgaaacgcacgacctcgcccgggatcagccccaagccctcgttgcgcccgtcctcgtaactgacttccagcaaaaactgcatgccgaggcagatacccagtattttagtgtttacggcgcgctctttgacgtatgtatccagccccgtgcggcgcatttcgcgcatgcccgcgccgaaagagccgacgcccggcaaaatgagtttttcgcacccgtccaaaagttcgggatcgcccgaaacgatcgccgtttcgccgatgaattccagcgctttctgcacggagcggagattgcccatgccgtaatcgacgatgccgaacacttacagcacccctttggacgaggggatctcggtgcccgaaaccgcgacggcgtcgcgcacgcaccttgcgaacgctttgaacaggctttcagcctcgtgatgcgcgttgccgcgctttaacagtttcatatagagattgacgcccgcattgaaacaaaacgcgcgcatgaattcttccacgagttccgcgtcgaactcgcctatcttgcccgaaagtttatcctcgaaattgaggaaaggcctgccgccgatatccagcgcgacgagcgctgcgcattcgtccatgggtatgacgcggtcggcaaagcgcgcgatgccgcgcttatcgccgagcgcctctttgaacgcctgcccgagacagatgccgatatcttccacgctgtggtgaaaatccacgtccgtatcgccgtgacagagaactttcagaccgacgttcgcatggacggcaaacagttccagcatatggttgaaaaagccgacgcccgtgtctatttcgtgcgcgcccgcgccgtcgagatcgagtttcaaaacgatttccgtttctttggttttacgcgaaatttccgctgttctcatgctatttttcctccaaacgcacgcggacggcatttgcgtgcgcgcgcagtccctcgctttccgcgagacgaacgatgtccgcgccgtcctctctgatcgccctttcgtcgaatttgatgacgctcatcttgcgcaggaacagatcctggttgagcacctgaaaaaatttcgccgttccgcccgtgggaaggatatggtcgggtcccgcgaaataatcgcccacgggttcgggcgtgcaacttcccagaaacaccgcgcccgcgcagtcgatcgattccaaaagttcgtccgcgttttcggcggcgatctccagatgctcgggggcgatctcgttggcgagttcgcacgccgcgcgcatatcttccaccagaatcacgccgccgccgttttccagcgatgcgcgcgcgatgtctttgcgcgggagaaattcgatctggcgctccacctcttcgcagagcctttctgcgaacgcggcatcgtcggtcagaacgatggcgcgggaaaggcagtcgtgttccgcctgcgataatacgtccgccgcgacgaatttttccttctgccgcccgtcggcgatgatcaaaatttcgctcggccccgcgagcatgtcgatccccacgtcgccgtacacttcctttttcgcaagcgtgacgaagatattgcccggacccgcgatgacgtccgccttgggaatgctttccgtgccgtaggcgagcgcggcgatcgcctgcgcgccgcccgctttgaacagcgcagtgacgccgcattcctttgccgccaccagcacggcgggatcgaccttgccgcctttggctggcgtaaccgcgtaaatttcctttacgcccgccgctttcgcgggaaggacgcccattaaaacagaactggacaggggcgccgtgccgccgggcacgtaaatgcccgcccgccgcacgggccgcacaacatagcccgtcgttctgccgttttcggtgcggatatccgattgcaagggattgcgcgcgtgataatcgtacacgtttttcaccgcttttttcagggaaacgagaaaatcttcgctcacctctttataagcgttttgatattctttttcgctcacgcgcacggtatcggcggtaagaacgctgccgtcgaatttttccgcataggcaaaaagcgccttatccccgcgcttttgcacgtcgcgcacgatctcttttaccgccgcaactttcgccgcgtcgtcgaattttccgcgcacgaggatctcttccgcctcgtccgcgttcgcgtatatcttcataaactacctgtcaaacatattttttcatttcgccgatgaggggcaaaatttcgtccgctttggtctttaaactcactttattggcaatgagccgcgcggaaatatcgaacacctcttccagaacttccagcccgttggcgcgcagcgtgccgcccgactgcacgatatcgaagatcacgtccgatagccccgtgagcggcgctaactcgatggagccgttgagtttaatgatctccacgtcctcgccgcggctgaaatacaggcgcttggcggtattcacgtatttggtcgcaacccgcaaatgcgcgccagcctttttttcgttctcgggaaaacccgccacgcacagtttgcatttttcaaagcccagatcgagcatttcgtacagatcgcacccggcttcgagcagtgtgtctttgcccacgatgccgatatccgcgatgccgtattccacataggtgggcacgtccgacggcttgacgaaaaagaacttgaactttttgtccgccgtttccaaaacgagtttgcgcgtttcttcctttaaaatttccgcgcggatgccgcacttgataaagatatccgcgcacttttccgcgagccgccccttggcgagagccacgttgatcataatttttgcaaacctcccgccgtcgcctcgaacttttcgccgccgcgcgatctcaagatctcttccgacgccgcgccttcgggcaacaaatcgcaactcgcgccctctttcacatacttccgataggcggcgtagccgttcgcttcgccccccttgcggcagatgacggtgattgcgggttcgggaacgtctattgtctttcccgcctcttccagagcagcgagaacgcgcttcaagccgatcgcgaaaccgatggcggaaacgcccctgccgaactccgcggcgaggccgtcgtagcgcccgcccgaaagtagcggcgcgcccacgcccgcggcaagacccgtgaacacgatgcccgaatagtaatcgaggctcttcacggtcccgagatcgaacgaaacgtatttttcatagcccatttcgcaaagatacgcgtacacctctttgagtcgcgtgagcgcggacagcgcggcgggattttcagtgagtttttccgcctctgccaaaacttccacgccgccgaacagcgacgggagcgccagaatcgcgccgagcgcgcgcccgtttgcgttgtattttttcaaggaaagttcggtattgatggcgtccttcgcgttgacgtagccgcgcacttcctccgcctcctcggcggacagcccgctgccctccaaaagtcccttgaaaaagccgacgtgccccacgtcgatgatgaaattttccacgcccgcggcggcaaggcagtcgatggcgaacgcgacgagttgcgcgtccgcgaacgcgccgtccgagccgaacacttccacgcccgcctgcgatacttcgcggtaggaattgcccgacgcggaaaaatcgtaaatgtcggaaaaatagcagagtttcgcgctcggcgcggtcattttcgtcgccgcgatgcgcgcgaccgccaacgtcatatcggggcgcagaacgatgagattgccgtccttatcggtcattttaaacattttcgactgcggaatggggcttttgatgcccgcgtacgtgtcgaaatattccagtcccgccgtctgaacgaattcatagcccgaaagcagaaattcgcggcgcagcgcctccttgacgcggttgacgttgtagcactctctttcgaggctgtcccgcacgccctgcgggagtttgacgtaattcattctttctttccttacacaaaaaatcgtgaatacattttatcatttttacagcaattcgtcaatgctaattgagcacaacgtccttcaatccgctgtattttttgagcgcgagcgccgcgagcgcttctacgccgcccgcctcgaacgcctcgtcggaaagttttttcgccgtaaagatgaccgagggcggatagcgcaggttgcgtatctcgttgatgaacttgccgctctggcgcgtgccgagaaaatcgccgctgccgcgcatttccagatcgtattccgcgatcttgaatccgtccgtgttgttttttaatacggcgagccgcgcgcgcgcctcctcgccgtccgcgcccaaaagaaggaaacagtaactctgtttgctgccccgccccacgcgtccgcgcagttggtgcaactgggaaagcccgaaccgctcggcgttgtagacgatcatgatggtggcgtcgggcacgtccacccctacttcgatgactgtggtggaaaccaggcagtcgaacttttttgccttgaagttttgcatgatctccgccttttctttatccttcatcttgccgtgcagaagggcgaacctgaccgaaggcaggcggtttttcagttcgtcgaaaagttcggtcacgctcatgaccgagccctcctcgtcctcctcgatcttgggacagacgaaataactctgattgcccgccttcgcctctcttcccacgtaggcgagcatatcgtcgtacttgcgcgagggaacgatcgccgtggtcacaggcgcgcgcgccttgggcttatccttgatctcggtgatgtcgagatcgccgtaaaagatgagcgagagggtgcggggaatgggcgtggcgctcatgacgagcatatccgcgcccgcgcccttttccgaaagcgcactcctctgcgccacgccgaaacggtgctgctcgtcgcacacgcacagggcgagcgaggcgaattccacgtcgtcctgcaagacggcgtgcgtgccgcacacgacgtcgagttctcccgccgcgagggcggctttgacgctctttttttccttcgcggaggaagaaccgctcaaaaatcccgcgcggaactcgggaagatagcggcaaatcaactgataattctgctcggcgagcacttccgtgggcgcgagcatcgccgcctgatacccgctcgcgagcgccatatagatgccgcagatcgcgaccgcggtctttccgctgcccacgtcgccctgcaacaggcggttcatgcggttgggcgaatgcacgttttcgtaaatatcgtccacggcgcgtttctgcccctccgtcagggggaagggaaaacgggcgcagaatgtttcgacctgctctctcgtgcacgtatagcgcagcacgcgcgcgtcgtccttgccgcctttgatgaccttgaatgcggagatgaggataaaatattcttccaaagcgatgcgttccgcagccgcgtccttgtccgcaaacgtcacgggattatgaatgtcggaatacgcttttttcagatcggaaagcgcatactttttccgaacggcaggcgggatcgcggaaacgagcgcgacttttctgagcgcgtccgccaccgcgtcgcgcacggcgcgctgggaaagcgagccccgcaaggggtacacgggcacgatgcccttgagcctgtaatttcgttccagcggctcgaacgtgggattgaccatggagggcgcgccgtacttgttctgcacgcggccgtaaaagaggtattccccgccgcttttcagtttgtcgcgcacgtagggcgcgttgaaccagacggcggaaaagggctcgccgtcgttttcgcaccacactttgacaaaggagcggcgccccgtggaaaccgtctgcggcgcggacgaaacgcggcaggaaacgagcaccacgtcgttgtgatagcacgcggacaggcgcgaggtcgtcgtcagatcgagatatgcgcgcggataaaagcgcgccatgtcttccgccgtaaatatattgagtttgttgaggtctttcgcgcgtttgtcggagatccccttcaattcggtcagtttcattttttcggtcccaaaaaaatcaaaagcggggcgcataaaactccccgctgctttttcctattccaaagataccagataataatagatgggctgcccgccgtaatgataatcgacgtcgcaatcgggaaaccgttcggaaacctttgccgcgagcgcctccgcatcctcttccgcaacgtccttgccgaagtacagcgtgatgatctcgtgggtgccgtctttcagtttttccaacagcgtcaagaccgtgtcgtccacggtgtcgcccttggaaagaatttttttgtcgtccaacccgatgatatccccttccttgagttggaacccgttcaggctggtcgaacgcacggcgtaggtgacttgtcccgccttgacgttgtccatcgagtggatcatgtccgtcttgttctcctcgctggaactgtcggggttgaacgcgagcgccgccgcaaagccctgcggcacgtttttcgtggggatgacgtgtatcgtgcggttggtcacgagcgctttcgcctgttccgccgctaaaatgatgtttttattgttggggaacacgaacacgtgctccgcgttgatcctctgcaccgcgtccgcaatgtcgctcgcgctggggttcattgtctgcccgccctcgattacgcggtctaccagaagatctttgaatatttccgaaagcccgtcgcctgcgcagatggcgagcatacccatttcctttttctccgcctcgcgcttggcgcggagcgccctgttctgttcgagcatgttctcgatcttcactctgtcgagttcgccgagttccaccgccgaagagagcgcgagcccgggattattggtgtgcacgtgcactttcacgagttccagatcgccgatgcagatgacggaatcgccgatggtcatcagtttttctttgagtttgtctatgtccgcgagcgtcgtctgttttttgaggttgatgatgaaaaattccgtgcagtaggcgaattcaatttcgcctagatcgagattgacgatatccgaattgtcgccgaacgcgtcttccgaatcggaagtttcgggttcgtatacggcggactcgtccacctcttcgccgttgagaacggacaaaaatccgcggtacacgcacaaaagccccatgccgcccgagtccacgacgcctgcttttttcaatacgggcagaagttcgggcgtcttggcgagcgcctcttcgccctttttgatgaccgcgtccaaaaacgcgttgaattctttgtatctgggagccgcctgtttggcaaactcgctcatcaggcgcgccacggtgagcattgtgccttccttgggcttggacaccgcgccgtaagcgacctgcgtgccgcattccatagccttggcgaacgctttgatggtgatctcgtcgtactttttgatttccgaacagatcccgcgaaacaactgggacaaaatgacgcccgaattgccgcgcgcccctttcaaggcgcccttggcgaccgcgtcgcaaagttcgggcagacgattggacgagcatagaccgagttctttgaccgccgattgtatggtcaaagacatattggtccccgtatcgccgtcggggacggggaatacgttcaatgaatctactttcgctctgtttatttcaagcacgcgcgctcccgaaataatcattttgcggaactcggcgctgttaatcgttttcggcatgaaaaagcaatctccttagatccgggacagaattacagtctgaccccgataatatttacgttgaccgtgtcaactatcatacccgtaaatttctcgactctgtatttgacgctctctttcaaagattcggcgacggcgttgatggagactccgaattttataatgacgtacacgtcgatatagatcctgtccccgctcgtcgtgactttcacgccccgcccctgcgtctttttattgaataactcggagaggctgtccgtaaaacggcgcgacacggtttcgacaattccgtagcactctaaagccgcctgcgaggcgactttggcgatggccatgtcggatatggaaatattgccgtaagcattgctcgtttttactgacataataacactcctgtatcactgctattttaaactattttcacataatttgcaagaaaaatacgaacgcggacaatacatttttttatttttcataatttttgcgcaaaacgccgtaaaaataattgctttttttcggatattttgataagataacaatgctcgtttcgggcatagcgcggtttcgcgctgtttatcatgattatttaccgtggaggtgtttgatatgtcaagagtttgcgtcgtttgtcagaaggggcagagtgcgggtaacaacgtgagccacagtaaccgcaaaacgagaagaactttcaaagccaacgtacagaaagtaaagatcgtaaaggacggcaaagtcgagtccgcttacgtctgtgcgcgctgcttgaagagcgacaaagtcgaaagagcgtaaccgtttttgattttgaacttttcgcccgccttcggttttccgagagcgggcttttttccgtattcgcaaaaacaagggggttcccgttcgggagcccccttgttttacttgcgcacaaagactcttaaaacttttcgtatgacgaggggcggtttgatacagatgatcctcaaatgacgttcactcctttccgctcacgattttaaatacgaaaagcgcgccgccgtcgcaaaagatttccgcctcgtcggaaagtgcgacgttgctcacgccgcggcagctccccgccagcagggtcaagtcggtaagcggatactttaccccgctactctccattatatgcgcctcgtatcccacgggtgcgaggctgaacgtcctgcctttacagccgcggatcgggaaacgcccgctctcgcaggaaatttcgctcgttttcgtgtacatcaccgcgtgcgcgccgcgaagccgcgccgcgtacagcaactggatattgccccagagatggtcttccctgccgccgcctccgccgtagatggaaatttctttcagtcccgcttccagcagtttttccagcgcgagttcgccgtcggtaaagtttttttcttcggggtatctgacgccgttttcgggcacgtaacccaaagaatcgaaatcgcccgtcagaaggtctacgcgccccgctttttccattgcccagcggtacgcgccgtcgcagcaggcgacgaaatcgtctttctccacgcggatcttttcttcgggcggctcgccgtttagtaaaagaatgcctttcaacttattttcctcttttcagcgcggcgatggtcccctccatatcgtcggaacaaaagaccgtattgcccgccaccaaaatattgacgcccgccgcgacgatcccgccgcagttctgcaaattcacgccgccgtcgatctccacgtcggcatcgggattgcagcgatcgaagatcgcgcgcgcctcccgcgttttttccagcacgtgcggaatgaatttctgtccgccgtagccaggaaatacgctcatgacgagcagcatatccacctcttcgagcacgccgtacacggcggaaaggggcgtatcgggattgatgacggcgccgcacttcgcgcccagagagcgaatgaggcgcagcacgtctttgagcgatgcgccgcacgcctcgtgatgtacggtgacgatatccgcccccgctttgataaagttttccacgtgccgttcgggccgctcgatcatcaggtgcacgtcgagcggcagcgaagtatgttttctgatatcgcgcaccatgtgatgcccgaaagtgatattgggcacgaaactgccgtccatcacgtcgcaatggatcaaatcggcgcccgcttgctgtaaagtttccaccgcctgccccatcgcggaaaaatccgccgatagaatggaaggcgcgatctggatgtgtttcattgtaactcctttgtgtcgctttggtcatcttgcacttcgcgcagtcttttcgcgcgaagttggccgcaggcgccgccgatgtccgcgccgatctggcggcgcagggtggcggaaagcccgctcttttccaatatccccaaaaaacggtacgcttccttttccgaaacggacgaaagacgtttttccttgacttcgttgaggcggatgagattgacgtggcatggcctgccctttaaaagttccgccaaaagttccgcgtggcgcttgtccgcgttttcgccgtctatgagcgaatattcgaaaatataccgccgccccgtcttttcgaaataataggcgcacgcctttaaaatatcttcgatcttatacgcgttcgccacgggcatgatctttttgcgctcctcgtcgagcggcgagtgcagcgacacggtcagattgacgggcagattttcctcggcgagttcgtacattttcggcacgagcccgcaggtggaaaggctgatgttgcgcgcgctgatacagatgccgccctccgccgtgacgtttctgagaaacttcacggtatttgcgtaattgtcgagcggctcgccgctgcccatgagcacgacgttggtgacggcgcgcttttcgagcgtgccgccgcggcgcgcgttgacggcgagcacctgcgacaaaatttcgccgcccgtcaaatcgcgcaccagcccgtttaagcccgacgcgcagaaagcgcagttcatgcggcagccgacctgcgtggaaacgcactgcgtgcagccgtatttataacgcatcaacacgccttcgacgatgttcccgtccgcgagttcaaacagatacttttccgtgccgtcggacgaaacgaacgtttcgcggatcttcacgggctcgtcttcaaaccgttcgcaaagtttcgcgcgcagcgttttggaaagttcggatagttcggaaacgcgctttccctgcatcagcccgcggaagatctgcgcggcgcggaacttccgctcgccccactcttccatcaaaatttgcaattcggaaagggaatgatcctgtaaaatctctttcatcgtttcctcagttttgcgacgtaaaagcccgcgcccgacgagatatggggcagaaactgcacgccgaacctcgttgtctttcccgcgagcgggctatgtattttttccgcggtaaaagcgggattttcctttaaaaagcgcccgaccacgttgtcgttttcttcgcggaacaccgaacacgtggaatagtacagcgcgccgccctctttcacgtagcgcgaacaggcggaaagtatggcgaactgcgtttcgggaagttcggtaaggctcttttccgtgcggaacagtttgatatcgggattatcgcagacgacgccgaaacccgagcagggcacgtcgcacaggacgccgccgaacgcgttttcataggcgggatcgaacacggacgaatcgcggcagactgccgtgacgttgtttacgcccatgcgcgcggcgtactgtccgatgagttttacgcggtgcggatgcagttcgaacgccgtaacttctctgcactttgccgccagaagcacgctcttgccgcccggcgcggcgcacgcgtccaaaaagcgttcggcgggttccacagcgtcgcagacggcgattgagccgattgactgaaaggtatatttcccctcgtcgtagccctctccgcggcggaaagaggaaaagcgataaacatggtcgaaaggcgtcttttccccgccccgagccaaaacgttttcttcctcttgggaacaggcaaaacgcacgcacgctttgttttctcggaacgcgagtattttttccgcctcgtcgccgtactctttcaaaaggcggcggacggcgtatgcgggataagaatatttttgcgcgagcaccgcgattttatccgcaggcacgggcactttttccgcgtcgaacgcgcgcagaaatgcgttcagaaagcccgcggcgccgccctttcccaactttttgcacaattccaccgcgttgtcggtgatcatatagcggggcttgttcataaaaagcagcagatagagggagattttcagcagaatacgcacgggaagtttggggcttttgggcgcgaacgcgcggatacagtcgttgaaatagccgtcgttttccagaacgccgtaagatatttttaccgtacgagcgcggttcgcctcttccatcggcgtatcggcgagcgcctgtttgagatacgcgccgccgccgtaaactttggaaaggacgagatagggatcacagaaaggattcgtcatgcgttttctcccgtcagcacgtcgccgacgg

SEQ ID NO: 4147 - DNA, 32759 bp, Unknown
  16S sequences of unknown bacteria
cgaagtgaccgaaggagcgcactgcaggcaggaaagtttgccaaggaggagagtgcgcgttgccggtttgaaaaaaatggaatcgtgtttgcggttccattttttattgtatagatttattttagatttgcgcgggaggtgtgatgagaaaagaaattgttgatatgaggaggaaaacgtatataattaataatattgcagtagggcgaacggtcgtatcgatgcagatcgggtttgcaccggtcgccgtacacggccgatcggttcgatggatggtaggctgatttaaggacagaaaagtgaattttcagagatggtaagggtaagaggaacaggaggaaatgataatgaaagtattgctggtaaatggaagtcctcataaaaatggatgtgtttatacggcgctttcggaggtcggaggacaattgaagaagcacggtgtcgattttgagatttttcatatcgggactgctcctgtgagaggctgtattgtgtgcggcgcatgtgctaagctgggaaaatgtgcttttaatgatgatgtctgtaatccgctgatggagaagatgttagaggcggatgggattattatcggttctccggtgtattatgcaggtaccaatggagcgctttgcgctgttttggaccgcgctttttatgcttctcagggcagatatgcccgcaagccgggtgcagcggtagtcagctgcagaaggggaggagccagcgctactttcgacagaatcaataagtactttactatcagcagaatgccggtggtttcctctcagtattggaattcgatccatggaacctgtgcggaggaagcgctgcaggatgaggaggggctgcagacaatgcggacgctggcggatcatatggtctggatgcttaggagcatcgatgcggcaggtttggaggctccggcagcagagccgccgagaaagacgaattttattcgatagtttttattgttcgttcattttttattatcattttgcagattgagtgattagtatagctgactgcaccgggcggagggatcttaaatgatctctccgcccggtgttctggataggattacaagagggatcagacggctgtgcagcaggcggcagacagatgattcagatctgaaaaaacggcctgaaatattttcagggttgagtaacttgtgtataaggaatattgtattttatggaaattggaattattctgcatcagatgctgcagttttttatcatcatgtttctcgggtattttctttctaaagtgaagctggtggatcatgattttataaagaagctgacgaagctgcttttaaatgtgacgctgcccgctacgattttttcttcggtgttggaggcggattctgaacgcgatccgggaggcgtggctcaggtctttgtgatcggtgtgatcgtgtatgcggcgctgccggtgatcagttttgtgatagtgaaattgatgcgcctgcccgggagggaccggggattatacgcgtttatgatgacgtactccaatatcgggttcatgggatttccactgatggatgctctgttcggtcagaaggcggttttttatgcggctatcgtcaacgtattgtttaatatatcggtctttacctgcggagtggtaatgatgaatgtgggccgggcggataatttgacggggattcaggaaccggaaaattacgaagccggggctccggagcatctttccgaaggaatgcaggtgcaggagagcggtcagccgaagatgaaaaaaaacaggatgagacggaagtcaggggttaaaaagagcgcggcacaattcaagctgaaaaatcttctgtcgccgggtgtcagtatatcggtaatgtcgattgtcgtatattttatgaatattccgtttccgcaggatatccgcgctgtcgtttcgtccgtcggaggcattacgacgcctctcgcaatgattttaatcggagcgacgctggcgacgatggaactgaaatcgattttcagcgactggcatgtctatttttattcactggtgaaacaggtgtttgtgcctctgctgttgtggccggtactgaagctgtgtatctcagatgaatttattctgagtgtcgtctatattctgattctgatgcctgtggcaaataccagtgttttattcgcgactgaatatggcggagatgagaaactggcggcgaagacggtttttatcactacggtgatgtcgattgtcaccgtgccgcttttattgatgatatgtatgtagtttccggcggaaaagccggtttgccgtaagacagagaaaccggcagaaaatcaggcgaagagtatatcaagagtacaaccggcagagtgcggacagaggaactctgcgctggagcgcggccgctgtatggttcgtgggaatcgattttcaggacgaccggtgaaatcatttcgatgaatgatctgctgacagctgaatatccggcagagtttttttcggaagacggagcgcgggaagagagaaaggaaaaaaggataggatgacggatcagactttgttatttgacggaaaacgaaatgcggaaaaccgggaatcttcagaggacttctgcacggtaggagagagaaaaaatccgcagaagggacgcgaaccggttccgggcaggagataccggcattttaaggacaggctgtaccagatcgtaacggtggctcttcattcggaaacggatgagaagatggtggtgtatcaacagctgtacggagattatctggtgtatgtgcggccttatgaaatgtttatgagtgaggtggatcgggaaaaatatcctgatgcagaccaaagatacagatttgaaccgctggaatagaagagcagatgcagattctgcagatttctgatatgataaaagaatgaaaatgagattgcggagcgagtcggagaagagtttatggatacttatctggaaatgtacacggattatctgaagaatgtgaaaaacatggcgaaaaattcgctgtcggcataccgacgggatatcgcggattttcatcgttatctttcgtcgcggggcatcggctgtgccgaagaaatttccggcgcggatatttcttcgtatgcttttgagctgaaaaacagcggcagggcggcgtctacggttcaccggaaaatggcatcggtgaggtcttattgtctctatctcaccggagagggtattctggaggaaaacccggcgagaaatatcaggccgccgaggatggagaaaaaggaaattgaatatctatcgatacaggaggtagaggccattttaaatgcgccggatgattcggtgaaagggcttcgtgaccgcgcgattctggagatgatgtacggcaccgggatccgggtcactgagatttccagcctgcgcatgagcgatgtcaattttcgcatcgggtttatcacctgtaccggcgaatacggaaaagcgcggattattcctttggggcgcccctgcagggaggctctggagcgttatctcgacgaatcgcggccgaagctgctcgaatcctatctcaggaggagagcagaacaggagatgtccggcacagagagtgcagatgacagagatgcgggcagaaaggaatctccgcaggagtatatcttcatgaattatcacggagaacgtctgacccggcagggattgtggaagattgtccgcacttatgcgaaaggggcaggtgtggagaaacgactgacgcctcagattctccggaattcctttgcggtacatatggtgcagaacggcgccgatctcaagtcgattcaggagctcatggggtatgaggatgcagcgacagcgcagatctatctgacagtgacgaaaaaccggatcaaagaggtttatgataaaactcatccgagagcctgaacggcggatatggaaaagggagacaagggcggcttacgggttttggcgaagtttcggaaagatcattttttaggaggactgcggtgatacggactgcagacagaaaaatctgggtgcaaaagaacacgacgcaaaagtcaagattaaattgtaaaaaaacctgaaaaagcaaaagaacacgaataaaaaagattgatttttttatgaatttgtgataacatagggcggtattacgggcggtccgctgatatggcgcgcacggggcgcgcacagagacggagctgagaatagtatattttcagtatcgaagaggtctctgttcatatcaagaacgtttcgagagaaagaggattacagatgaacattatcgaagcaattgaacaggattataagagagatgatattcctgaatttggcgttggtgatactttaaaggtatacatcaagatcaaggaaggcaacagagagagaatccagatgtttgaaggtttcgttctgaagattcagaacggcggtctgggtaagacctttaccgtcagaaagatctcttccggcgtaggtgtggaaaagactttccctattcactctccgatgatcgaaaaagtcgaagtgacaaagcgcggcgctgtaagaagagctaagctgaattatatgagacagagaacaggcaaggctgccaagatcaaggtaaaggaagaaaaataagagaacgatttctcagaaggatcccggaagggatccttttttcgtgctgatctgccggtatatgccggctcatctaccggatctggcggagaatctgcagacgtgtttttctgtcctttttgtatttctgcacaaaaagaaacgctgaaaatggatgggtaaattcaatatgacgcggtgacgaggagaaggaaatgagatacgataatctgtttggtgaatccgctgcgcagatctgaaagccgtctgatgtcagaatgcataaaaaggcagaaatccgaaccgaaataatttaagaatttcttaaggaaatgaagaaaatatcttaaaaattcgctaacaaaaaatggaaaagagcaactttcggcataagttgctcttgaagttgaaacttgaaatgagttaaaacgaataataagttcaagataaatataaacttattagagataaaaagcaagtgttttttgtgtgttttttgaaaaaatttttttctgtcatataactgtaataattcccatggttatgggggttccagcggatgtaaataacttccaaaaagaaaaaatgacgaaatgaaaaagcgcggagaaatgctttccgggctgaagaaaaatggcgaaaacagggtgtgcaggacgatgaaatgagagaaaaatcgggctgttttacaatatatgtatgaaaatcaataaaattactaaaccgaaatattttcggtttaaggggctttttggtatatttgtcagacagaaaaggtctttttgaccgaccgaaggatatatttattttgttttgacggacaaagcaaaattgggtattgtaatagtaagaaaagcacatttcgtattttgagagactggcaatcatacggagaagccctccggcaagtcaggatcagtccgtgttttcagcctttatcagtcagacggcgggttttgtttccggatttctgtgagggttggaatctctaactggaattaaaaggtgcagaaatggtcggaggacgctgtgccgggatcgtcggtgtgttgtaaccaggcggtatgataacagtctctgttctggatcggacggggatccgcaggtggagcggggacgtccgcaagccgcagtccggtacggggggcggagccgcagaggaatgaaaggggcagatcggtatgacagatttagaacaaaagcgggctttgaaaaaagaatgggatatcgtaaagaaaaaagaggaacgatttttcgcggagcagaaagagaaaaaggacagcgcactgaatcggatgctggagcaaaaggtgccggaaaagctgcaggcgacgctggacgcggctttcagcaaggcctttacgctggtttttcacagagggaccgctgtcattgaaaagacgtaccgcaaagaagcgatgaaggaagcttatgaaatcaattcctatgcgatcggtgtaaaaaagggagcgaaaggactgcgcgctttctcaaaaaacgcgggcagagcgggagcaaagaatctggcggtcagcagcgtagagggaatcggcctgggaatcctgggtatcggtcttccagacattcctatctttgtcgcagtcgtgctgaagaatatgtatgaactcgcgctgaattacgggtatacttacgaatcagatgaggagcgccgctggattcttctgctgatccggggagcttttatttacggcgaagatctggagcagcttaatcgggaagccgattgttttatcagagaacgaaaactgccggagggatgggatcagaaatctgaaattaaaaagacggcggcggagttgtcgaaagagcttttgtatatgaaatttctgcaggggataccggtggccggcgccgcaggcgggatttataatgtcatttatctgagaaaaattcagagatatgcgggcatgaagtaccgcaagcgttttctttacgatcaggccagaaatatggtaaaacaggagcatgagaacgggggcgaacagggtgcggtcggagacggcgcgccggattgcggcgcaggatcatcagcaaaaacgacgcatgagatttcagaccggacgccggcggatccgtctgatgtttgcgatgaataacttgttacatgtttggatgtgtgttatcatgataaaagcgctgaatcggaatgatataggtctgcaaaggcacatacagcagagggcggcagcctggtactgacacagggagaccgccggcatcggccgctgcggatgtgcagaccggatatcgggttctgtgagatgcgcaaatagataaaatgacaggtgacagctgcggagaaccgaaaaagtaaacggaatccgcgggctgttgaaaagggaagcgggtgagagtcccgcgcgaactcgtcactgtattgagcgagcggataccggccgctgcggcggaaatccactgggagaccgggaaggatgtgtgtctgcaaagacctctgagtcaggagacctgcctgtcgtttgtacagaggcggccgtgccgtctcaggccacgagtaactggtcgtacgctaaaatcaggtgaacagaagctcagcgcagactgtgattgtgattcctgcgcaggtttttgtccgccgcttttcgtgtacccccttttactgacgttaaaagggcttttttattgccgcgtattatcctgtttttattgtacagaatcggtctgtcccgctgcagcgggacagcggggaatcactcactcagagaaggagtggagcggcgttcctattttcccgcccggaggagtattttcggccggtgttatgccggacatgccccaacggtgtgcggtgaaggggtgaaaaagtccgaagtatgagtcagcttttatttcaggaggtaaggtgaaatgaaaatgaaaaagttatctgtcgtcttgttgtctcttcttgcagcagtaatggtgctgtccgggtgcggtggcggagcgcaggataatgattccgcagaaagcgcggagaacggagcgaaaaacagtgatcaggcgattctcatcgtcagcttcgggacaagttacaatgacagccgggataagacgataggagccatagagaccgcagcggcagaagcgtttccggaatatgaagtgagaagagcgtttaccagtcagatcatcatcgacaagttgaaagaacgggataatcttgaaatcgataatgtgacggaggcgctcgaccgggccgtcgcagacggcataaaaacgctgatcgtgcagccgacgcatctgatgaacggttacgaatataccgatctgaaggaagaattggagacctatagagataagtttgaaaagatcgcactgggcgaaccgctgctgacaagtgaagaggattttcgcgcggtagcggagaccatcacgtcggagacatcttcttatgatgacggtaagacggcgatctgttttatgggacacgggacagaagcggattctaatcaggtttacgcaaagatgcagcagacgctcgctgcgatgggtaaagatgcctattatatcggtacggtagaggcagagccgacgctcgaagatgtgatggccgctatgaaagataaggggtacagcagagttgttctcgaaccgctgatggtggttgcaggagaccatgccaataacgatatggcgggagatgaggaagattcctggaaatctcagctgcaggcatccggttatgaggtggaatgtgttctcaaaggcctgggtgagttcgagggaattcaggacatctatacagaccatatccgcgcggctgtggacagtctgtcatagaggcggagaaaaaggtatccgctgatctgcgccgggatgcaggagaggccggtatgccggtcagcggaacggaaagcaggaacaatgcaaggatatcattcaaatcggaaagggttctgtcatggtgaaaggtaaattatctgctgtcgtgccgatcttactggcggtatcgctgatcttcgcgatatgttttccttctttcgctgaaagcggttcctctcaggtggcaggagccgatgagatggccgctcctcaggaagtcggaagcgaggaaatgacagcgatttcaggggaacaggtggacgacggtcagtatgagatcgacgtagactccagctcgtccatgtttcgcatcgtcaaagcggttttgacggtagaggacggaaaaatgtccgctgtactgactctcagcggaaaaggctacggaaaactctttatgggaaccggtgaggaggcggtcctggcggaatcctcgagctatatcccatttcaggaggacgagaacggagcttatacttacgaagttccggtagaggctctcgaccggaaggtgaaatgtgcggcgtggagcacgagaaaagagaaatggtatgaccgggatatcgtctttctttcagaccggattcccaaagaaaatattgcaggccagggcggcggaacggggcattctgaaggggcaaacggtggtgattccgttctcgccggcttttccgacggtctttaccgcatcggcgtgacccttctcggcggaagcggaaaggcttcggtgagcagtcctgcggaactgaaaatcaaagacgggcaggcgacggtaaggctcgaatggagcagtcccaattatgattacatggtcgtggacggagttcgctacgagccggtcaatacggagggaaattccgtatttgaaataccggtcagcgtctttgatgaggatttttttgtcaccgcggatactaccgcgatgagcacgccccatgaaatcgaatatcagctgcggtttgattcctccagcattacaccggatgagacggcagaacggggagcgaaagagagcgcccgggataaaagcgtttctccgttgattatcgcgggagcagcggttctcatctttgcgggacttgtcataggcgtgatcgccggacgcagaattgcagcgaagaaaaaaacgagataagctctgagaatacaaaaattgcgtatagggaataagcaatgcagctgaaattgcaacggatgtgaaagactggtatgtcgcgttagaggctggtacggctggcgaaaaggaacgctataaaagagaggcagacacagcgaaaggtggaaagaggaaagtgatatttctgaaaaagcggccggaagaaagaaaaattacagagaggatcgaccaaagatgcagggctgtttttgcggttctgcttatcgtgtctctttcgttcgtccttttatcgggatgctctgagagcgcagagttttcggcggaagaacgtttttctgtttctgaagcagatctgggcgggctggaaatcgccggcagtatggagctttcttatgcttcggagttttctgtggattatctgagcaatggaggcaggctgatccggatttccgacggcagttgttttctcatgcttcccgagggaacggagcgtccggagggactcgccgatgaaatcactgtgctgcaggggccggtaaaccgcatttatctggcggcttccgcggcgatggatcatttttgcaaaatgggcgcgatggatgcggtgacgcttaccggaacgaaatcttccggctggtatatcgaagaagtccgagatgcgatggaggaggggaggcttctctatgcgggaaaatataatatgccggattatgagttgatcctgagagagaaatgcgccttggcggtggaatccactatgatttttcacacaccggaggtcaaggaacagttagaggacagcggaattcccgttctggtggattattccagttatgagcagcatcctctcgggcgcagcgaatggatcaaactgtacggcgttctgaccgggcatgagcaggaggcggaagctgcgtttcagaagcaggcggatcagatggaaaccgcagtcagactggcgaagaccgagccgggagagggggaaaagacgacggcatttttctatatcacctcaaacggcgcagtcaatgtgagaaaatcaggcgattatgtatcgaagatgatcgagctggccggaggccggtatatcttcgacgatctgggcagcgacgacgggaaagcgacgacgacggtgacgattcagatggaggatttttacgctgcggcccgggaggcggattatctgatctataattccaccgtgggcggagaactgaaaaccatcgatcagctgctgggaaagagcgagctgctggaagactttaaggcagtaaagtccggaaacgtatattgtacgggaaaaaatatgtatcaggaaacgtcggaggccggaacgatggtgtacgatctgtatcagatgttcagcgggaaggaagacggaatgcagtttctgtacaggctggagtgagtttttatatgatcgtcaggcagggataatacggaagctgccggcgcagactgattctgcggagagcggggatttctgagataaaggagcagcgtatgatgccgaaagagaagacaggaagatacaagtatatccggtatatcatctgttacggtgtactgtcgttgctttttctgatctttttcctgtggaatatcaatgcgggaagcgtggatctctccgtaaaggaaatcgcggagattctgttttttcattccggagatgagatggagtacggcatcgtatggaaaatccgtcttccacggattatcgccgccgcggtgctgggcggcgctttagcgctggcgggatttctgatgcagatttttttccgcaatcccatcgccgggccgtttgtcctgggaatttcttcaggcgcgaagatgacggtggctctgaccatgatctttctgctgaagcggggactggagtcttcatcgtgggtgctcattttatccgcgtttgccggttccctgattacgatgttttttgtactgatgatttccggaaaggtgggaacgtcgtctctgctggtggtctgcggcgttatggtgggatatatctgttctgcgatcaccgattttatcgtgactttcgctgacgacgcggatatcgtcaatctgcacaactggtcgatgggaagcttttccgggatcagctgggagaatgcgggagtgatgacggtatctgtgattttaacttcgctgggcgtgtttttctgttcgaagccgctttccgcttatcagctgggcgaggattatgctaagaatatgggtgtgaacgtccgagtgtttcgggcggttctcatcctgctttccagcattctttccgcctgtgtcacagctttcgcaggaccggtgtcttttgtgggaatcgccgttcctcacttagtccgtcatatgatgaatacggcgaagccgattctgatcattccggcatgttttctcggaggatcggttttctgtctgttctgtgatctcatcgcccggacggtttttgctcctacggaaatgagtatcagcgcggtaacggcgattttcggcgcgccggtggtgatctgggttatggttcggcggcgcagagagagctgatcccgcatccggcggcgcggacgcggaagtttcggcaaactgtggaaaatgtgcaggaacgatggagaatcgagaattttattttgtcataacaggcgccgggggagcatttgctcccccggcgccgtattggaattatttgtacgctctgatcagagtctggtttatcggaacgcccgacggaagggaaaatagcagcggaaaaagcgaggatgagacggcatgaatgagaacaggagacattattatttcacggcggaaggtctgtcggtgggatatgacggaaagcccctgatacgggatatcgatatctcgctggaacggggaaaaattctgacgctgatcggtcctaacggaggaggcaaatccacgattttgaggagtatcgcaggacagctgcagaaaataggcggaactgtctttctggacggccggaatacggaatccatcggccgtaagcagctggccagggagatgtctgtcgttctgaccgagcgggttcggccggagctgatgacctgcgcggatatggcggcagcaggccgttacccatataccggcagactgggaattttatcggaagaagatcgtctcagagtgcgccgggctttgaaaatcgtaaatatggagtcttatgccgatgcggattttcgaactgtcagcgacggtcagcagcagagagttctgctggcccgagtgatctgtcaggaaccggaattgatcctcttggatgaacctacatcttatctggatatcaagcataagcttgccatgctgcagattttgaggcgtctggtgagagagcaggctgtaacggtgattctgtcccttcacgagctggaattggcgcagaaagtctcagattatgtgctgtgtgtgaaaggcgagtatgcggaccgatacgggacgccggaggaaatttttaaagaagaatatatccgaaggctgtatgatctggacaatggatattacagtgagattttcggttctgtagagataaagcgggatgcgggaaaatggggggaaaggagcccggcagctgatgtttcggctgcgaatgatgcaggcaagccgggtacgccggaagtctttatcatcgccggaggcggcagcggagcgtctgttttccggcagcttcagcgggaaggcatccctttcgcggcgggagtcctgcatcgaaacgatatcgattatgaactggcgcgtatgcttgcggattgtgtagtccctgaaagagcttacgaacggatcggtgaagaagcatacgcgcaggcgcttcggataatgaggaattgcggcagggtgatctgctgtctgaaagacgaggaattcggtgagatgaatgacggaaaccggcgtcttctgcgggaggctgaaaaggctgggctcaatgtagaacgccggacgtaaatatagtggacccggggacgggggaggtacggaaaatacggaagtttcggttctgtggcagagtgagaattattttcggcattataccactttacagcggcaaagaaacggagtataatttttagtaatttgcgaatcagcaaagactgcactaatcaaaatcagagatggaacccgccgcctatgaaggcggggaatatcggcactaagttacaggaaagtgaggaagattttatgaagaagagctataagaagattcttctcgctgtcatggttatcgtactgacgttcggtatgacggcctgcggaaacggcggcagcggttcggccgaaaatacctcgtccgacggggattcggcgttcaaatctctgacggtgggaatcagcgcttctccgaagccttttaattatcaggatgaaaatggagaattaaccggccttgaggtcgatatgctcaagcatatcgccgaaaaaaacaatatcgatctcaatttcgagattacggaattcgaatcgatgttcgtcggtctggacgcgggccgttatgacctgatcgtcggcaatatttccaagaaaccggaacgcgaggagaaatacctgctgagttccgaaccttacttccgcagcaagatcgcgctgatcacagcggagggaaatacggagattaaaacagtggaggacctgggcggcaaaaaggtccctgcgggagcgggccgcgcgaacgcgctgtttatggaatcctacaatgaacagcatccggacaatccgatcgatatacagtacactgacgcagatgccagtgcggcgctgatcgacctgaacaacggccgttacgatgcgtgtatctataatacgacatatgtgtccggcgtgacgcaggaatacggctacaattttaacgtctacgatattccgaatgccgacgatattgaaaaaccggaagcatggcttctgttctcaaagacgaacacagacctgcgcgatttctttgacgaacagatcgctgcgatgaaggaggacggttctctttccgaattgagcgtcaagtatttcggggaagattatataccgaaaaactaatggaaggacggcagatcaatggaacagttatttaaaccttctgtcatctgggattctatcctggccatcattccgagtattccgattacgatgctgatcactctgatcgcagggctgctcggtctgctgttcggctttattctggcggtgctgcggataaagaagattcccgtgctggctcagttagcgacagtatatatctcctttatccgggggactccgctgctggtgcagctctttttatcctattacgggataccgatgctgctgcgagtcattaactataacttcggaacggagtttaacatcagcggcatttcaaatatcatcttcgcatttgcggcattctctttcaatgaggcagcatacaatgcggagacgatccgcgcttccatcctctctgtagaccgcagagatatcgaggcggctcattctatggggatgaccggagcgcagacgatgcggcgcgttattctgccgcaggcgatgatcgtggcgatcccgaatctgggaaacagttttatcaatctggtaaaggcgacgtcgctggcatacgctatcggagtcatggatatgatgggaaaagcgaaggtagtcgccggaaacaacatgcgcttttttgaagcgtatatcggtctggcgctgctttactgggtgatctgcctgatttttgaatttatcgtcagaaaactggaaaagaaatttaatattctggatcgggaggtggcggtcagtgatacagctcaggaacattcataaatcattcggagagaatcatgtgctgcagggcgtcgatctggaagttcaggacggcgaggtcgtgagtatcatcggcgccagcggttcggggaagtcgacttttcttcgcacgattaattttctcgagccggcggacgaaggcgagattattctcgatgacatcagagtggacgcggcccgggcttccaaagcggatattctcaatctgcgccgttgtacggcgatggtttttcagtcatacaatctcctgaagcaccggactgcgctggaaaacgtcatggaagcgctggtggtcgtccagaagaaagacaggaaagaagcagaagaaatcgctctcgaggaactgaaccgcgtcggtctgggagaccgtacggggtactatccccaccagctgtccggaggacagcagcagagggtcggtatcgcccgggctcttgcgatcagtccgaaggtcatgcttttcgatgagccaacttcggcgctggatccggagatggtaggcggagtgctggatgtgatacgttctatcgcgaaagacggaatgacgatgatcatcgtcactcatgagatgaattttgcccgcgaagtatcgaatcaggtggctttcttcgatgaaggcaagattctggaacagggaacgccgcaggagcttttcctgaacacgaaggaagaacgtacgcgccagtttctccagaggatccagaggtagggacggatctttgcaatagaaatggtgagagggattgtccgtcctgcgctgtgagacagcgggggaggcagtcccttttttagaaaaatgaaagcgaggtaatcgatgatgcgttttatcgcctgcggcgactctcttttttccagcagaaatctgagaaatcgtctggatcctcagctcgtagagctgcttctgtccgctgacggtgtctttaccaatgcggaattctgtaccccgaatccggaaactccgcccgcggcgggacggggatatatgacgtcggttcgtccgtcactgctggatgaattcgcttctttaaatatccgaatgctgtctttcgtcaataatcataccggagattacggctggcagggcgttctggatactatgaaagcagcggaggatcggaatctgattccgtgcggtctgggcagaagcctgagagaggcgcgtctgccgaaatttctggatactcctgcgggccgtgtaagcgtcgtggctacatcttccaccaggtctgaagtctttgccgccagcgatgcgggggcgggagtagcagcgcgtccgggttccaatccgctgcgatggtaccgctcttatgtccttccggaaaaagaatttgaacagctgaagaggatcgatgaaatgctcggaacgcgggacagcgcccgggaggggattcgcatcgaaacctgggaaccttttgcggaggggactttccgtttcggttcgatgtacgagggcgctctgcagatcgaacggggagagcgggctcatgtccgcacttatgttcatgaaaaagatgcggaggagatactcaaaagcattcgcgacgcatcccgccgttctgatctcacgcttttcagccttcacactcatgaaggaatcgcagagaactggtacgcgcagcagcctccggaatttatcgaaaagattgcccgggatgcgatcgatgccggcgctgacgcggtcatcggccatggagctcattttctgcggggcgtggaaatttacaagggccgtccgattttttataacctgggcagcctgctcatggaattcgaggccggcgagtcgattatcgctccggagatgtacgagagttacggttacagcatcgacagccgtccttccgatctgcatgccaaccgcgccaaggaccgagacggcaactttatcggttttaatgccgagcgaagattctcggagaattgtctggtgcagttcgatctggaagacggggaactgtctttcagcctgatacctgtcgatctgggtatggaccgggagaatccgctgcagaggggactgccgtacccggcctctccggacgccgcccgtcagatcgctgagaatctgacgaagtacagtgagcgttacggtacagaatttgtttatgatgagacaaaggacaggattgttctgaaataaccttatgattccgcggtaagagccgcaggacggaacaggtttctttcctgcggtatatgaaaaacggcggcggcttcgggaatttcccaaagccgccgccgttttccgccgtactggtccaagactgctaccctttgtgccgtttttttctctgtccggatgtcttttttccgccatcctgcggttgctctgctgaagcggagcatttcggttttgccgttctgttctctgatacggcgcccggcgttttgtcttatctccggtttttcttttcttcttttaaaaacgccagcggatcttcggaaccgatgaaatgcatcagctggtaggcgcaggtgatagaaactttctcctcggcgagaatgcggcggcattcttcccggtcggccaggatcacctggatatcctcgtcttcctcctcgtggatactggtggtttctccgctgaaatggccgtaaatggtggcgcaggcttcgtctgtcatgccgggactcatatagaacggacgggagaaggcgtcggaggagagcggttcaaaagtcagaccggtctcttcaaaggcttcccgcttggcggcttccgtcagtgattctcccttttcgatgagccctgcggggagttcgtagacgtaatcgtcgatcggataacggaactggcgttccagcaccagtttatttccgtggattccgaagagcatgactccggcaggctttaattcgtggttcagagcggtgatgccttcgatttcttctgaacgggaagcgacgaaataggcgccccggctgccgtttctgtgagtgacggccaattcgtacatatttaaaaatcggttttctgtctgttttttcgcgtcgatgactctcgtcatttcagatctcctttcggtaactattcagttttttcacaactgatattatacatgatttcagaaaaattgcttccggttataatgttttcgacgggaaacggcgcggcggagagtgcggaaaacaggacggcttttcaccgcgggggccgggactcgctctgacgcaccggaggaagaggccccggacgagatccggcggtctgtgatgcagaaatggagaaaatagtgtataatattacggcaaaacctgaagctcccgctgtcgtttcagcgcggatttcccccggcgtgtctctgccggcgggcgggtgcggattgccgatgaatgggcttgtttttccgaagagacggaggagagcctgcgatagagaaaggacggtttcgacatggacagcgacagcagacgctttgcggcgggaatcaactggtaccctggacatatgaaaaagacgagagagatgattcaggaaaatctgaaactggtggacgccgtcgtcgaagtgatcgacgcgaggattcctgtctccagcagaaatccgattatcgacgacatcgtccgggacaagacgagaatcgtagctctcaataagatcgatctggcggacggtgctcagaccgaaagctggaaaagagaactgacggcggcaggtacttatgccatcccggtcaattgcaatacgggggcgggcatcaatcagattttcagacgtctcgatctgatcagagaggaaagagaacgggagaccgtcagaagacggccgctgcgcctgatgatcgtcggtgttcccaacgtggggaagtcatcgctgatcaataagctcaccggaaaaaagagcgcaaagacaggcgaccggccgggtgtgacccggggaaaacagtggctgacgctgaccaacggcatgcagcttctggacacgccgggcattctctggccgaaatttgaagacccggatgtaggtctcaatctggccttctgcggttccatccgggatgaaattctcgatgtggagaccctgtgtctcgaattgatcaaagtcctgctgcaggattacagctcgcttttagaggcgagatataaagtggaggagatcagcgaagacggtctggaagcgatggagcaaatcgctctcaaaagaggatttatttttccaggaaagcgcattgattacgagagaactgccaagactgttctcgacgaattccgcggcggaaagatcggacgcatcaccctggagcgttgcgaaaacgccggacgggaagagacggaggagatatgacgaaagccgagcgactcgaaaagatgagagaagatctgatccggatgagccggatcgaaagagaattatatcagaagggcaacgaacgcggagcggtgcgctgtatcgccggtgtggacgaagtgggcaggggccccttggcgggtcctgtagtggctgcggcggtcatacttcccgacggtttcgatattttgggagtcaacgattctaagaagctgtcggaaaaacggcgggaagaactttacgatgaaattctgaaaaacgctgtggcctggaatatcggtctgagggatcatgccgccatcgaccggatcaatatactggaagcgacgaaagaggcgatggaggatgccgtcacaggtcttgcaacgaggcccgatcatattctcatcgacgctctgacgctgccgtctgtggaaattccgcagacaggtctgatcaaaggtgacagcgagagcgtatccatcgcggcggcttccatcgtggcaaaagtaacgcgagaccggatgatggtgaaatatcacgaaacttatccgggatatgcctttgaccggaataaaggctacggtacgaaggctcattatgaagggctggatcagctgggtgtgtgtgaaatccaccgccggtcttttctggcaaaatatttcgcttcgaaataaaattccgcgccggcggggaagcggaagctcgtaagaggtctgccgcttcggtgacggttgaaataattgctcaaaaagcagacgcccgccgccgatttcccaaaatcaggttttcggcggcggacgcccggcaatgttaagagtgagtataataaaccatattatttctgatcatctgtcagaaaaacggacatatccatttcataatagagaccggtagccgttacgatgacggtatcgccatcttttaagacaccttccgtatagaatttcttcccttctctttttgtgacccacgcttccgccactaacttgtgaccgataactgcggggtttttgaagtcgcattctgaatgaagcgtaacactgtccacaccgtatccttccaccgcataatacatcacttcatccatgagcatcagggaaaaaccgccgtgcatcagtccgttgagaccgcacatgtagtcttccggcacgatctcggtgtgcgctttaccgtctaccgtcgtaattttaagatgaagacctctgggatttgtaggactacatacgaaacaatttgcgaatttatcgccggctgtaaatgtcgccatcattttctcctttctttttgctggatgataatttgtgtgctttttatgtgtatgataattatagaatgaggaatcgtatttttctgtagtttatactacaatttttctttcgggaggcaaaaaaatggatgtaattataccggatgatctgttcccgtattttgaaatctgcggaacgagaaagaattatgcgccgggggagatgatccggccggaggcgcagaacaatgaacgcctttatctggtggaatccggccgcgtcagagtctattgctccaacgcttccggaagggagctcactcttcggatcatgggcaagggccgactgatcggagaagatgtctttgtagaattcacaggagcgaaaaccgctgtatccgctgtcaacgaggttacggtggtcagctgttcggtagaagaactgttcccgtatatcgtagagtcggaagctcttctgagagcgattctacgtcatctcacaggcacgaatatctcgctgacgcgtcatctcaaaagaattgcgatttacgacagccgtcagaaagtggccagctacctctatgaagagacgagagaggacagcccgtcgagaaatatagtggatcatgttcttccctattctcacgatcagctctccgtctgtctggggctgaaccgggtgaccgtcagccggatactcgacgaatttcgggaaaagggatatatttccacagcataccgaaagattcaggtctgcgacttcgaggggctgcgcagagaatttgaggattccgacgagatgtgaaagagttgtctttccggcagatcggcggggaaaaactgagcatttttagagacaaagatacgcatttatagtaaaattaattggttaagataaaattaattttcatgataaaggagaattttcagatatgccgaagaacttagcgaagacatataatccgaaagagtttgagacgcggatttacgaagaatgggagtcaaataaagcctttgctcccgccgaagatcatacgaaaaaaccgtttactatcgtgatgccgcctccgaatatcacaggaaaactccatatgggtcatgcgctggatcagacgctgcaggatctgctgatccgtttccgcaggatgcaggggtataacgcactctggattccgggcaccgaccacgccagcatcgccacagaagtaaaagtagtggaaaagatccgggaagaagaaggcaaagaaaaagaagagctgggcagagaagagttcctgaagagagcctgggcctggaaggaagaatacggcggcacgatcaagcagcaggtgagaaagctgggcagctcctgcgactgggagagagagagatttacgctggacgagggctgcagcagagctgtcgtcaggactttcgtcaatctgtataaaaagggcctgatttaccgcggcaaccgtctgatcaactggtgtccggaatgcagaacctctctgtccgacgcggaagtagagcaccaggataaaaacgcgaaatattattatgtgagataccgcggcgctgacggcggcgaaggtctggtagtggcgacctcacgtccggagacgatgttcggagactgcgcggtggccgtaaatccggaggatgagagatatgcggacatgatcggcaagaaggttatcgttcctatcgtcgaaagagaagtccctgtcatcgcggatccgtatcctgatccggaaaagggcaccggcgccgtaaagatcacgccggctcatgaccctaacgattttgaagtgggtgagagacatgatctgccgagatggtcctgtctcagcgacgatgcgacgatgaatgatctggcaggaaaatatgaagggatggaccgtttcgcctgcagaaaggcgctgatcagagacatcgaagaagctggatatctggtaaaaatcgaagataaggtgattccgatcggcgaatgttaccggtgtcatacggtagtggagccgatgctgtcggatcagtggttcgtaaagatgaagactctcgcggagcccgccatcgaagcggcaaaaaaaggaaatctgatccacgttcccgaacgttttgaaaagatctatctccactggctggaagatatccgcgactggtgtatctcccgtcagctctggtggggacatagaattcctgcatattactgtgaggactgcggagaaattgcggtggaagaacaggctccggaaaaatgtccgaaatgcggcggaacacatttccgtcaggacgaggacgttctggatacctggttcagttccgctctctggcctttctcgacgctgggatggccggaggaaacagatgatctgaaatatttctatcccaccagtgtgctggtgacaggatacgatatcattttcttctgggtcgtaagaatggtattttccggtatcgaagcgatgggagaagtgccgtttaagcatgtttatgttcacggtctggtgagagatgaaaacggtctgaagatgagcaaatctctgggcaacggtatcgacccgctgcaggtcatcgaaaactacggcgctgacgcgctgcgtttcatgctgatcaacggaatcacgccgggcaacgatatgaggttctcctccgcaaagctggattccagcagaaattttgcaaacaagctgtggaacgcttcccgtttcgtcatcatgaatctcaccggcgaagacgatgagttccttccgatggcggattacagcggcggcattcataagctggcgctgaaagatgaggacaagtggatcctctccgcggtaaacgctgctgcgggggagatcaccgccaatatggaaaaatttgaactgtcgctggcagctcagaaggtctacgatctgatctggaacaattactgcgactggtatatcgagttcgtgaagagcagactttacggtgacgatgaagaggacaagatggtggcgagagcggttctcgtcaaggttctcaaagatctgctgaagctgctccatccggtaatgccgttcatcaccgaagagatctggagctgtctgccggtacttccgggggaagtgacggaggaaaatcctcagggctatctcatccgtcagaactggccggtttacgacgaagcgctgtcttttgaagaggaagaagttatcatcggccgcgcgatggaagcggtcagaacggtgagaaatatccgggcggaagttgaggcggccccttccaaaaaagtgagagctatcatcgcggcttccggcagagcggaagaatatcttaagaaagcggagcgtcatatcatgacccaggccaacgtatccgaaatcgcctatgtttccaataaatcccaggtgacagaggaagtgatgtccggcgtcatcaccgacgccgagattctcatcgctatggatgagctgatggattatagagcggaatacgaacgcctgaccaaagagaagaagaaattggaaggcgaagtcgcaagagtctccggaaagctctccaatgaaaactttgtcagcaaagccccggaaaaaattatcggcgcggagcgggaaaagctggcgaagtatgaggaaatgctgaagacggtgatttctcgtctgactatcgtggagaaaaaactataggcgcgggaagtgcggaatttttctgaagcccgatccggattgagacgaaaagaaggaaaattacggaagtgttttttgaaatacggcggaatcggaatctgaggaggccggccgcagatgagatgacagaggcggatttcgccgcggaagcagcgggatctgccggcaaaaggatggggatgatatcgaaatgacttatgaagaagcgatcgaaaaaattcactctttccaggtgttcgggtcccggctggggctggaacggatgaaggagctcctgcgtcttctcggggatcctcacagggatctgaagatcatacatgcggcggggaccaatggaaagggttcggtatgccgctacgtctattcagcgcttcaggagaacggatatcggtgcggcgcatatttttctccgtatattgaaaatttcacagaacgcatcgaatttgacgggaaggagatttcgagagaggctctggcgcaccatacggaactgtgtctgaaagcggcggacaggatgatgttggaaggctttgaatcgcctacggagtttgaactggtcacagccgtgggactgtcttactttgcggaagaaaaagcggatttcgtcatcctggaagtgggactgggaggaaaaggagattccaccaatatctgtgataagccgatcgtgacggcgatcacctccatcgcttttgatcacatggcgcagctgggcaatacgctggagctcatcgccgccgataaggcggggattctgaaggcagatgttcccgcggtagtctgtgtgccggatgccggtccgatggaagtgatccgcgcccgggcgaaagagctgagggcgccgctgatcgatgtgacgaaattccgggtggaaaatatccgggaagatctcggaggaagccggtttgatgcagtattggaagggttttcggaactccggtctttttttgcggatgcggaaaaaaatccagccggcggatccgcccgtttcggagacagggagtttccgcggcagaacggcggcaaacgccaggcatccgatccgcagtttaaaaatatcgagatttcgatgcatgggagacatcagatttcaaatgcgctctgtgctctttccatgattgaggtcatgcgggaaacgggtattctgatgacggaagaaaagattcggcgggggatgaagaaagccgtgcagaaagcgcgttttgagatcgtggagaaatcgccctatgttattttagacggcgctcataatccggcgggcgcaaaagcgctgacagagacagttctcacgcatttttccgggaagaggattcttctgtgcgtcgggattttaaaggataaggcttgccgtgagatggcagagctgctgacggctctccgggcagatctcattcttacgaatgtgccgaatccgcggacgatggaagccggcgaacttgcggatatatttctgtcattcgatctatatgggaaaagagaaagagagatggcggtgattccggactgggcggaggctgttgcccgggcggaggaacgcaagggcgattacgacctcgtcctgtgggcgggatcgctttatctcatgggagaggtacggaggagaatcacatgcaggaagtaagcgaagataaaaaaatcgatttaacgggaaagaataaagtccttctgatctataatccgaagtcggggagcggtatgtttcagagcaatctggataagatcgtggcaaaatttcagtccagaggcatgatcgtggtgcctctgcgggcggacggcagcgtttccatcgaaagttttctctccgggctgaatgaagcgcagtaccgaaagattatcgcggcgggcggagacggaacgatcaatatcgtcgtcaatgcgatgatgaaaaatgatcttcacgtgccgttagctctgtttccggcgggaaccgccaatgatttcgcccactatttcgatatcccgacggacatcgatggaatgctgtccatcgctttggaagacaactatatggatgcggatctgggcaaatgcaacgacagatatttcgtcaatgtggcggcgatcggtccggtgatcgacgtcagtcagaaaacggatgcgaccatgaaaaatgcccttggcattgtggcttactatctgcggggtctttccgaggtcaaatccctcaagccggtggaatttacgatcacctctccgcagatcaatttcaccggagatatctttttcatggtggtcatgaacggaaactccgcgggaggattccggcgtttgggggtgcagtcctctatcaacgacggacttctcgacgtcatcatctttaaggaaatgaattttatggaattactgcctctggcgattaatgtgcttcagggcaggcacgatgaaaataaaaatgtaatttattttcagacgccgagcctgcgcatcgaatcgccggcggatatgagcaccgatgtggacggagagcggggggaacctctgcctctggatatcgaaatcgtaccccggcgcctgaaaatcaataccagaaggtcgaaggaaactgtcggaacagacatgaacggaaagagcaaatcatatgagatcatatctgtggacgatcacgaatctctgaaccgtttttatgaaaaaaacgatctggaaatttccgaagaggacccggtaggaaccgacgcggtgaaaagctgggtgctggtggaggatgagaagttggcgggggcggcgacgctggctctgcgggagggagaatacatcatcgacggtatcgctttagatgaatcttaccgcgggggcggcagaggaaccgcgcttttaaatactgtgatcgacgaggtcagaaagagaggaggcagccggatttatctggtggcgcgggcgccggagtttttcggggccagcggatttaaggaagtggagcgcgcggatgcgccggaatttttcgagtgtttcggatgcagtcagtacggagtgaaatgtttcccgaaagtgatggaatatattctgacggaggaataaggagaagatatgtcctatcaggtgaagctcgacgtctttgagggaccttttgatctgctggtctatctgatcgagcggtcaggtatggatatctatacggtaaatatttcagagatcacggatcagtatatagcctgtatccggtccggagaacacgtgaatccggagatggcggcggagtttatggttctggcggcgactctgctgcagctcaaatcgcagatgcttcttccgggcgccgacgtttccggaaagaacgaagaggcggaggaactcagagatgagctgacggagcgtatttcagagtatcggaagtataaagctctggcagcgcatctgcgcgggatcgaatcagaggcggagcggattttcgtaaagcccggagaggatctctcacgttataccgggcaaccggaggaatctctcgatgtgagcatggatcaatttatccgggctttccggggatttcttgaaaaacgccagagaatcggtgatgtcagaaggcgttacgagtacgccgcgagggaacggatgtcgatggaagaaaaagcggagagaatcttcggctgtctgtcggaagaaaatccgctgtcttttgaggacctgatctctttggacagcgatatttatgatatcgttctgacttttgtgacgcttttggagctgttggcgcagggacggatttcagtgcgccagagcgatattttcgggcggatggaaatctgccgaaaggagggacttgtctttggatgagaaggcggtaaaacgcggactggaagcgattctcttcgtctggggcagtccggtagaccccggtgctgccgccggagtgttcggagtttctgcatccgaaatcgttcgatttcttgaagaactcgccggagaatatgagtcccgcggcagcgggctgatgatacggcggatcgacggaagttatcagatctgcacccggccggaatgcgaggaagcggtacggagtttctgtactcctgtgaagacgaaaaagctctccggtgcggcgctggaggcattagcggtcatcgcataccggcagccggtgtccagagtccagatcgacgagatccgaggcgtaaaatcggagagagcagtcgaaagcctgctaaaaagaggactggtggaagaacggggccggggatccggtctgggccgtccgattctatacgggacgacaccgctgtttcttgaaaaattcggcatcgggtctctgaaagagctgccggttatagatgatatcgtcaaagattgggaagaaggcgccgaaagcagtcagcagatgtcgatgaatgtttagaaacgcctttctaaaggggatgagtgaagttgaagtacagagaaagtttgaagaagtctgtgacgctgtgtatagcggcgatccttttcttatgtatgatagcggctccggtttcagtttttggattctcttcggaggagcttcagacatcctgctgtgaagaggagaatctttccgtaagagttcagcagaatgaattaaaagtggaagttccgcgggatccggatttctcttatctcatcgtcacatttatggattctgagggaggagtgcccgatcccgttctgccgcaaaaggtagccgacggcaccgcatattacagcttctctgataaagaagacgggatttattatcttcagctgtaccgcagcggtgatgcacaggggacttttgaaggcgtcatcggcggtatggaatcagtggctgtgatgatcgagggcggcgaggcgagaatcgtgccttcggcggtttacgatgtgaatctgcagcagtttcagcagcaggcgtcatcggcggatgcgctttgtttttatctgaagccttcgaaaaacgtacagagcgaagatgccggcatcgtgtctaaagccgatgagatcacagcgggaatcgcggatgcttacggcaaggtgcgggcgattcacgactgggtagcctcttatctctattttgattatgacgctctggcgcagccggggcagaactggccgaaagatgcgctgggggctcttgagtgcggcagaacggtatgtgaaggttacgcaaacctgacgacggctctgctgcgcgcttcgggaatcccggcgaagacggtcatcggatacgctctttacggatcggaacatatatgggattcttcgaatatgcagggctccagggcgaatcacgcctggacggcggcttttgccgacggacggtggattctgatggatcccacctgggattccggtaattattaccgggatggaaaataccagacgtcggatgcggtgcatacctattttgacagcactgtggaatttttctcctatactcatcgtcaatcccgtccggatgcttacgacagcggctatgtaaagcgtcagttcacagatatcgacggccactgggcattcgatcccattcgttttgtgacaaacaacgatctgatggcaggagtggacagcggcaggtttgagccggattcctgcacgacgcaggcgatgtggatcactgtactggctcggatgtcaggagatgtgatctttgacgctgacggaggcgagtggtacagcggcgcagtgcagtgggcccagcagaagggcgttctggcgggaatcgaggaacggttttctccggaggcgctcatcgatcgccagatgatggctgtgatgctggataactacatgaaatatcaggattctgcagttgcggaacaaaccggcgggaaagcgccggcgattgccggggacgagacggttttaacggagcgaggcatggggaacagcgcggctgatgtgacggaatctgaacagacggccgcttcaaagagacagggagtgccgacggacggcgtcaatccggcggaaccggaaggcgagtacgtcagaacacctttctccgatgaagatcagattgcggactgggcggcggaagctgtgcatcgaatggcggacagcggcattcttcagggcaggagcgacggtacgttcggaccccgcgattttctcactagggccgagacggccacggccgcggaaagaataaagtatcgggagctgatggcggaattgggagagagaaattagatttacgcgggaacgaaaaattacaggaataaatcatgagatcagaagatgccggtgcgggaagttacctgcgccgcagagctggcgccggatacgaagacagcggcaaatgaccagaaggagatgcagagaaaagtctctccggacctcgagggttcggagagactttgttgtttcctacaatgagattttaacccggtatttttccagccagtaattgagctgaatcatataggccatcgtctgcgggccggtcatcagctgaccataccagggttgcgtgaattcgtcgttcagcagtcctgtcagtgcgttccggtctaccagatcgaagatcggggcgtcggaattgtctgtgatctctttcagcatgccggagacgatagaggtgtactgcggattgtgggttttcggatacggacttttttttctgagacggatttcatccggcagaagtccctccactgcgtggcgcagaagacctttttccatgcctttgtattctttcatctcccacggcacactgtacatatattccgcgattctgtggtcgcagaacggcacccggacttcgagcccgtgatacatactcatccgatcctttcgcgtgagcagcgtctgcataaaccagtacatattcagatggaccatttcccgcaggcgggattctttcggagagagtccctctgatttatctgtttccgccagtgcctgctcatagcgggcggagacttcggcttctccgtctatgagttttctcagatgaggtgtcaggaatttctggcgcatggctgtggtctgtgcccaggggaatccgtaggcggaacggatcttttcatcccggtaccacggatagccgccgaaaatttcgtcggcgcattcgccggagagcgctacggtcacatgttttttaatctcttcgcagaagagaaggagagaggaatccacatccgccatgcccggcagatctctcgcatctactgcggctttcagagcgagggccagctgctcgttgtctacgacgaaagtgtgatggttggaaccgagaaattccgccatcatctgaatatacggttcgtcggtggtaggctgaaacttgctggttttgaaatacttctggttatccgtatatgtgacggaaaaagtatctaactgatgtcccaggctgcggaagtgggacgcggccacagcggagatgatgctggaatccaggccgccggacaggaaggttccgagaggtacgtcgctgactaactgacggcggatagcgtcggtcaccaggtatctcacgtgatcggaggtttcctcgaaggtctcggtatggagccggtctttcagcttccagtaggaaaacgtccgcagcccgtttcggtcaaatgtgccgcagtgaccgggttccaactcatgaatgtcgcggaagacgccgcagcccggcgtacgtccgggaccgataaacagcagatcgatgatgcctttcctgtcgatgacaggttcgatatccgggtattccagcagtgttttgatttcggagccgaaaataaaagtatcgtttttcagagcgtaaaagaacggcttgactcccatgcggtcacgggcaaaaaaaagccgctgcgtcgcttcttcccagacggcgaaagcgaaaattccgttgaagcggtcgaggcatttctctccccagtggatatatgatttcagaacgacttccgtatcactgtgaccgaaaaattcgatgcctgcggcggtcagttcttttcgaagttcctctgtgttgtagagctcgccgttatagacgatggtgtattccagtccgttctctttctgcgtcatcggctgagcgccgttttccggatcaacgacgatgagacgggtgtgaaataaaatcgctctttccgttattttgatgcctctggcgtccgggccgcggcggcgcatagaccgcagcattccgctgagacactcttcttttttcgggcgcttatgaaggcagcatgcccctgagataccgcacataaatatccttcctttctgatagcgtatccgctgaagcgggagctgtcagcggagcggatgtgaggcggaagaattccgccgccggtattatttgttttgacagatttttcggcttcgatacagcggtaaaaaatctatattcatcctatgcagttcgcaaagtgaaattt

SEQ ID NO: 4148 - DNA, 8810 bp, Unknown
  16S sequences of unknown bacteria
ctttccagcgtaatgcgccccagctttccatccctgaattcatccatcagcaccaccgcagccttttccgtatccaccaagccgcccttgacgataaagcccctgcgccggccgatgccctccaatatctcatagggcagcttttcttccgtttccaccccatagcgggcctggatcgcctttggcgctgcggtttgtaggttctcaatcagccctacggcaatctcttcctgctctaatacctcgtctcgtatggcgttcaaaaatgccaaccgtttcgcgccttgctcatcttccaatttaggccatagaataccaggcgtatccagcaactccaacgtcggcgataggcgcacccactgcttgccccttgtcacgcccggggttgcgcccgtcttggctcgctggccgccggataagcagttgatgatgatgctttttcccacgtttgggatgccgctgaccatcactcttacaatcttgtttgcgcccttctgcgcccatctatcgatcaagggctgcgccgcccgctggatagcatggagcagtttttcccgtcctccctgttttttggcgcaaaaagagacggcgttccagcccctatcagaaaaatattgctgccaggcacgcgtcaggttgttgtctgccaaatcttccttatttaggatgattacgcgcggctttgcccccagcatcttatcgagatccgggttacgggtagatagcggtgctcgggcgtctacgatctctacggccacatccgacacctttatcatacgttccatttcccttttggcctttgccatatggccgggataccagttgatctgcatgcttcctccttaaaagaaaaaaaggcgcaagcgccttttttatctctctctcagcttcgccgctttccctacgcgatcacgcaaataatacagctttgcgcggcgtacacgtccatgacgaatcacttctacacggtctacgcggcggctgtgcatcgggaaagtacgctccaccccaatgccatagcttacacggcgcacagtaaaggtttcgcgcaatccgccatgcttacgggaaattacgaccccttcaaacgcctgcaaacgttcgcggttgccttctacaacctttacatacacacgaacagtatcgccgatggcaatatccggcatatccgtgcggaattgttctttctcaatatttctgatgatttcgttcatctttgtcgttcctcctattgtgtccaaacttccgggccacaatctacgcgattatagcatatctgcccggtcttcggcaagtcattgcttggtacaaaatgtgtttctttccttttcagtcaacggcgctgtttccaatagatccggccgcttttgcttggttacccgcaaggattgctccctgcgccattgtgcgattttttgatggtcgccactcagcaagatctccggcacgcgcataccgcgaaattcgctgggcctagtatactgcggatattccaacaacccatcggaaaaactgtcctcatgcgcgctcgctgcgctgcccagtacacccggcacaaatcgcgccacagcgtctacaacagccatcgccgcgatctctcctccagtcaggataaaatctcccagcgaaatctcttcgtctacaaaggtatccaatacgcgctggtctatgccttcatagtgcccgcacagcacaataagctcttcataaccgctcaaacgcttagccgtctgcgcagtcaacggttgtccctgcggagacatatacaatacacgcctatgcttcttcgcctgtgccaacacatcttccaggcagtcaaaggccggctgaggcatcaacagcatgccctgtccaccgccaaagggtgcatcgtctacctgtcgatgtttgtttttggcatagtcccgcatatcgtagaatgaaaattccaaatagccgttttccacgcctcgcttcaatatactctggcaaagtacgccgtcaaacatctgcggaaaaagagttagaatgtcaatcttcatccacagccacctcggataaggctcggccgtccagatccatcctgtttttctctacatccacatgccgcagcacacgctttagcgctggaaaataaaatcttgttccttccggccgctccacctggtatacatccacgcctcctgtagaaattacctctgtcaggcgccctgcaggcacatcatccacaaagacatccattccttctagatcacaaacaaaccagcttccttccggtagcttggccgcatgtgccctgtctacgcataaataggcgtcgcgcaacagctctgccgcttcgcgcgtatggcagccttccagatatgcataaactgcctgctcctctatgcggtttacggtcagctttcttggctcacagccgtttaccgtttccaggtaaacctctttcagcccttcaaaacgccttacatcgtctgtcaacggctgtattttcagttcgcctcttatcccctgcggttttaagatatatccaactctcagcagcgttcgtttcattccaaaatatccacagaataatggatctgtttgttttctttggcagccgcagctttgaccagcgtacggatggattttgcaatcctcccctgtttgccgatgaccttacccatatcctccgcgtgaacgcgaagctcaatggtcacgtctccgtttccggcctctacacggttggtcttaacgtcctccggatgatccaccaactgttctgccaaatactgcacaagattctccatgcttggcctcttacttaattacttcgctttttttcaaaagcgcacgcactgtgtcggacggctgcgctccgcatccaatccagtaagcggcgcgttccttgtccacaacgatttctccgggatccttcagcggattgtaggtgccgatctcttcaatgaaacggccatcacgcggagaacgggaatccgaaacgacgatcctgtaaaaaggtgcctttttcgcgcccattcttttcagtctgatttttactgccatctgtttgtttcctccttggttttggggtattaaataatattgtgaaaagcctgtggttaaaatggaagcttcattcccttaaacccacgctttttcatccgtttattgccggtaaactgcttgatgagctttcgtatgctctcaaattcattgagcatccggttcacatcgcttacttttacgccgctaccggcggcaatgcgcttccggcgggaggcgtttaatatttccggcctgcgccgctcttgcggcgtcatgctgtatataattgcttccgtgcgtttcaggtgttttttggcttcctccgggtcgcccatatccctagcgctgacccccggcagcatcgctgccaattcatcggggctgcccatcttctgcacctgctgcatctggtccaaaaagtcctgtaaggtaaattctgcacggcgcagtttttgctccatcttcgccgcttcttccaggtcaaaggtttcctgtgctttttcaatcagcgtcagcacatcgcccatgcccaaaatacgcgacgccatgcgttccggatgaaacggctcgatgttttctatcttttccccggttcctgcaaacttaatgggcttgcctgtaatcgccctcatggaaagcgccgccccacctctggcgtcgccgtccagctttgtcagcacaatgcctgtcagcggtactgtctcatcaaacgacttggcaatgttcaccgcatcctgcccggtcatggcgtctaccaccagcagaacctccgtaggtgtcacggcgctgcaaacgccttggatctgctgcatcatctcttcatcgatatgcaggcggccggccgtatcgacgatcagcgtatcatacatgccgtcttccgccgcttttttcgcctgttttactattttcacagggtccgtaccaccgctgtgtaccgggatccccgtctgctcgcccagggtttttaactgatctaccgcagccggccgcacagtatcacatgctgccagcatgggatttttcccctgctttttcaaatacgcgcccagcttggcagcaaatgtcgttttaccggcgccctgcaggccgcatagcacaatcaccgtcggtagtttgcttgccaccttcagcttcgcgtgctggccgcccatcagctccgtcagctcctgctgtacgattttgatgacttgctgtcccggtgtcaggcttttcataacctcagcgcccatcgccttttcgctgacctttgccacaaattcctttgtaaccttgtagtttacgtccgcctccaacagagccaggcgcacctggcgcatggcctccttaatatccttttccgaaagggtgcctcggcccgtcagcttgttaaaaacgcctttgagcttatcgcccaacgattcaaatgccatcattcaccttcccaagtgcgccataatgtttgtatctgcttcgattgttcttccagaccttttctttgcagctgctcgcagaccgcttctaggccatcacgcaacaacagcgtccgagacgccaaatgcagcttatcttccaaatcctgcaaggttttttccgcccgcatcagcgtatcacgcacaccctgcctgctgattccctggctctctgcaatctctgccaaagaataatcttctccacaggaaagctcgatcgctctcctctggcgctcagtcagcagcgggccataaaaatccaacagcagtgtcatccaagcctttttttccatggttcctctttctgtaaagggaaatccctttacaacctggctaattatatctgattggccttctcctgtcaagggaaattcctttacagttatacagaaacacaatctgtgctttctttatcaaaaaaggatggctctgtcatcctttttatttcattcttccccaaacaacgcccgggcaaaggctttggcctcaaacggttcccagtcctccttggtttcgcccgtaccgcaataccataccggcagcccgtattggtgcgtaatggccaccgccaccccgcctttggcagagccatccagctttgtcagcgcaatgccatctacccgcgccatttccgagaaagctttggcctgctccatgccattcaggcctgtggttgcatccagtaccaacagggtttttatgcagccctcaaactcccgatcgattaccttgcgcaccttacccagttcatccatgaggttttttctgttatgcagtcttcccgctgtatcgcacagaaccacatcacaatgccgtgccttggcggcggagatcgcatcaaacaccaccgcagcaggatctccacccgcagcgccgcgcacaaattggctctgcgtgcgctctgcccattgtgccagctgctctgccgccgccgcccggaacgtatcccctgcggccagcaatacttttttcccctctttttgaaattgattggccaaacgtccgatcgccgtagtctttcctactccgttgacccctaccatcaaaatcagcagcggatactcataatccggcgttcccttatccatcatttccgacagcaaatcgatcattacctgctttgcccgttcggtatcgttgatcttttgctccctgaccgcatctctcagtcgttccaccagttctacggaggtttctacgcctacgtccgccaggatcagagcttcctccagctcctcataaaattcctcatccaatttccggccaaacagcgacgccacgcgcccccataagccttcccttgtctttttcaatccaaatagggacatgccttatccaacctcctcaaatttcacgcttacaacctttgaaacgcctttttcttccattgcaatgccgtacaacgccgtagccgcttccatgctgggccgccgatgggtaatgaccaaaaactgtgtcttggaagcatacgttttcataaagtttgcaaacagtacgaggttttcctcgtccaaagctgcctcgatctcatccaaaatacaaaacggcgttgcgcgcatttccagcatcgcaaacaacagcgcaatcgccgtcagcgcgcgctccccgcccgaaagaagcgtgatatatcgaggctttttcccgggaggctgcgccataatgtcaatatcgcaggtcagcgcgttttctttatcctctaagatcagctgcgcctgcccgccgccaaacagcagcggaaatatcctacggaaattctcgttgattttatcaaagctctcgataaactgtttttgcatctggtctgtcaattcctcgatcatccgttccagatcctctcgagccttttgcagatcctcccgctgggctgttaaaaaggcatgcctttccgatacgcgctggtattcctctattgcgccggggttcacataggtcatcttgcgcaattcagcatgcagccgattggcccgctgtgttgccttttgcagctgtaccggctcgctctgctgctttgccatggcataggtcagttcgtattcattccagatccgggtctgaatgctttcaaactctgcctccagcctttctgcctgcgctgctgctttgtatcgtctctcctgcagcgccgccgtccgaagggccagctgctcccgctctgtttgatattccttctgttctttccgaagcgcctcccgctgtgtctccagctgagacaacgcagcgccgttctcctctgcttcccgttgtatcttctgctgcgtttgctgtgcttgcacctgctgtgtttgcgtcgttttttcctgctcagcattgagccgcagccccttttccacacgctcctcctgcgcacacagccgctcttcttcccgcgccagccgctctttgctggcgcgcacagcggcctgttcggttgtctgcgaggccaaggaaagctgcccctcctggtacctggccgccgcatcctctcgcgccgttcttgcctgtgcaagcatttctgtcaagcgttgtatttcatctctaagcgcctgctcgtccaccgttccgctctcctgtccggcttgaatctccttttcagccatggcaagcgcctcttgaatacggtttccttctgtctccagctgcgccaaccgatcttttgcgctctgatacacaaactgcgttgtatccagtttttgttctgctgcagcaagctccgcttccagcgcgtagattctcttttgctgcgcctctgctgcgtcgcagcacgcttcataggcccgcgattcttgctgatattgcgtttgcagcgcctgtgcctgttgcttggcatcattcactttttccctcgcctgctcgatgagcctgtctctggagattagcccccgctcgcgtacacttccgcccgtcatcgcgccgccggactgcatcatatccccctgcaacgttacacagcgaaatgaaaacgcattgcgcctgcaaacctcgatggccgcatccatatcctctacgacgagcgtacgtcccagcagatattccatagctgggcgtacatgttccgggaaatgcacaagatccaccgcacaaccgcacacgccgcgcccggtcagacgttgtttttccgccgcggaaaacgtgcgcggccgcagcgccgcaatcggcaaaaaggtaaccctaccgtattccctttgccgtagataggcgatgagctttttagcggtttgctcattttctaccaccacattctgcaatccggcgcccaaggcttgatccatcgccttttcataggcctgcggcacttgcagcagcgcgcctacggcgcccgaaacgccgccatcgtcgatcctgcctttcgtaagatcttgcaaaagcctacgtaccgactgcatatacccttcaaaatcccgctttaattcctcttgcgttttgagggtatgcagtgcctgtcgatagtctgataccatgcgttgcacagcctgccctagcgccagcaccgcttcgtttttttggcgcatgtcttcctgctgggttttggcgctttcccgtgcaaatgccaaagattcctcgattccggccttctcttctgccgcctgtgcccgctcccgttccagctgtgccagttccctggccgcttcttcttttcttgcccccagctcttcgccgcgctgtaaggcctgttgacgaatggtctccattctggcaacgcgggcctttctatccccggctgtgtccatcgcatccatcaacttctgctttagtccatccagttcattttccagttgctctgccctgtgcgctgttaaagccgcctgttgctctaaaatctcaacctgctcttttaacagatccaaaccctcttccggcttttcttcaagcgcatccaactgccggcggacttctgtccttcgctccaaaatatccgctttttccttttcaaggcggctcttttcttccttcaaatgcgccatctgttgcgataataaattcctttctcccaaagtgcgctgctccaacgccgcctgatctctggccttttcctgtgccttgctcagcaactgctcagtcaacgacagcttatcctgcaaaagtgcctcctggtcccgtacggtctgctccctgcgtccagcttgggtttcctcctgctgcatggtttccgcttcctcggaaagctgtgctacacggtcgcggttacgctcatattgctctacaaatatattgatctcaagcatttttagctcttcacgcaacgccaaaaaggccctcgcctcttcgctttgctgggccaaaggttccaggctaccctcgatttcgtgaatgatatcatccacacgcagcatatcctggtttacattatgaagcttgcgctgggcttcctccctg

SEQ ID NO: 4149 - DNA, 14508 bp, Unknown
  16S sequences of unknown bacteria
ctgccggtccccgcccacagcgccgcgaaaaccgccgcggcgaacgcgggcgaaaacccgagaacatgatatccgcggagcgaatagacgaccgcgaacagcatcgacgccgcgccgatctcccggtatcccgcgaatctctcgtcacccgtgaagagcgccgagaacccgagcgtaaacgccggaaccatgaaaaatccggtcagaagtccgaacaggtcataatacagaaatccgccggatatcagcttatatatcccgaagaggaacgccgcgaagcacccgacggcgcacctcagcaccacgctctcggaaaacattgtcttcccgctcccggctgagaaaagccgtcccgccctctcggacagttttatatgtatcttctttccgccgctgtcgggagcggactctgacgttccgctccgggctgttccggcgcggcttcgcgcctttccggcttcggtgggtttcgctgtgtcctgatgtctgagcgttcccgccgtcatgtctccggagagcctgcaaagcgccgttctcataagcagcgccgccgtatagacaaccgccatcggaaccgcgtacccgtgattgaacagcgccgacgctatcagccccgcgaacaccgccccgacgcatctgtcaaccgccgccagcagcgccattccgaacgggtagcagccgaacgccgcccccgccattccgaagagccatcccgccgccgccatcagtgtgccgcggactatccgcgcccggtctatcttcagaccgccgccctccgccgtcacgtattttccgatcagccttcccgccagtttttcaaatgccattattttaccgacttcctttcttttgcggaataaccccgtccggagcctgtccgctattcatgctgtgcgaatattataccacctttcctgaaaaaggtctgtcgaagcgtgtatgcactttcggctcgccgacccgcgggaaatcggcggagaacgctattgccctgtgacgcgcggcgtcttttgcgcggttttggcgaaagatgggggcgcaaaaccgtgtcgtaagcattaaatttcatgttctgcttttttctgttatttcagactgttttctccttaacgctttatttatttttaatccattgtattatacatgatcaatatgctataatattatttgcagcaaataactcgccgcaacgcggcgattcatatacaaaggagagaatatgtacaggatagttcacaaaaaaccgctcaacccgacggtcacgctcatggacatagaagccccgctcgtcgcggctaaggcaaagcccggtcagttcatcatactcagggtcgacgatgacggcgaacgcataccgctcacagtcgccgggaccgacaagaccgcgggcaccgtccgcatcatcttccagatcgtcggctccaccaccgaaaagctgaaccacaagaacgagggcgagtctattcacgatttcgtcggtccgctcggcactccgacaaagctcgacggtctcaaaaaggtctgcatcgtcggaggcggcgtcggctgcgccatcgctcttccgatcgccgaggcgcttcacgagatgggcgccgaggtcacgtcggtcataggcttccgctcgaaggacctcctcatactcgaggacgagttcaaggccgcgtcagataggctcatcgtcatgaccgacgacggcagctacggcagacacggaaacgtctgcgtgccgctcgaggagatgttcgccgccggtgagaagttcgacaaagtcattaccatcggtccgctgatcatgatgaaattcgtcgtcgccgccgtcagaccgaccggaatcccctgcgacgtctcgatgaacccgataatgatcgacggcaccggaatgtgcggcggatgccgcctcatcgtcggcggtcagacaaaattcgcctgcgtcgacggtccggacttcgacggctacgaggtcgatttcgactccgccatggagcgcggcaccatgtaccgcgatttcgagcgccacaagcacgaggagacctgcaacctcttcaaaaaagcagagaactgaaaagcaggataacagcttatacgaaaggtacggtcacagaaaatgccgaatatgtcacagaaaaagaacccaatgcctgtacaggatcccgccgtcagagcgcacaacttccatgaggtcgcggaaggctattccgaagcgactgctcttgatgaggcaatgcgctgcctgaactgcaagcatatgccgtgcgtcaccggatgtcctgtcaatatccatatccccgaattcattgaaaaaatccgcgagggcgacttcgagggcgcttatcaggtcataagcctgacctcgtccctccccgccgtctgcggacgcgtctgcccgcaggagacacagtgcgagtccaagtgcgtcaggggcatcaagggcgagccggtcggtatcggtcgtctcgagcgcttcgtcgccgactggcacaacgcccactcggatgatgtccccgtctgcgctccgtcgaacggtcacaaggtcgccgtcgtcggctccggtccttccggtctgacctgcgcgggcgacctcgcgaagaaaggctacaaggtcacgatcttcgaggcgcttcacaccgccggcggcgttctcgtctacggtattccggagttcagactcccgaagaccatcgtcgcgaaggaagtcgacaacctgaaggctatgggcgttgacgtcgagtgcaacatcgtcatcggcaagacactcacggtcgacgagctgttcgggcgcggctatgaagccgtattcatcggctccggcgccggactgccgaacttcatgaacatccccggcgaaagtctcaagggagtttactccgcgaacgagttcctgacgagaagcaacctcatgaaggcatacctcgacgatccggacaccccgatctcgaagggcggcaaggtagcggtcgtcggaggcggaaacgtcgccatggacgccgcgagaacggctctcaggctcggagcggagaaggtatacatcatataccgccgctctatggaagagctcccggcgcgccgtgaggaggtcgagcacgcggaagaagagggaatcgagttccgtctcctcaacaaccccgtcgaaatcctcggctatcacaacccggacgaccgccgcgacccgaagaacggctgcgtcaccggtatcaaatgtataaagatggagctcggcgagccggatgagcgcggacgccgcagacctgtgccgatcgagggcagcgagttcacgctcgacgtcgacaccgtcatcatggcgatcggcacctctccgaacccgctgatcaagaccacaaccgaaggtctcgacgtcaacaagcgcggcggcataatcgtcgaagagggcaccggagccaccacccgcgagggagtctacgccggaggcgacgccgtcacaggcgccgcgaccgtcatttccgcgatgggcgccggaaagatagccgcaaaagcgatcgacgagtatatacagagcaaataaacacgcagaacaacaagcatcccggagaccgtgacgtctccgggatgctttgtttcaagtcaaaaaaccgtgcggatatcgtgtctcagacacttatccgcacggtttgaattctgtttcagacagtctgccgcctgagagagtgaccgcgtacgggcacacttctcccgtcaggtgtcgactgtcgttttatgctttacggttgtagtcagacttcgggttgacgatctctctccagtcgagtccgcccgactcaagcgccgtcacgagtacctcagccgtcgcgatgttcgtcgcgaaaggaatgttgtacacgtcgcacatacggagaaggttgtactcctcctcatcgaacacgatatccttcgacgtgtcgcggaagtagatcagaaggtctatctcgttgtacgccacgcgcgaggttatctgctgcgctcctccgtgcgctccggagagcaggcgctctatcttgagtcccgtcgcctccgaaatgtacttgccggtgatgccggtagcacagagattatgcttgcaaaggatgccgcagtaggcgatgcagaactgcgtcatcagctcctttttcttgtcgtccgcgatgattgcgatttccattgtatttcaatcctttcgtttaattctcagtgtcttattgaatctatagacttattttctttcagcttatcttcatatcccgccgagcagcttctttatccggcgtctgaccccgtatccgcggaatcccgaaaacaacggcacataccgtccggacagccgcgccgcgatattgtcgaacgccgccgccgcattcccgagcttcggatcaaaggcgcagagctcgcccgcctcacaggtcagcatcagccgcctgtcatacgggactatccctccgagctgtatgctcgtgcggtctattatctcgtttattcccggtcttgtcccatgtatcgccgcgtcgacgtcaaactcgtttatgagaagccgcagttccggcaccctgtaccccgaaagatactccgccgttctgtccgccgcgcgtatactcaccggctgatgcgacgccacaatgaccgccccgcgcgccatcccggtaagcagcaccgacttcggaaccagagttcccggcgtgtcgacgatgatatactcaaatccatccgccgacgccgcgccgaacaccgccgcgatcatctccggagtgagcgtgtcgccgccgctgtacggagccgcgagaagatacaggttcccgcacctctcgtcgcgtataagcgccttcgagagcggagccctacccgtcgccgcgtcatagagatcatacacgacgtcattctcgaccccgagcatcagatcaagacagcgcatatcaaagtcgcagtcgcagagaagcgtcttctttccccgcagcgcgaacgcagccgcgagattggcggcacaggtcgatttcccgaccccgcccttgcacgatgtgaccagtatgatcctcgccgccgtatacgtgccgggcatcaataacatatcagtcattgaaatatcgttctgagccatgatccccgtcccggttctgtttcaggttattctgtccgtcaactgcgatttgtcacaataaaacaaatcgttttgatgtattgtggcgaattagtttaacatcacagttttactaatcccacaaatatatgatatcacaaatttgtgtctattgtcaatagtattggcgaaaattttcattcaaaacacatttttttacatttgcgatattttcacgggcgacgtttggacaatatgacgaaaattgtgcttaataaatgttaaccacacacacgaattggctgatttaacatttttcatcacatttttgccccgtcacgcaagcgcaccatgtatgcgcataacgcgctcatccgcaatgacatcctccgcgccgaaatccggcgtgtatcccgcacagtaaattatatcacattccggtcggtttgtaaagccaaacacgtaaaaattcataatattttgacacattcgtgcaaactccgtcaattgtcggtctcagatttccaccggcttcccggacagctccttttccggcggaacggcttatatttttaacaaaatcactattgtattctgtcagaaaatactgtataataatattaattattttatttcaacaggagatctgaatatgatacttgaaaacatagaattcatccgttcacaggacccggagatcggcgacgccgtcgcgaaggaatacgcccgtcagcagcgtggtcttgaactcatcgcgtcagagaacgtcatctcccccgcggtcatggcgacaatgggcacggtgcttgccaacaagtacgccgaaggctaccccggaaaacgctactacggcggctgcgaatgcgtcgatatcgccgagaacatcgccatcgagcgcgccaagaagctattcggcgccgagcacgcgaacgttcagccgcactccggcgctcaggctaacaccgcggtatatctcgcgctcctgaagcccggcgacaccgtcctcggcatgaacctcgcgcatggaggacacctcactcacggcagcccggtcaatatctccggtatgctctacaacttcatcccatatggtgtcgacgacgacacgtccatgatcgactacgacaagatcgaagccctcgcgaaagagcacaagccgaagctcatcgtcgccggagcgtccgcttatccgcgcatcatcgactttgagagactcggcacgatcgcgaagagcgtcggcgcttacctgatggtcgacatggcgcacatcgccggactcgtcgcagcgggactccatccgaaccccgttccgtacgcggacgtcgtcacaacaaccacccacaaaaccctccgcggtccgcgcggcggtatgatcctctgccgcgaagagctcgcgaaggctatcaacaaggcagtcttccctggcacgcagggcggtccgctcatgcacatcatcgccgctaaggcagtatgcttcggtgaggctctcaagccggaattcaagacctatcaggaacagatagtcaagaacgcaaaggtccttgccgactcgcttatggcagagggcttcaacctcctctccggcggaaccgacaaccacctgatgctcctagacctgcgctcgatgcacatcaccggcaagcagcttgagaagcagctcgacgaggtctatatcaccgtcaacaagaacgccatcccgaacgatccggaatccccgttcgtcacgagcggcgtccgcatcggcacccccgccgtcacctcgcgcggtcttgtcgaggacgacatgaagaagctcgctcacctcataaagctcgcggcgaccgacttcgagaacagcgcggactatatccgttccgaagtcaccgctatctgcaagaagtacccactttacgagggctgataagctcggaatatattcccatttaagggatattcaggcagtataaacgtaccgcgtaatccagcggaggagccatgatacagaatctcgatctatatccggtcttcatgcagaccgcgaagagccgcagcatctcgcgcgccgcgaaggaaatgcatatctcacaaccggcggtcagcctcgctatcggcaagctcgaggacgcgctcggcgtcaagttgttcttccgctcgagccgcggcatcagtctgacgaacgagggaagcatactgctcgagcatctctcgagcgctttctcgctgatcgaggcgggggaagagaaactgcgcgacatcgcgggactgcggagcggaaccctgcgcatcggcgcgagcgacatgactctgcggttcttcctgctcgactatctcgagcggttccgcgatctctatcccggcgtcagacttaccgtcacgaacgctccgacgccgtcgacgcttgaagcgctgcgcggcgggctcatcgacttcggcgtcgtcagcgaacctgtcgacgcgagcgacgaagcgatcgagttcatacccgtgaggacaatacaggacatcttcgtgcggtcggaaaaatacacggtcgcggaaaagaagctcgacccggtgctgctcagaaaatacccgctcatactgctcgagaaggaaacttcgacgagacggtatatagacagcttcttcggtgagggtacactcagtccgtcgatcgagctcgcgacgagcgatcttctcatcgagttcgcaagacgcgggatcgggatcacctgcgtcgtcgaggacttcgcgaaggatgacctcgcgtccggcagactctgccgcgtcgagcttcgtcatgagctcccgccgcggagattcatgctcgctcatcttaaaaatctgccgcttccggcggcggcgtcccacatcatacgtgagatactgtccgaccttggcggagaaagcaatgatcaaaaaaatgagacttaatactgcggaaatactctgcgtcggcaccgagcttcttctcggcgacatcgtcaacaccgacgcggcgttcatctcgagacgcctcgccgctctcgggataaatcaatactcgcaatcggtcgtaggggacaatcctgaacggctgaaaagcgctctttcgctcgcaatatcgcgaagcgacctcgtcatcctgaccggcggtctcggtccgacatacgacgatctcacaaaggagaccgccgcagagctcatgagcagaaagctcttcatgcacgaggagagtctcgagagactgcgcgcgcgcatcgagcgctccgggcacgagatgaccgaaaacaacaagaaacaggcgctgatacccgaaggttcggtcgtattcagaaacgattacggcacggcgcccggtatggcgattgaagacctcgaaaaagggaagatcgtcatcctcctcccgggtcccccgcgcgagtgcgagccgatgttcgtcgagcaggcggagccttatcttaaaaagttctcggatcacgagctcgtctcaaaatgccttaacatattcggcatgggcgagtcgaaggtcgagtcgatacttcacgacatgatgacaggctggacaaaccccacggtcgcgccgtacgcgaaggacggggaagtgttcctgcgcgtcaccgccgccggaaagaacgacacagaatgcgccgctctctgcgataaagcaatcgcggagatcatgaaaacacctgtcggcgaatacgtctacggtgtcggcatcgggtcgctcgaggcggcgctcgtaaaggttctcaccgaaaaacggctccatgtcgcctctgccgagtcctgcacgggcggactgatatcccagcgcgtcacagctatcagcggggcgagcgccgttctcgacggaagcatcgtcacctacgcgaacgatatcaaggagcgcttctgcaatgtttcacgtgaaacactcaaatcgcacggagccgtttcgtatgagacggccatcgagatggcgcgcggcgtccggaagctcatgggcgcggatatcggtgtatccgccacgggaatcgccggacctacaggcggcacacccgaaaaacctgtcggaacagtattcgtcggggtcagctccgactggtacgaggaggtcagggagctgcatgtcggcggaggacacgcggaccgcgcgtatgtgcgctgggtctccgccagcaacgctctcgacatggcgcgtatcgccactatgaaacacgaataacagatcacattacggtaaaatataaaaatcaaaggagttcaatcatgaacgcacaacagactatcaccgctatcgaaaacggcaaattcaacgaaatcttcactaccctctacggcgaggagaacatccccgcgcagaaagtacgctatacaaacaccgtgaacgagttcgcgaagctattcggcgccgaccgcgagatatcccttttctcggtcgctggcagaagcgagatctccggcaaccacaccgaccacaactacggcaaggtgctcgcagcttccatcaacctcgacatcatcgccgcggcttctccgcgcggcgatatgcacatcaacatcaagtccgaaggcttcccgatcgacgaggtcgacatcaccgatccgaccgtcgacgagaacctctactacacctcgaagtctataatctccggtatgtgcagcggcttcctcaagtacggccacaaggtcggcggctatgacgcttacaccacctccaacgtcttcaagggctccggactctcttcctccgccgctttcgaggacatggtcggtctcatactcaacggcttctacaacgacggcaaggtcgagaacgccgagatcgcgaagatcgcgcagtactccgagaacgtcttcttcggtaagccctccggtctgatggatcagaccgcgtgcgctgtcggcggattcgtcgcgattgacttcaagaacccgaaggaacctgtcattgaaaagctcccgttcgacctcaccgcggcaggctacagcctctgcatcgtcaacaccggcggcaaccacgccgacctcaatgaagactacgcgtcggttccggcagagatgaagaaggtagcgtcctatttcggcaagagcgtgctaagagaagtcaccctcgacgagataatggcgaacattccgaagctccgcgagttcgcgggagacagagccatcatgcgcgctatccacttcgagaacgaaaacgagcgcgtgaccgctcagaccgaggcactcagaaagggcgatctcgacgagttcttcaagggagttctcgcatccggcgactcgagcttcaagtacctccagaacgtctacaccgtaaagaacgtctccgagcagggactttcgctcgctctctgcgtcaccgaaaacgtcctgaagggtaagaaagcggcatggagagtacacggcggcggattcgcgggcaccatccaggcgtttgtcaggaacgaggacgtcccgatgttcaagaaggctctcgacggagcgttcggcgagggcgcggtcacgatcctcaaggtccgcccctacggcgcaatccgcatcgactgatcatcaatgccgaaaaaaaagaaggacaggaaaaagagcggtctcgtctatgacccggacgcgaaaaaacgtctgaagcagcagctccgcgccttcaactggaggcgcttcggtctgctgatcctctcgaccctcgcggcattcgcggttctcgaggcgggaataacgcttgaggcaaaagcgaagatgtcgttcagcgtcgtgacaatcatttattacgtcattgtcacggcgctggctgctgccgtcgtcatactgaaccacgggttctcaaaaaaaccgttcacgcgcgacatgatccgcgaggacgtgccggaggacgaggcggaacgcatactcgataagctcaaccgacgcaagggtatcgcgaaaaagctcatgccggtgctcattccgttcatcttcgcgatactgctcgacttcatgtatctcttttacggggatattctgaagaagatattcggttttcttgtctcataaaaataatgtcagaacaacatataaaggtcttcacgctcgcgtcgagctccaaggggaacgccgtctacataaggtacggctccgacgagatactcatcgacgcgggcatctcagcaaaaaggctcgagtgcgcgcttatgtcgctcggctcgtcgcttaagaacattcaggcgatatttgtgacgcacgagcactcggatcacatatccgggctcgcgacagtctcaaaaaagtacggcattccggtgcatctcacagaaaagtccggacaggcaatgctgaatcaggcgaaatacgcgccggtcgcggagtgcgccgtgctgcatacgccggtttattccgagactgtcggttcgcttgaggtacgcagcttcccgacgccgcacgacagcgtttgcagtgtcggattcacggtcatggcagggaacgatactttcgccctcgccaccgacctcgggcacatatcgccggacgtcgaagcggctctcaccggcgcggaaaatgtcatactcgagtcgaaccatgacgagaatatgcttctctgcggctcttatccatatgacgtcaaactgcgtattctgtccgacttcgggcacctgtcgaacgaaacctcggcggcgttcgcgaaaaagctcgccgctggcggcacgaagcacatactcctcgcgcatctctcacccgaaaacaatctgccggaactcgcgctcgcctgcgccgaggaagccctcgacgggtcagaaaccacggtcagggtcgcggctatggcggaaccaacggagctcatataaaatggtcaagctcgatatagtctttgtcggcacgctcaaggagcgctggctcaccgacgccgtcgccgaatacgaaaagcgcatatccgcgtgggcggtcgtaaacaatatcgccatacgcgacgagcggctgtccgacaaaccgtctcccgcggaggtgcagaacgctataaagcgcgaaggcgagcggataatcgctgcgataccgccgcgctctcacgtcatagccctctgcgtcgagggaaagcagctgtcaagtccggaattctcggaaaagctcgtctcgctcgagagctgcggtgtctccgagttctgcttcatcattggagggtcggacggactgtcggatgaggtcaagaaaagggcggcgatgcgtctctcgatctccgagatgaccttcccgcaccagctcatgcgcgtcattctgctcgagcagatataccgcgccttctcaatcgcctccggcgggaagtaccacaaataatgatcagaaatggcgaaaggagacatatgaaaatcttcaagaaaatagctgtccgcgcgatcccgaccgctcttctcgcgttcctgatcttcgccgctatcgcctatcagcgcgggctttacgacttcacgttcatagaacggacaaccggtccggagcagaatcccgacactctcccggacaactcgaccgatatgccgatcgtcgacgacatgacagcgtcagacacaactgacaccggtacacccgtcgacagttccgatgaaacgacaataatcgacgggacagtcacagacgcgccggaggaggacgaggtcagcaaatttctgagcctcatgagcacgacccaggacgcgctgaaaaagggatggacaatcaccgacgaaaactactcgtctggtatgcgtctgaccctgtgcgacccggacgtcgcgatacggaaagactattcgctgaggtcgcgccaggaaaccgtgtatgagcgtgttcatgatgatgaatacggaacctataaaaccgtcgataagaccgtgacggcacagagaccgctcgtcgagacctatatggactacattatcgtggacaccgggtcaaaggcttaccttctcgacagttccggaaagctggtaatgtcaaacttcgacgttgagacctacaagcccgcttacacgcgcggctccgacgactcgccgcagttcaaggcggaggtcaggtcaaggtacaacccgagcgtcacttatacgcaatactataaaataagcccggaaggaaagctcatcctgagcgactacgatgacgccgccgacgggcgcgggctgtatttcaactacccgagctcattcggaaagtcggacaacgggataaaccgctactacgacccgtcgtcaatgatgtacggctacggctcgtcgccgacatccatgcgcactcactacaagttcacgaaagcatacaattacagcgaaggtctcgccgcagttgtcgatgaagaggggcatatgtccttcattcagggctggtattatccgcagatcgcctcgagcagcaactggtatgttaaccagaaatggaaatggagggtatactccttcatgtacgccccggacacgaacggcacagagtcgctcggcttctattacttcgaccacgggctcgtcagggtgcgcgtgcgcgagtatgacgctttccactatgagaaaggcgagatgcgcgtcacgaccgacttcgagaaagtcatacgcaccgacgggaccgaatacagcattcccggcggattcgaggtcaaggcatactcggacggcgtattcctgctcgagaaagacgggctttacggcttcatggattacacgggcagatggatagcccaaccggaatatgataccgccgagccgttcgtcgagggactcgcggtcctcggaaagaacggaaacgtcgggctcatcgacaccgagggcaacatcgtgataccgctgatattcgacaatgtccagtcctgctccggaggaataatctccgcgtgggacaaggacaatggctgggcgatattcaataagctgaaatgatttaaggatacactgaataaatcgggttttcgcagaaaaaagccaccggatttatgggcttttttctgcgaaaacaaccttaaatcagtgtttccttcaacagcactgtgcaaaacctcactgaaaagagcaatatatatgcaggataacaccggaaacaacacagaacagaaccggatctgccggatatacgacgccggggaggtcgacgtctgcgtcatcggcgcgggacacgccgggatcgaggctgcgctcgccgccgcgcggatgggactttccacagccctgttcacaatcaatctcgacgctgtcggaaatatgccgtgcaacccgtcgatcggcggcacgggcaagggtcatctcgtctacgagatcgacgctctcggcggagagatgggaaaagccgcggacaaagtcactctccagtcaagagtgctcaatctcggcaaaggcaccgccgtacactcaaagcgtatacaggcagaccgccagcgctaccgcatgataatgaagcacacgatagaggagacaaagaatctccggctgatacaggcggagatcaccgatatcgaaacgagcgacgagggcggaaagcacatcaccgcggtcataacgaagctcggcgcgagatggcgctgcaacgccgccgtgatctgctccggaacttacctccgaggcagaaga

SEQ ID NO: 4150 - DNA, 11954 bp, Unknown
  16S sequences of unknown bacteria
aaaggcgaacagagcggtcagaccgtaggaaaagagtttcatcatcttcattcccatattcgcagtattcagactctccgtatacgaacgcatttcgagatgttctgtccccgaagtaagattatataatgccgtctggactgactccgtatctttctgctcacaatcaacccagatgatccccgtagagtcccctgaaaatccgagatttcgataagtatcttccgtgacagcccagctgccttcggtattgccgaaagcgccggccagcggcagactgacttcccggctctgatccccggactgaagtgtgatgtttaccgtatctcctatgtcaaatccgctttcattcaggaagtgagaccagccgtagagaatcgcattctcctcggaagcctgatcataatctatggtgccgatgtaagaaccgttctctttctcccgttcaaaatcctcccggtcgagaaccacgacagaagtcagttcccggccgtccgcgtctgtcgcgtcctcagaagatcctccgcggagatatcccgccagcatatgctgtgtcctgaccgacgtgacatcgggaatctgacggatctgttctatcagatccccgttcagcgggttcgattttaaaatctgatcgagattattctgaggatatgccgtatctctcagatcatattccagttccagctggaactgaccgtgaggaatattttttctggcgtcaaattccggatccatatttccggcaaaattagccatagcgacaaacagcacgcaggaaagtcccatcgtcagaatcgtcatcacagttctctttttattattggaaagccctgccattgtcagccctctgacatcgatattttttccgcccgtcctgcggccgtttttcttctgcgaagccccctgatatctcatagcttccaccggagaaattttagatacgatgctcatcggtctcttcagggacagccagacagaaagagcggaaaccgcagctaccagcaccgcggtaatcggcgtaagaagagaaatatcctgtgcgccgtctctcatggtcgccgtcatcgactcctctatcagccagtcaaaagacagggacgatacgaaaaatcctgcgacaacgccggcgggaacagcggcaagagcgagaagcattccctcccggaacacaatttttttcatctgtctgcgcgtagcccctatcgcgcggatctttccgtattcctgcacacggtaggcgataccggtctggaaaatattatagattaccatgacggagaaaacgatcaccatcagcgcgatcagcacacatcccgcgatcgtttcggttccggggtctttggaccagatgagataagcgctgttgggactggcataacgctcgtctatgccgcactttcgagccagatcttttatgacctcatctccgttgtcactattgatcccggaggtgtccgataagcggaagtacgcgctgtatgtcatctgctccgcaggtattttgctttcgcagtacgcgaaagagacaaacgcggaataagcgccggatgttccctgagaatcatcttcctcgatgagaccgctgatcacaaaagtctccggcgtgaaaggaaaagacttactctgccgcgtgctcatctgaacggtatcgccgaccgaaggatgatcataccccaattttttaaagaatcccggctgagcggcgatttcaccggcctgttccggaaaacggcccgtttccagttttttatcggtattggtcatctctaacgtcgtatcatccgcatacatcagagacatatctctttcgctctgctgcactgtaccggcggcagccgcaagtccgatctcgctgatttcccctctgagttccagctcattcagctgtgccggactgacgccggagaaagaaccgtcataatttccgtaaaaaatcggagcgtttacatgattccattttaccagtccatagccataagacgcgatcaccatcagaagaacggtagtcaggaaaatcgaaatagcgatcaatatacttcgcgacttgtttttctttatcatgctcagcgaaatctgagttactgtatgattgctgccctgctgtctcatcccctgctgaccacctttccatcttcgattacaaaaattctgtctgcgatctgcgcaatatcttcatcatgcgtaatcatcaccaaagtctgtccgtattttttcgctgacatcttgagaagcgcgactacctcgtcactggtcttcgtatccagattgccggtaggttcgtctgcaaatatgatatccggcttggaggccagcgctctggcaatcgccactctttgctgctggcctccggaaagagtattgggcagactgtgaaccttgttttctatattcaacgtatgaaggatatcctgcacgaagtttacatcgatcttctgaccgtccagccccatgggaagcaccacattctcccagacatttacagaagagacgagattgaaggcctgaaagataaatccgatttttcgtcgccgcatcatcgccagatcgtcctctttcaactgaaaaatatcctcatttctcagatagactctgcctgacgtaggataatccagacctcccagcatgtgaagcagcgtacttttgcccgatccggatttcccgattatcgctgcgaattctcccttttttatctcaatgtctgcatttcgcactgcataaacctgattttctccggaaccgtaaattttgcacagattttctgttctaagtatcgtctccataaattactccttttgaatttcttacgccgcagcctctcagacaaatacggagggctggcgcgccggccaccgctttgttctgcggaaaatgcggacgctctgttcagccgaaacccgcacgaagctcccgcaaggccggcgcttctcacttacaggaattacgatacgacaataatctttcatataactttcaaaaaagaaaagaagtcttacattttcgtaagacttcctaatttcattatgcgatccgctccggttatttccgtaccgctgttatccgcacctcttcaaaacgcccggtcccgtttttcattttcatagggaagctgaatgataaaaaggcttcctcccgaggacgattctgtcacgcgaatcgtccctcggtgagcatcgatgatctgtctcgtaaggtagagaccgacaccggaaccgctctgctcctttacctcgggagaagagcctcggaagaaacgctgaaaaatcaggtggcggctttctttcggaattccgattccctcatcttcgatttcgatgcgaagaaaagtgatccgcttcaccagaccgatacgtatttccgtgttttccgggctgtatttcacagcgttttccaaaatattgaggagagcctcacacagccatttccgatcgtggtcaatgcgcaaagtttccgtgtcttcattgttttccacggaaattttgatctgtttgcgggcggcgatcggataaatccggctgaccgccgcagcgacagtatcgaaaatatcggcttttgtcaatcggatttcaatcattccactttcgagacgagaaatattgatcagtgcatccagaagttctttcagccgctctttctgaacgagacagcgagtcgtaaactcccggcgctcctcctcggtcagatcattttgttccagaatttccagactcgtgctcagcgctgctaccggcgttttcagctgatgagagaggtcggtcacaagggacttcgtagcctctttttcatttttcgccatttcaccggtaaaccgaagatgttccgccagagaatcaagccttgtatacaggatatccgccgcggaatctttctctgacagttcgttacgacgcagcgctccatactctcccgccgtaaggtcggaaagaatggcagcgacgtcttcgatacgctttcgctccttcccgcgcgctcttcttctttgaaagatatacagggcgcacaggaggagatatatcagcacacagagcgccgcggtcgccgcccaggagatgtacaatcttcgaagataataattggcctgcgcccatccggtgaagattccgtcgctgtaaccgtaggaagaaaggatttttctcccccggacatgctcctcgccgtgtcccttcagaagctgtaccgcctcggtcagcaccggatgttccggactttcgtccggggaattccattcctctgcagacatctctgctgcgaccagctcgctgataatctctatcttttggcggtaatcttcatactggatctctgccgccgccagtcccgccgctgcggtcagaatgaagaggataagaagaaaaatcaatggatctctaagcagaaaccgcctcatctttcacgtcctccctctgtgctattcgaggaatcccagacatagccgagaccgcggatatttttgatatactttggtctggaagagtcctcctcgatcttgctgcgaaggcgccgtatattgaccgccacagtattttcgtcagagaaattcacctcggtatccagagcatattccagtatctgattcttcgacaagacctgaccgggattctgcagaaacaggcgcagcagcttccactcgtttttcgtcagagaaatttcatcctccccgttccagatcttcatagaagtcagatcgattttcagtttgccgtactctgcaatatcggcaaaatttccttcctgccggctgaaaaatgcccggattttcaatgtcagcacggaaaggctgaaaggtttcgtgacataatcgtcggcgccggactcataccccatcacctgatcgatctccccgtcgagagcggtcaggcagatgatatgcacactgctgcgctcccgggcgtaccggaccgcttccagcccgctgccgtccggcagagtgatgtcgcagatcatcagctgcggatcgaaaacgtcaaacgtcctgcacgcctgtgccacactttcacaggaaaccaccgcatatccttccttttccagcgtgaaggaaatccctctgctgacactttcctcgtcttccagcagaagaatccttttctttgcctgcgccacaatcatcccccctttttccgcaatccttccggtcagagcagctgttccgccagtcctcttattccgttttcttgcagtattttcttataataagctgcttctgtttggatcagtccgtcgatcacctggattcccagaagctccacaggcgctttatcatctgtcagaataaagtctccgccggaagcgaaagacagagagccggccacatcattcatggcgccgcgcagctgcggatctttcagctctgccgcgctgcttttcagaacctccgcgatcttgggattatccgaagcgaagagctcccggttcgtcgttcctttcacgtcggcggtacagaccgttccaaacaccgatgcgatggtgtccgtaaggtaatcgttaatatttccctcccccgcggaatgcatattcatattcaccaccatcactccgccttctttcagatgctccttcacaagcgaaaaaaactcccggctggacatctgaaaaggaattgtaatatcctgatatgcgtccaccataatcacatcatatttcccgtctgtcgcctgcagataggctctgccgtcgtaggtcgtcacttccacatcctgaggcagatcgaaatattgacgggaaagagccgtaattttctcatcgatttccacaccttcgatattcatatcgccaaaatacgatttacattgacgcgcataggtaccgcttcccatccccagaatcagcatatcgagaggttctttcgagccgatttttccggtcatcagcggagctgccatcgccgtatcataatacatccccgtcagcccttcttccttctgcatcaccgactgtacgccaaaaagcacattggaggaaaggatcacactgtctgcggtatcctttacctgaagataattatagacggactctccctcgtatatcagatccttttcccagaaagcaaaactcccggaattgccgaaaacactgcagaacagaaatgccgccagcgcggccgcacaggctctccgtctcgtttttgcgctgaaaaaataaatcagacccagcagcagcagaatccctgaaaaaatcagaaatgtcaccgcagttcctaccgcaggaatcgtcacaaaagtgggcagaaacgtaccgatgatactgccgacggtattaaatgctcccagcgttcctactatttttccgttttcttccagattttccacggtatacttggccagagacggcgtcaccgtgcccagaagaaacaaagggaatacgaaaataatcatacaggccgcaaatgcggcgataatcagaaagttactgcttacggtaaaaatcagcagtgcggaaactcccaaaatgatgtattttccaaccagcggaatcgccgcgatccacacagcggcgattaaaatcctgcggtagagccggtcaggattcggatctttatcggcgctgcgtccgccccagatatttcccagcgccatagcgatcataatcgtgccgataataatcgtccacacgatctgcgacgaactgaaatatggagccagaagcctgctggctccaagttccaccgccatgacagacatccctgcaaaaaattccgtcagatagagataatatttattttttaaaatcggtcttttgtccattttcccatccgtttctttttcccggtctcttcggcatcagatgatgcgaaaaactgcggttttaatttgttcgtttttcattgtagcagaaaacaaaaaaagaaaaaagccttccggacaaagccggaaagctcaaaatcagtatatttctgcaggattttgtccttaagaatcgaactgcgccggtgatcagatgaatttcactgctgtaccataagcgagaacttccgccgcgccctgcatcacggaagccgaaacataacgaatattcacaacagcatccgctccgacagcctcggcctccttcaccatgcgctgcgtcgccagattacgcgcttccatcatcatctcattgtatgctttgagctcgccgcctaccaaggtctttaacccctgagtgatatcccggcccacattctttgactgaatcgtactgcccttgacgagccccagcatctcaaattcttttcccgtgatataatctgtgttgactaaaatcatttttcttccccctcttcctgttttattgtacataccaacttatctttattattatatcatatctcatcactgccctgcgcaatcgcgcccgggaatgagagaaatatgcgagccggacaatgcccggcgtctatgacacttctttcaactgccgataccactcctcagcctctcccgaagacttgctgttcacaaatacggtgagatcatttaactgaattttcaggatcggctgataaccgctgtagaggaacatcatgcatttgcccgtctgcttgccgcggtagtacccgaaatcataccgatccgtcgaacctccgttcgttctgatatatcggtcatccggcaggcggccgatcagctcggcggactttacctcatcaacggcaaatttgcagtcatatcccgccgcttcgatggttatggtatcattctcccttacaaaggtgacttccgcattttcaaaattcagtatcacggcagccacaaacagcagcagtgcgactacggccgccgccgtaacagcgacaatcgccttcgccgccggacgggccatattcatagtgaactgcatatcattcatacggtccatcacgaagagatgcgggtcatcgggattactgtaccatccgtttttccagtattcatcgtcatccacctctaaagacgactgatccgccgcgagaatatccgctctcctgcccctgatccgcagaatcggaaacagaagggcaaaggcgataaacagctgtaacacgatgtatacaaaaaaatcgatctcattgagccaatcaccgcaaactgtgcgaatcgtcatatagataatggaggcagcggacaaaaaaccactcactatcagcccgataccccaggcccgcttggacagcatatttacgagataattcacgccgctgtcctggctgtacactatattaggacgcctgccgacaagcatatgaattcccagaaataggaaaacttccatgagaccgacggcaagaatcaccacagccgccatatctccgtcccggtccttcaggaacagaaccggcagacacagcagtatgatagctgccgacagcaaatgccacttccaggagaacatcatcttctgtgaccgggcagaaacgcctgtatcgattctgacaatccggcggccgctttccctcacccagccgtttttcattttgatccggtataagactctgtgaggatgatagaccaaatacatcattcccgcaacatattgtatcagccaaatcagccagatcgtcataaacagagcaaaactaagaaagcaaataaagcatacccctgctccggccaggagattcagcgtctgaaacagaatccacctcctcctgtacttatctgtgagctccgagatctcctgtgtttcaagtgcatccctgggtatatgcactccgaagagcataccttcccgatattcgtgctttttcccataggctgccctgcagaccagcacgacaatcagatccatcagtataaatatcataaacattgcgatatccatcgtatattccccccttcttggaattcactctccggccccgccgcgatctgtctccctcttttcagcgccgcggggattcataccgctgaacatcttttcacatatgccgagaaattccttctcactcatacctttcaggcaggcctctgcagccagaagctccacttccgactccagtttcgccaaaaactcgtcatccctggactgtaccgcccggacagtcgccccttttctccggtcgatatcgataaagccttctgtctttagaatctgatacgttttatttaccgtcatattattgatacctgcatcctgcgccatctgacgtacggtaggcagcttctcgccagctttcagctcccctctcccgattccggtcacgatctgatttctcagctgaacatagatcgggatactgctgaccgtatccagtgtgataatcaccgtcctcacctcccccattccttgctatcccctgagaaaaatgttttctgatttcagataagtcctttaattccttccatcatttgtattatataatataatacaaatgatacttaatgtcaatcctgtaataaaaaaacgggaagcctatctgacggcttcccgttttatatatatctgtcattatctccgaatcagtttcccggataacgctacccttcgattttcggaagctgctccatcgccgatttcagttcttcatccgtaggaatataatcctccatctcgccgtcgttaaaacgctggtaagctaccatatcgaaataacccgtacccgtcagaccgaaaacgatattttttgattctccggtctctttgcatttcatcgcttcatcgatagcgaccttgatggcatgactgctttccggagcgggaagaataccctctactctcgcaaaggtctgcgccgcttcaaataccgctgtctgctctacgcttcttgcggtcagaagtccctgatcgtacaactcggaaaccacggagctcattccgtgataacgcaggccgccggcgtgattcgccgatggaatgaaaccgctgcccaaagtgtacatcttcgccaatggacaaaccatacccgtatcgcagtagtcataagcataaacgcctctcgtaaggctcggacaggaagcgggttccactgcgatgatctcataatccgcctcgcctctcaaaatctctcctgcaaacggcgaaatcagccctcccagattggaaccgccgccggcgcatccgatgatcatatccgcccggataccatacttgtcaagagcagtcttcgtctccagtccgataatcgactgatgcagcagtacctgagagagtaccgatcccagcacataacggtaagaatcctgacttaccgccgcttccaccgcttccgaaatcgcacatcccagactgccggtggttcccgggaattttgcgttgatctccctgcccacatttgtgaacatggaaggagacggtgtcaccttcgctccgtaagtgcgcatgacttcccttcggaacggtttctgctcataggaacactttaccatatagacctgacagtccagatcgaaataagaacaggccatggacagcgctgtaccccactggccggctcccgtctccgtagttactcccttcagcccctgctgcttcgcgtaatacgcctgagcgatagcggaattcagtttgtggcttccggaagtattgtttccttcaaatttataataaatatgagccggtgtatccagcctttcttccagacagtatgccctgaccagcggcgccggccggtacatgcgataaaaatttctgatctcctccggaatttcaaaatacggcgtcttatcgtctaattcctgctttgccaactctctgcagaaaatagcggaaagttcgtcttccgtcaccggctgaagggtctccggatttaaaataggcgccggctttttcttcatatccgcccggacattgtaccattctttcggcatttcgtgttcttcgagataaattttataaggaatcttatggtccattgtgttgtcctccttttagataataaaaaactcctgacctatcttttccgataggacaggagtattactcttctgcggtgccacctaacttcattctctcgaatgcgctctgccatgtactgacatacatgctctgctgtaacgtgcagtcacgtctcccctacttccggcttccgcccttttcagttcgccctcgcgggtccattcacctctctttccgctgccgcgctcccaccatccgcggctctctgcaagttttcagaaaggctactcctcccggtcacaggtttaacatttcaaaaggattttccctttatcgatttaattaaataaaggataagggatttttcatatattgtcaagaagagattttatttttttcgaaggaatttacttacggcaaaattgtttcggtatatacaatatctataccgagtacacaaaaatgccttcgtcgttttgttctgcaacgatctggcccttcgcagccagatatttcagagtcatgcaggcaggcagaaagaaaaaccacttggatacatcggaaagactgctgagttctctcggaagttccagcctcgtagtatattccgctgtcttccaggcgttcatcggaccgtactccttcagaagacctatgatctgccgcgctttttctccataatgccgacgcagttctgcgatgcgtttatatacatcgattctgatttctccatgaccgggcagaagagtctttacgttcagtttttcgatgatatcgagactctttaaatactcattcagcggattatccatgccctcctcaaagaataaaatcggcgcagcatcgctcaggatcacgtcacctccgagcagcgtccccgtcttttcatcgtagagacaggtatgagccggcgaatgtcccggtgtgacgatgcagcaaaaactgtagcctccgacatcgattcggccgccgtcctctacaatcgcaaaatccaccggcgcctccgggaaaaattcacagcccggatgagatgcgataaaagtttcataagacatgggaagaccttccgcccggtactgccggtagcgaccccgccagtaatcgtcggtgcagagagcatttgcagcctccgcctcctcttttaccgcaaaaaccttgttggaatc

SEQ ID NO: 4151 - DNA, 4799 bp, Unknown
  16S sequences of unknown bacteria
gaccccgaacatttgccaccttgcccccgcaggccacacctatatggaggatcttaacgaggcgggcggaattcccgtcgtgctcaaggagcttgaaagcggcggcctcatcaacaccgactgcatgaccgtcaccggaaaaacccttaaggaaaacctcgaaaaggttcaaagaaccgacggctcggtcataagaccgctgtcaaatcccttctccaaaaccggcggtatcgccgtgctcaagggcaacctcgcaaaggacggctgcgttgtaaagcgctcggccgtggcggaggaaatgctggttcacagcggcaaagcccgtgttttcaacagcgaggaggaggccattaaggtcatctacgacggcggcataaatcccggcgacgtggtggtcatcagatatgaaggccccgccggcggccccggcatgagagaaatgctgtctccaacctcggccattgcgggaatgggtcttgacaaaacggtggctctcataaccgacggaagattttccggcgcaacaaggggcgccagcataggccacatctctcccgaggcggcaaacggcggtctcatcgcctatgttcacgagggcgacaccataaatatcgacattccgaacaactcgataacccttgaggtgtcggaggaggaaatagaaagccgcaaaaagaccgacaaaattctcaaaaaagagaacctcaccggctatcttatatacctttatcccatatcgggcggcaggtttcctcggccgataaaggcgcaattatcaacgaaagacagtgatttttttgaccgaagctcttgaaaatttaagactgcggcttaaggccgtgacggtttttaagggggtggcggacagccccgccctgtcaaggcttatccgccttctcgacggcattgcggccgacgggcaaagtgccgaaaacatcgccctttacgccgattttgttaagtccgtctatgaaaacggctgcgatttcggcgagtgccttaagacctgcgttttcgaggatgaaaacattttcataaggctttcggcggcaaagcgggaaattcccgccgccgtgaaaagcgccgcagagtccgagcttgccctgttttccgagctgtcggcaataggcgcaaaacagcttaaatccgacctttgcggcgaaatttcacttcccgattttgactcgacttcatataacttcgtcgagctttacgcaaagcgggcaaaggatgcctgcaaaaccggctacggcattttcgcccgccacaccatgttcagggtggaaaagggcgaaattctgccctttgaatcccccgacgaaattcgtctcgacagccttttcggctataaggccgagcgtaaaaaggtgcttgacaacacaaaggcgctgcttgaggggaaacctgcggcaaacgtgctgctttgcggcgacgcgggaacgggaaaatcctccaccgtcaaggcggtgacaaacgagctgtcctgtgagggacttcggcttatcgagctttccaaggctcagctgcccgaacttcccggagttttcggcaagataagggaaaatccgctgaaattcataattttcatcgacgacctttccttcaacaaaaacgacgactccctcggtaccctcaaggccattttggagggctcggcttcggcaaaatcgcaaaacgccgttatctatgccacaagcaaccgccgccaccttgtcaaggaaagcttttccgaccgggagggcgacgacgttcacgcaaatgataccaaggccgagctgctgtccctttccgagcgcttcggactgaccgttctcttcggaaagcccgacaaaaagctctatcttgaaattgtcaaaaacctggcgcaaaagaagggtatttctcttcccgaggacgagctgctgcttaaggcggaggaatatgccctgcgaaagggcggccgttcggcccgtgccgccgagcagtttaccgaccttcttttggcaaaataacaccataaaaaaggacctttgatttcaaaggcccttttttgctatttgtcgcatttcggccgctcgtaggaaagcgcctgctcgctgtcggaaaatccctttgtggtggggtcgacgacggcattccacacgcttgcaatcaccgtgaaacaaacatacggatttaaaacggcccttttaagggtggagaaaaacactccccaggacgtcacgtccgagccggtcagtccgtaatatgcccctatgggcacggccactgcaagcgccaccgaaaaccaccattgcgaatttcttattcttaccttccagtttattttcaaaaaaatccctccttatattcccagcgcctttttaaagcaatttatgccgaaaattccgtcggcgtataggccgtttgccctttgccaagctcgaattttcgcttcggtctcgctgccggggataccgtcggggtttgctcccaccgtgcgctgaacgatttttgcggcgtttgaaaatcctccgccccttttaacggccgtggccttaagggcgttcataaattcgctgtcctgcgccccgtcggaaattccgtgctcggggaaggtgcgtccgtcggccataagcgccaggcgcagatttttcggcgtgcagccgagcgccggaagattttcgaaggtctccaccggtgtgaccgtttgatttttccaaaaactcggatttttcctggcgtcgatgtggacaaagccgtcgtcataataacagccgattccgtttatccaaagtccctgcgccgcatgagccacgtcgtagggctcgaccccctcggtcacaatgtcaaaggcctgtcccttaacatgatatgagccggattttccgcccacctttttgttccatgacggcgtgcggtagccgcttgaaatgaccatggggcggccgaatttctgcctgagcacctccagcttgaacacaaggtcgacgtcgataagcacctcgtccgagccgtcgtgacaggcaaactccgacaccctgaagtggtcggaaacaagattgtttccctgccgtgattttgaaaatctgtatactgccatagcttttccctcctgataacagtttattgggaaatgtgccgcagtgtaacacattgccctcaataaagggcgcaaaaaagcaaaaaggttgcacaaaaccgtgcaacctttttttatttttaaaaatttattcttcgcgggaggattttttatcctccttttcccgcttttcctcgcggtcggatttgtcctttttgtcggatttttcatcctcgtcggtctcatccttcggaatgggcagcttttccacccgcaccttttcgatgcgccgctcgtccacctcttccaccgtgaaaagggtgtacgccgcctcaacggtggggtgctcgccttcctttgggatatagccgagctttgccataatcatgccggcaagggtgtcatagtcgccgtcgggcagctctctgcccagcttttccgacagctcgtcaaggtcgataactccgtccaccgtgaaaacgttttccgaaagctgctcgatgtcctcgtcctcgtcgtcatattcgtcgcggatgttgcccacgattgtctcgataaggtcctccatggtgacgattcccgccgttccgccgtattcatccaccacaaccgcaagctgaatacgcttttcggtcatttcggtgaacagatcgcggcagtttttggtctcgggaacaaaataaacctcacgcattttttgagagagggtgtcggctgcgggaatttcgcttcccacatagggcagcagatccttgacgtatataacgccgacaatgttgtcaagatcgtcctcgaaaacgggaattctcgaaaatccttcctccaccgcaaccttgacggtgctgtctatgctgtcggtgatttccaccgccacaacatcggttcggtgggtcattatttcgtccacgggggtgtcgtcaaattcgaaaatgttgtttatcatttccttctgactttcctcgataacgcccttttcctcgcccacgtcgaccatcatgcggatttcctcctcggtgacgttttccggctcggaaccggggtcgatgcccagcagtcggacgcaaagatttgtggaggccgaaagcagcgcgataaaggggcgcataatgcgctttacgaaaagcagcaccccaaccaccgcaaaggacaccttttcggggttttcaatggcaattctcttgggcacaagctcgcccagcacaagggaaaaataggacatgataacggtaacaagcacaagggaaagcccgtttaaaaagcccgcgtggctctgcccgaaggcgccgaaccaggaaacaagggtggctccgaatttttccacaaaggtttgggaggccgaagccgaggtcaaaaatcccgcaagtgttacgccgatttgtatggtggacaaaaatgcggcggaattttcggtgagcttaaccacctttttggcctttttgtggccttcctcggccattttgtcgattttggcgtcgttaagagaaatgacggcaatttcgctcatggcaaaaaaggcgttgaccaaaatcagcacaagaagaagcatcagtttaagaaataaatttccggggtcatccataaaagaatgttctctcctttaaaattataagttgggtcaaggtcgggcaggttcaaaaacttttctgccccgcctttaccttatgcctcgtctctgccgcagcattttttatactttttgccgctgccgcagggacaggggtcgttgcgtcccaccttttgggacttggtcttgacgacg

SEQ ID NO: 4152 - DNA, 5999 bp, Unknown
  16S sequences of unknown bacteria
ccggatcatctggcgaccggtacggtcatcgaggccaagctggacaagggacgcggaccggtatccacgctgctggtgcagaccggaacgctgcgtaccggagacgcgctggtcgtcggtacggcatacggccgtgtgcgcaagatggtggatgaccgcgggcgtgagatcaaaaaggcgctgccttccacgccggtggagatcatcggcctcaacgatgtcccgatcgccggcgatgtgttcaaggcgttcgacgatgacaagaaggcccgtcatgtcgcagaggcaagactgcagaagcgggtggagaaggaacgcaattccaccagcgccatgtcgctggacgatctggcccgtcagatcgagcagggcgatgtgcaggacatcaacatcatcatcaaggcagatgtgcagggaagcgcagaggccgtgaaggcaagcatggagcggctggacgtgcagggcgtgcgcgtcaatgtcatccggtccacggccggtcagatcaccgagtccgacatcatgctggcgagcgcatccaatgcgatcatctatggctttaacgtgcgtcccaacgcgatggtgcgcaagaaggcggaagaagagggcatcgagatccgtctgcacaacatcatctacaaggcgctggaggagatggagcttgccatgaagggcatgcttgcgccggtctatgaggaagtcgtcatcggacaggctgaagtgcgtcagacgtacaaggtcagcaaggtcggcaccatcgccggctgcatggtgaccgacggtgtcgtgaagcgcgacagcaaggtgcggctgatccgtgaaggcgtcgtcatctacgaaggcaagctgggcagcctgcgccggttcgaaaacgatgtcaaggaagtgcagaacggcttcgagtgcggcatgacgatcgctaatttcaacgacatcaaggtcggcgacatcatcgagctgttcgaagaccagcaggtggaagtcgagtaacatgaagggcaagagtgacaagatcgcggccatcatccagcgtgaggtttcctccatcatccagatggagctcaaggatcccaaggtcgggttcatcaccatcacggatgtcacggtgaccaatgatctttccatcgcgaagatctatgtgacattcctgggcaagcaggcacgcatcgatgccggcatgaaggcgctggagcgcagcaagggcttcatccgctcacagctggcaggaaggctcaccatccgcaaggtgccggagctgatcttcctgtatgatgagtcgctggaaaagggcaatcagatcgaaaagatcatcaaagagatcaatcaatgataataagggagacctaagacgaaacatgtcttacggcctcccttttttgctgtttcagcatcagtacaatttttgtcatgaaatattccgtgttttttaaattgttttatcctgcccgttcctctagtatgaaagatggaaatgggacatactgtttcaattcaagcatttttttcatgaagaaggagggaaaatgaaatgaaaaaaatcacgactgtggcagcggcattcactgtactgacatcatcgctgctgccgacaagcgtcctggcgcaggagggacagctgagtcttccggaatttcaggatctgggagatggaagcgagaacctcgcgctgaatatgaaggtctctgcctcatccaatgaggggactgccggacgttttgaaaatgccgctgtggatggcaacatgtctacgcgctgggcttcccgcgccggcaccaatgacagcgaggtcgatcagacatggtattgtgtcgacctgggcaaggtcatggaaatcaacaagatcgacattcactgggaatccagaccgaataagttcaagattcagatctctgaggatggcgagcaatggagcgacctgggcgaggtgatcgacaatggcgagctgcaggagggagaaccgaacgccaagctcaacacattggatgatttcggcacggtcaaggcgcgtttcgtgaagatgcagggcatcgagcgccgccgtcatgagaccaacggcaataccggctattcgatctatgagatcgaggtgtatggaccggcatggagcgacgagacctttgtcaatgagtatctcgaccagctcagcgtaccgtcccgcatgacgcaggatacgctgctgccgatcgcggatgatgattacggcgtcaatgtcagctgggagtctgacagcgatgcgctcaccatcgacgcgcagggcaatgtcagcgtggtccggggcgaacaggaacagaaggtgaccctgaaggcgatcgtgacccgcaatgaggccgtcgcagaaaaggtctatgaagtgacgatcccgtcaaatcagccggcggactacagcatctaccctgtgccagtcagcatgaaggagaaggatggcaccctgatcccggatcaggaagtcacgctcgtcatggaggatgaggtcgacgattatacgaagcagcatatctaccgcgtgctggaggaaaacggcatgtcttacaacacggcggctgagccggacgcagaaggcaccaatgtgatcctcggcgtcgcggatggagaaggcgctgctgatgattactttacagaagtcgactatgatcgcagcatctctaccgacaagagcgaaggctatgtgctcgatgtcgatgaagagaagcataccatcgccgtcatgggccatgagaacaccggaacgtcttacggtctggatacgctcgatcagatgctcgatcagggcgaaggcgagctcaaggaagtgctgatcgaggatgcgccggaaacggaattccgcggcttcatcgaaggattctacggcgagtggacacatgagaaccgcatggacctgatccgtttctgcggagagaacaagatgaacacctacatctatggtccgaagagcgacccgtatcatacggcgcagtggcgcgatccatacccggcagaacagctggcacagcttgcggaactcgtggagaccggtaagcagcacaatgtggaggtcgtctgggccgcacacgtcggcggacatatcgacatgggcagcgacgcggatatccaggcgctgatggacaagttcgatcagctctatgacatcggcgtgcgtcagtttgccgtgttctttgatgattcgtcgacagataatacgcatctggtcgatttcctgaataccatccagcatgattatgtggacgctaagggcgatgtcaagccgctgatcatgtgtccgcagtattacaacaagaatcagggcggcgttgattacctgcgcagcctgtcacagagcgatgagcgcattcagatcatgtggaccggcgacaatgtcgtttctgaggtcaaccagagcatgatcgactacatcaccgatctgatcggccgtccggtctatgtctggtggaactacccggtcaatgacctgggcagatcacacttgctgcatatgggaccgacagaggcgctgcagccgggcatcgagaacatgagcggactcgtctctaacccgatgatccaggcacaggccagcaaggtctctctcttcagcatcgcggattacacttggaacagcgaggcatatgacagccagctcagctgggagaattcctgggcgcgcatcatcaccgacgatgagcaggcgcttgaggcgtttaagatcttctgtcagaactgtgcttctgccccgatgtctttcgcgcagaccgatgagtctgtctatctgatcccttactttgaggcgtttgagcgcaagctggccgtacaggaggattacacggcagaggcagccgcgctgtgcgagcagttccagctgatcatcgacgcgtgcgatacgctggatgcttatcagggcacaggcaatatctccgcagagatccgcaactgggtcgacacgctgcgcgatgtcgccgaagtgggcaaatatgtatttgaacagctgcagacgctttctccggtatccaaggatgatgatcagagcatcgcggcgatgatcaacttcatcaacgatgcatcgaaacggctgaatgacacgaacgcgcatacccagaaggctgcgcagaagcgcatttatccgttcatcgaatctgtgctttccgctatggcggaaacgatgtatccggcgctgggcttcccttgcacagcggcaggatttggttcggccaatgcggattacagcgcgatgaccgacggtcagaaggacacatatgtcgaactgggcgcacaggtgatcgatgatcatttcggcatcgacctgaaagcggtcaaccgcgtaaccgacatccatctcacgatgggagagagcgatgaagagggcaagcagtcttactacaaggaaggcgtgctggagtattccgcagatggaaacacatggacaccgatcggcaagtttgatacgccgcagatcgatgtgacagacctggatatccaggcgagatacatccgttaccgcgcgacggcgatcttcgaggacatcaccaacggcgtaaatctctcgaatatccgtgtcatggagatgagcgtgaatgaaagcacaccggcagcggtctacaccaatgcttccggcctggatgcattgtctgtcagtacgcaggacggacaggtgacactgacgggcagcgagcagatcacgctgcacccgggcgaatacgtcggcgtacagtatgatgtatgcaagacgctgtatggcattcagatgccagaggcactgacgagcgtcagcgtatcgacagacggtgaggaatggaatgccgcagaaggaatagatgcgcagaatgccaagtatatccgcctgatgaatgaaggcgaagaggccgtgacctttgcggccgcagacttcacgtatcgctgcggcggccgtgcgccggtcgtttccgcgaccaacagcggcggcagcatctattctggaaacgcgtcgaataccgtggacggcgacgcttctgatggttcggccatctggtacagcaacgcgaactacgcgaccctcgaatacacctttgagaccgcactgccgctggcatcggtagagatcacctgcaccaaggacgtgctggacagaggtcatatcgacatcagcgaagacggcgagacctggcgtacggtttcgacattcacgacagcaggcaatgtgaacacgctgacattgagcggcgacaaggcattgaagatgcgcctttgcatcgacaagagcggctgggtaaagatcagcgaagtgaacattcaggtcaaggaagacatgagcgtgctcagcggtgattctgaccagctgaccaaggcgatggacggcaatctgctcacgtcttatgacaccggagaagccgcaggttcattcatctataacaacgtcaacagcaccgaagaaaatacgctcgtcctcgtcaaggatccggatacacagatccgcgtggaaggcatgatcgacggcgaatggcaggatatgggcacatacagcggcgtatacaacgagatccgctatccgatcccgaccgcatctttccgtatctcttgggatgaaggggaaaatgtatccttctatgagctgatgagcgcatatgtggaagaagatgaggagaccgcaagcgaagcagccatccaggctctgcgcaacatggtcgataaagccaatgcgctgggatcagatgatgaagcgctgaaggcagcgatcgaagctgcacaggcggtcctggataaggatgcgccgacctctaccgaagtcgtcaccgctctgctcgatctgagtgaagcaatgcaggcgctgaacaccgatgaaagcacggacgccttaagagcagacgtacaggcgacgatcgacttcatcaacgaacacatcctgaccaacgtggacaacgttcgtccgggcaaggtgcaggcgctgaaagatgcagttgccgcagcagaaaaactgctcgctaacccggatgcaacggcagatgagctgaaggcagcgaacaaagcgatgaccaaggcagcccaggagctgtggg

SEQ ID NO: 4153 - DNA, 9081 bp, Unknown
  16S sequences of unknown bacteria
gattgtcaagcactttttcagggtttttcaatctctttttcagagcgtttccgtcattcccgacggtttctttagtttacatcttttcctgcaatttgtcaacccttttcaccaaactttttcatttttatttccaaccccttcctccttcctattatatatagggccggaaccaagaagcggaggtctgacgacctccgcttcttcgattcagaactcttcatagctgccgatcagcgccgtggtatgcagcagcggcagttcccgttccagcagtacaccctcccggcgcgggtactcgtagctgtcgctggccttgatgcactgggagataaactgtaccgcccggtcaatggcaatgggcaggctgttgccctggagcaggcttcccagcatcacgctggcaaagatgtcgccggtgccgggatagctcccctggagcttgggtgagaatacccgccagtaccgtccgctctgcttctcataggcagccacaccgatctccccgggacgggtgcggtcctcggcgctggtgagcaacaccgtcttggggcccaggtctgccagtgcccggagccgccgtttgaggtcctcaggggtatccgcatgggacgccgggtcctcgcccagcaggaaagccgcctcagtctggttggggacaatcagatccgcctcgccgatgagccggcgcatctccccgatcatatctttagaaatggaactgtacagcgaaccgccgtcgcccatgaccgggtcgatcaccacccaggtcttgggggtgcggaaggtgtggatcagttcccgtaccagttccacctgccggggcgaccccagaaagccggagtagatgccgtcaaattccaggcccagctccttccagtggcggataaacccgggaatatcctcggtgaggtcccggaaggtgtagccgtcaaagccgccggagtgggtggaaagcaccgctgtgggcaccggacaggcctgaatacccatggtggagagaatgggcagcacattgcagagggaggaccgaccgaatccggacaggtcgtgaatggctgccacacggggaatcaaaggacgcatacctctcccctcctctcagttcacacggtaggtgatgatgcccttgtacggtacaacggtgattcccgggtcctgtcccagccgctccatgagagcctgacgctggtcagcgggaatctcccgggcttccaggaagctctccacctcaaactgattcatggggtgacgccgggcgatgctcaggatcgcctcataggggtcctccacctcgctgaagaaactgccggaggtgagctggtcgatggagatgccgcccaattcccgggcagccaggtcgatgcgctcgggggcagaggtatgcacaaagccctcggctggcggacgcaccggagtgttgaggtaaacccggtcatagtcgatggtgcccaggaactccttgaaggcagcgatgtcctcgggggaatcgttcatgccgtccaccagcatgatctcgatccacagctgaccctggtactccctggcaaactgacgcagtccctctgccatctccgcaaacccgatggaacccatgggacggtcgatcttccggtactgctcctcggtgacagcgtccagggagggcagcacaatgtccgcctccatcagttcccggcgcatctcggcgtcatagagcagagcgccgttggtgatcaccgccaccggcttgtcggtttccttcttgagcccggcgatgagctcgcccagacggctgtacagagtgggttcgccttcgcccaccaccgtcaccacatcaaagggaatgctgccctggagatattcccggaactccgccaggatctcctccagcgggaagaactcctgccgggtgttggtcatgcgtagggtgcgccccagctgacaatagacacaggaatagttgcaggtacgctcggggatcgggctgacccccagagatgcgcccagccgccgggacggcaccggcccgaacagatacttataaccgctcatacaattcgccccttgcctcacagattttcgggagaaatcccgtctgtttccagtataatccccggcagaccacccaggcaaaccgtcccgcttcccccttccattgtcccgaatccatctttctgcacaatcacagcggtataaatcccactctgcctgtgcatatcagatagcttttcctgtggattccaacacctgtaccggaatccgtaaaacttccacaatcgcatcgctattcagagagctgaaactgtgcagattgtaaaatcatatccaaatccggcaatggcagcgaacagcacagctctattcctcagccgcgtgcggcagaccgcccggagatcaggtttaccttttccggcgccaggcacgacgcaggttgcaccgctgccgcttttttgcgcagcaaaaaactccccggtcgaaaccggggagttttttagttcatcaaattgatgcgttcagaaagacttaggcaagagcctcgatcattctcttagcgcactcctcaacctgagatctcgggcaagccaggttcaggcgcaggtgggtagcaccgtggaaggtacggccatcgttcgggataacgcccttagcggtaaccttgtccagaacttcctggaactcgcagcccttctgcttgcagtagtcctcgaagttaacccacagcaggtaggtagcatcgggcaggtggatacgcaggccagggatattggtctcgagttccttcttcagccagatctggctctcacggatgtaagcgttcatagcgtcaacatactgagcaccctcgtcgccgttgtaagcgccgatagcagcatgaacagacagaacgttagcagcgttgtagtgagaagcaacagcagccttagcaacgcgagccttcattgcggggttccagcatacagagtaggagccctgcagaccagccaggttgaaggtcttggaaggagcgtacatggagaatacgatctccttagctctcgggcagcaggtgtgcagcggaacatgcttgtgaccgccggtctggaagtcagcccagatctcatcggagcagatcagcatgccgtacttatcgcacagctcaacaactgcgatcatttcttccttggaccatacatggccagtggggttgtgggggttgcagaagatcatgatcggaggcttcttctcgatgatcttcttttccatatcctcgatgtccagggcccagccatcagctgtttccttaacaggagagtaaacgatgttacggccgcggttagcgatagtgctctggaaaccggtgtagcaggtatcgttgagcagaatccagtcgccgggcagagagtaagcctcaacgaaggaggaaacgccgcccagaacgccgttctggtagtcaacctgatcagcggttacgccgtcaacgccatatctttccttctgccacttagcgataccatcgaagtaagcctgaggaatcttgaagtaaccgaacgcatgatgctccagtctcttagccatcgcattaacgatgcagtcaggagtcatgaagtccatgtcagcaacccacatgggaacgatgtccttgttgtccttaacgaacagaggataatcccacttggtagcgtcgttgccgcgtctttcgaatacctgatcaaagaacttagcgtcgtaaatcatttttaacaccatacctttctcatagctttcgctttggtttcactatatcacaaactttggcaattgaaaacccttctgcatggaaatctatgtattgcatagaaacggtcaaaactttttggacataatacgcattgacgtcctccaagggcaaatttctgtttacacaatacaaaagaatggctgttcaggttaaatttttatgaaattttaatgcgataaagttgtgcggactgttgaagaaagctgtcgatttttggtgaaatcgtccatgaatctgtaaaattatatatcctaacgaacatggaaaaagccggtccccaagggaaaccggctctgaaaagcgggatcaggatcagaatttcgggggctgacgcatctggcggcggaacttttcatagcgcatcttatagcggatgcggtcaaagagcttggggccgaagaagatcaggaagttaatgagggagaaaatcagcgaaacacggctggcggtgttgccgatgataaagagccagcccagcaggacagcgtcaataatgcccagccatttcatcttcatggggatcaagaacatgaagagcacttcggtgtccgggaagagggcggcacaggccagcagcagcgagagattgagatagtcgctggtgccggtggaattggtgatgaaagcggcaatgatggcgccgatcataccgaagaggtaatagagattgaagcgggtcgtcccccagtaatattccaggttctgtccgagccagtaatagaagtagatggcgacaaaggcaaagagcccggaggaaggcggcataaagataaaggtgacaagccgccagatctgcccctgcataatgcggtagggcgagagggcgatcagggagaaaatggggacattcggctggattgccgcgaagatatagagggcagccattgtcaggcagatatactgcatgaggttgccgatggaaaagcggtcaaatttgcgttccagtgtatcgagccatttcatagaagagtcctgtcctttccgggttccggcctggaagaaaacggcgggaatccaactgatatcatacaacattatgcccgggtgtacaacggttttcacaaatagttttccggattcacatattattcacaggaaatttcgtcaatttctccgaaagtcttgccaactgttttatggaatggtaaaatttttgtattatcgcatcagttcagtggttttgcccgtccaggcagacagacaggaggtaaaaaaagccatggtcctttcctatgtaaaacgattcctgcggctctatgcaggactgttcctctgtgcagtaagtattctgctggcgatccagggcggcgtgggtgtgaccccatgggacgtattccacatggggattcagaacatcaccggcatcagctatggaaccgtcaatatcctggtgggactgtgtatcctcaccacctccattgtgctgggtgaacccatcgggttcggcactctgtgcaacaccctgtcggtgggctatatggtggacttcctcaagtggctgaactgggtaccggcagcgcccaatgccattgcaggctgcggcatgatggtactgagcctgtttgtgctggcgatgggttccttcctttatataggagcgggcatgggctgcggaccccgtgactcgatgatgaccgccttctccaagcgtctgaccaaggttccggtgggcctgatccgcggcaccatcgaaacggttgtgctgatgatcggtttcttcctgggcggcccggtgggaatcggtactgtcatcggcatgttcggcatcggcccggcgatccagatcgtctttaacctcttccacttcaatgtgcgcaccatccgtcatgagtcggtgctggacactgtccgccggctctcgggcaagactgccgctgtggctgccgaaccggcagaataattccccggcatattttccccgccccctgcataccatagaatcaaaagccgccccggcaccacgtccgggacggttttttagcctctggcgcccctgcggggagcaattcgcgctcatggcttgcgaaggtgccttacttctgcgcacgcagccaggcctggcagatcaagtgaatagtgaagagcgaagaatgaatagcttcggtatgccgcttcgcagcatgcattcagaaacatcttccgaccgctatttccaatccgtaccgcagtgcggcacaccttccctattctctcttctctattctctcttcacttctcccgcccctgcgggagctgccttacttctgcccccacagccaggcctggcagatcaagtgaacagtgaagagtgaagaatgaatagctttggtatgccgcttcgcagcatggattcagaagtatctcccgaccactatttccaatccgtgccgcagtgcggccaccttcccttttctctcttctctattctctcttcacttctcccgcccctgcggggagcggcttgccaactgccgccgcttgttgtatgataggcacagaatttcacccgaaaggcgggcatgaccatgcacactaccctcacccccctgttcgacgccatcgaagggctgcgccggcaggatttttcccggtttcacacgccggggcataaaggagcgcccctgggcttcctctcggcagtgaccccctgggacttcaccgaagtccggggcgccgacagtctttttgaagccgagggccccatcgccgaaaccgaacggctctacaccgagctgtacggcacagccggcagttttctcagcgccgggggcagcaccctctgcatccaggccatgctccggctggtgcagccgctgggacagaagatcctcatcggacgcaacgcccatgggtcggcggtatcggccatggcgctgctgggactcgagccggtatggctctgcccccggaccggcgctgacctgctccccgcccccatcacaccggcccaggcagaggaagccctgcgccggaatcccgatgcggcggcggtgtatgtcacctcgcccgactacttcggcaagctcaccgacatcgccggactggcgaaagtctgtcaccggtacggggtaccgctgctggtggacaacgctcacggtgccgagctccagttcacgccggagaaccggcaccccatgcatctgggggcggatctctgctgtgacagcctgcacaagacccttccggtgctcactggcggagccatgctccatgtgggcgatacgcccctgacccggcagcatgggtttgtccggaacgccaaggacgctatgcatctgttcggctccaccagcccgagctatctggtgatgctctcaatggacaccctgctccccgccctgtatgacggcagtttccggcaggaggtcgcttacaccgtccggcaggtggaaaagctgcgccagctggcagccggacagggctttctgcttcccgagggggaaacgctgcccacccggctcacgctggtctattcgccgctgggctgtacccgggcggaatttgacgccgcctgtaccgccgccgatgtggagccggaatatctggcggaccacgcctgtgtgttcctctgttctgcccggaaccgggaggaggatttccgccgtctggaaaccctgatccgcaccctgccccacaaggagccgctgacagtggaaacgggattccatctgcctgaaacggtgtgcgcgccccgggaggcgattctctcgccccggcggaccgtggcgctctcccaggccgagggacagaccgcggcggaggtcatcagccggtgtccgcccggaatcccgctggtgatgcccggtgaacggctggataaaaatatcctggcggatctaaataagtatggtattttacaggtgaatgtgttagaataaaggcagaggaagggcagttttccccttttggggaaggcagtcctgtccggctgtcagctggagccgaaggcgatttcccggctgaacagtgtataaagggaggcagatgttatgaaacttattattgcaatcgtttccaatgatgacgccaataaggttcagtccgaactgaccaagaatggtttctccatcaccaagctggcaaccaccggtggtttcctgatgagcggcaacaccacgctgatctgcggtactcaggacgaaaaggtggacaaggccatttccattatcggcgaattcagcaagaagcgcacccagatggtaccttcgaccgcttcctacggcgttggtatgtacacctcgttcccggtggaagtaaccgttggcggcgcaaccatctttgtactggatgtagaacgctttgagaagctgtaagccgaaccgagggatttgattttgcagccccgattctgttataacaaaagagctcaggaaacgctcgccgcctttgtgaacggcgggcgttttccgcatgctctgctgcttgagggacccgaaggcagcggacggcgcacctttgcccgggagattgcggcggcattgttctgccgcggggagcacaaaccctgcggaagctgcaatcagtgccggaaggtcctggagcagaaccatccggatgtggagtattacggcggagatggcagccggcgcagttttcatattgataccatccggcagctgcggcagaatgcctggctgcttcccggcgaagccccctgccgggtatgtgtgctgtgcggcgccgagaatatgaccgaccaggcgcagaatgccctgctcaagatcctggaggagccgccggaacacacggtctttattctcacagcggaaaaccgttccatgctgctgcccaccatcctgtcccgggtgcagaccatccggctggagcctctcaccccggcggaaattctgccggtgctgcgggagcgatgtccggaccagcccggcgagaaactggaatgggcggcagaaacagcggataccattggtcaggcattggcgctgctggcggacgaaagcctgcagaagcatgcccagctggcccagcggatgctggaactgctctgcaatggcagtgaatatgacctgctcacggcagtggaaccggtgagccgcaagcgggaggatctcctggaggtctgcactcagctgcggcagctgctcacagcggatctcacccgggcggcatcgggcggcgagagccggttttccacccggcggatcacccggatgctggaagccctggacgatctgctcccccgtgtgcagcagaatggcaatacccttctgctctccaccctgctggctctgcgtctgtcccaggcgtgatgtcagggcagggaacccgaatcaatccgagggcacagtccctcgcagatttttagatcgaaccaatccgaaaaggaggaattatggcaacagttg

SEQ ID NO: 4154 - DNA, 4585 bp, Unknown
  16S sequences of unknown bacteria
gtttcaataggcagtctgtaaacagcttggcataggtatttgtccccacgatcccatccaccgaaagccccctggctttctggtagcttcttaccgcgctttccgtctttgtcccgaagattccgtctgctgtgccgctgtcataccccttttcatgtagcatcaactgcaccagcttgactaaatcgcccttgctcccccttttgatctgttgcattgcgttccctcctgttaaacatccgttgcgccttcaaatgcgcttacatccactcctagcctgtcatacaggcccttcctcacatcctcctgtatcccaagcgttaccttggtatcaggcccaatgctctttggctccggtacaaacgcctcaagctgccgcaggctcatgcctgccagctccgcacgctcctcctttgtcaggtcatctctgccggaaagctccttgtatcgcgcgatcttcgcctggtttgccgcaatctccgccttttcctgttcccggtactgcttgtctgcataatgggcgatatagatgtggcattgttctgtatcatagtcgtacatcactgtacgtatgcggtgatattgccctacaaacgcgccgttgtctcctgtgatctgtttcccgagtgccatctgtattccctcctaatatttgatgatgtaatgctgtaccaggtaaggctgcaagttgttatgcgcgctgtcctgcccaaagttaagattggcaatcccatagctgcttgctccgctgccggccgtgccgccgtcccggtatttcccgctgattttttcgccggaaaacgcattttttacatctgccaagtttgtacctgtataaatgttatgaaattcaagatacccattgacggcgggtaattcctcttccgacagtgtatgcgccgcttcccctcctttgcttgcaagggggtatgttccgtttgtgcccatcggcacacggcccgttaagtccggcacattgaacgtcgtgcttccatccccctgcccgtaggtagtacccagcacagaaaacaggtttgcatacgtggtgcggctcactgcctgcccattgcacaatagccacccttccggtgccgtactgcccggccatacttggatagaacctgcctgattatgcatcatgttatcagctttatgttcgtcaatctggttttgtagattccccgctgcatcttctgaaagttgccccttaatcccatcaaaccattcattaaaagccgcagttagctgtgcgttgacttcgcttgtatcaaggtgttcgattggacttgttacaattccacatacttcattattaagccgtaaatctgtgatgttcgcctgagtaattgttgttaccctttttgaaatataaatttgagccaatgcaagatcataaatatcgctaccgcccgtatccgttctttcgatgtccggcggaactggcgaacttgactctgttcccttgatataatgaataccgatttctcggttaatcccatcatatctagccacaatcatatcaatcctatcaaggattgcatgagcagcgtccaccgaaatcacctgatcgctttcaagccatcccatatacccattgataaagcaaaccccaggtttcactactaaattcatcccgttgcttgcctgtaccatcatgccatcacctgggtctgcaaaaacgccattgccaacaattctactgaaatactttgcaaaaaaggtagcgtcctcagctctgtcaaaaatcggcattccctcttcgtcatatccagtaattgtcgagttaaaaaaaccgcttctcaatgtttcacctcacgttttatggcctgtcctaggctcaaataatctttcccgaatgtaactgttatggatatcccctttgccgtatgcgtttctttaatcgtttcaatacgtttttcaaccataactccgagagaatcatagaccactgtacatatatctcccaagtcataatcacttttatatttcagagcgctgttaggatcgatttttgcattgtacgattcaaccatgttataggaatcaagtttttcaatgcctctctgcttaagtacagcctgataatcgctttcgctcatttgtacatcgtctactgttcttttaaggtctctagcatcaacgtataattcgttcctttcttttccatcagttaggtcaactgtaacaaccgtcctttctgtatcctctccctcaccagctacatacgcaaagtttttatatttgcttttatccctgtcatattcagcagtgatgaggttttccatcccccttgaaaaggtagcccatgtattcactgtctgcccttgtgtcctgtcctttcctttccatacatcaaatacgatttcatctgccaaaaagttatagatcatagaaaaagaaagctcctgagattgacatatttcttgaattttctccaaaaccgtatcgcctgtggactgaaaagcaatctccgttcccaatccatgcgccgtgcctaaccgcagttttgggatcttgcgcccgctgtccgatggtgtaatgcaatactctgtcacgagctgtcggctgatctcctccggtgttcctttaaggtcttttgttttttcgatcacgcgtccatcgagtattgcctcgaggaattttccctcaacttcaacggtttctgatttcgcatcctgcttatatgaaagtccctgtaaaattccaagctcatccgcatcatttctgaaaatataccgtccatctctaagcaatgtatagtatttcatgtccgttgcaatggaaaacgatcctacgtcatagtagcttctatcccaagtgagagattcaaatgtatctacaaccccaatcggatgaaagtctttatcaagaatcaataaatccatttcatacccccaaatattccggtgtgtaatacaagcgaacgtccatattagtcattccatcctcagcatcatattcaacaacattgtcccctggaataatgcacaacgacaaatcagacattctatccatgtccgtaatggcgttgctaccattgattaggatttctttttgcctaggaatcgtgctgatctgcaaagtatcacccataaatagttttctcatgacctttatgtattgtcccgttgtttcgtttcgaatggtagggctatctacctctcctcttgtcgcagtgacaacaaattcggcgccaaccgctttgtccccgtcgttcgcaatcaggatgctttgtgatattttttgataacccatgatctgtttcttttccaccgtacacttaaacggaagtgaaaattgcgggataaaagcggcaatatttctcccataactgctagtgcttaacagcatggggttttcacagtaaagcgatacagtaaattcggggattttgtatactgaatcaagcgttccaaaatctacattttctatcaaataccctacttttctcttccgcccacaatactcaatgattgctgttccctcatttgctggattaaaaaagcgcacaaggttttccctgtacacttctctatccccggaaggtatcccgcctacgatgtctatgtgccttggccccagtctccgatttgtcaccgttgccccgtctattcccgcattttccgttgcagtaagtgttatatcgcttgtttcaaggccttgtatgctacgtattttataagcagaatgcttcccgaatgccatttcctttccgttactcgtaaatacaatttttacattttttgcgtccatgtcaactaatctccctggcaagttttttagactgcctttccaatgccctagctacctctgccgggttttctatgggctggttgaaatagtttgtttgcgttactgagagtcctttatcgctatccgaacttcgtaactttaacgaatcaataagcacattttgcatcccatgcatgcgaacacccatttcaaactgcattgcttctcctgttacagcggcttgcattcgattcatgatcctactcatattcgcatctacaacgcctattgttcttcgtgtctctcctgccaacccaaccgcaaggccctgcgagagatatttgccaagtctagccgtctcttttgatggagaatgtatgtcggctacatcactcattttcttcaaaacagcacttacgaaatttcctacatctgtgagaattccatcctttttagaatcaataccagcctgtaatccaagcgcaatattttctccgatagtttcagccttttttaccgctccaccatcttctccatccagtcctttttctatttcttcatttgtttttttcccgatttcttttggtacgctttcccctgaatccagtttaagtgcttcccttagacttttttcaatctcgtcggcagacatagttgctgctgatgcaagttctggacgcttttctgtaatgccgtctatcatattcaccatagatagaagcatatttttcctctgttcttcgggcagccccttataggattcaagaattccatttgcaactcgtatgttttcttctgttacctctcctccctgctcccttgtaacaaacagcatattcataaactgatcgga

SEQ ID NO: 4155 - DNA, 8564 bp, Unknown
  16S sequences of unknown bacteria
gggccgttgtaacgctcgtctatttcaatccacgctccccgtggggggagcgacctgaggcccgatgcgggccgttgtaacgctcgtctatttcaatccacgctccccgtggggggagcgacccgtcatctgcaagttggtattctgtcacctacgatttcaatccacgctccccgtggggggagcgaccgcaaggtcagtccctgaccggtgaccaggtagaatttcaatccacgctccccgtggggggagcgacccagggagcgcaaggggttgctccgctttcttcccatttcaatccacgctccccgtggggggagcgaccgtcctctccgaagtaatacatgcggatcacatgatttcaatccacgctccccgtggggggagcgacgccctggatgtcccggcttgtctcgtcggcaaagtatttcaatccacgctccccgtggggggagcgactcggccacaaaaccgtttttccgggcgcctgtcaatttcaatccacgctccccgtggggggagcgacagcagatttgcacaacagcacctctgcaaattgatagaacttaaataaatttcagcttatccgagagtaagatttcaagtgaaatctttatcattccccggcaaagggtctcattctggtgcgaacctcccaggccatgcgtgatcgtttcctcttcgcaccattataaaatcaatggttcttccggctgataggaaggtttgcatccgaaatgctctatcttgttttcatatcgtttccccaggtaataaaagcgcaaactatccttctccggatccataatggataaaagtttcgcctgaagcagtttacactgggctgtgtccagcagacactcaaacacggagcattgaacccgctggccatagttgacacattgcctggcgatctgccgcaatcgtctgcgccctgcggcatcttctgtgttgacatcatatgtgatcaataccagcataacatcctcacttccataaaaatggcggatatgcctccagatcgcctcgcaaacaccgggccagaagcaatgcctgtaaatagggtaccaggccccaaggcaccttctctcccaaaaacggatgggtcaagctgtctttctttcgctcctgccaccgctggagaaaggttcgccttccactctcgctgagcagcacaccgccattttcccgaaaaacaaaatcggttttctgaaagatccggttgttgatacaggtcaacacgaaccggtccgccatacaaggacgaaattcctccatcagatccagagccagggagctgcggcccggccgatcccggtggagaaagcccacataagagtccaggcccacactttccagagcccctgcgcagtcatgagacagtagactgtaagcaaaggagagcagagcgttcaccggatccagcggcggccggcggctgcgtgtctcaaaatagaacacggatcggtcccccaggatcatctgatcgaatacgccaaaataagcagttgcactggctccttccaacccccgcaggctgtccagatcggtctcctgcagcaactggggcagcatggtcttcagctgactggacacctctcccaaccgctgatcatccacccgaagcccatgatcacgacgggtacgctcaatgctccagcgggcattgtggacctttccgaacaccatggcccgtgcgatggcgcagctctgtgccgggtcgtctgccatgcggtattgtgtgcggcgcaacaatacatttccattggcttcaccggtgacccgagccagaaattttcctccaggtgtgcaaaaggacaaggagattccccgctgggcacaagcccccatcaaagcgggagaagcgccgggataggcaaaggtgaggatggcagtcagtgtgtggagaggataacgggccaccgcctccttttcccggctggccaccacattttctccatccagggaaagatagatgttctccgaagtcacaaacaatgtattgagcagatgtctcacagctccacctccatggcctgacgcagataagcattcacatcgttttccttcatcagggccggcagacaaagctccttcaaggaacaggcattgcaggatctggaacgccggaccttgggcgtgtatccccgacggtaaagctgatgcatctcctccagcattgcctttacctgctcccgcagttccctggaaaaggacaccgatgttcgccgccgggtctcgccgtagaaaatagctccttccgaaaccgtacagcagagcatttcctccaggcacatggcctgggcgcacagctgcagctcgtcggcccgatgaggcttgggcgagccccgcttgtactcaaccggaaaaggaacccacagcccctcttctccccgaagggagatgccgccgggatctgcacgaaactccaccacatcgcattttccggagatccccaaagcagcggatgccacagacaatccccgcaggatcagtatatccccccggcgttcccgggcctgttcatcgtgagcccggcgatggagcagatctccctccactgtgcgcagattttccctccactgctgctcaatatgaatgagtgcccactgccttcggcaaaaggcaaaatgctgcaggccggacagctggaggaagtcctcctcccgatagatcaccccatgcgctgacaggtgatgccgtcaggcagcgaggtctcgtccaccgaaacggtgtaatcctgataggaacgggcaggcgccgtattatccgggtccttccggccgactttcactgcatcaaagagcttccaggccggggcgcagcccaactcgctgtcatgcttgaaaacaatcagctcccgcacggccattttaccccgggctgcggagtggtcatgctcaaacatattgaggatggcctcccacagcagagacaggtcctcttccgaaaaaccggtggttttgcgggccagattggcggaaatataaccttcacagcggtagaggccatagggaacgatgtacttccggcccatttctgttcccttcttttcagcatccgcttcggtggtaatggccacacgagtgatagtgacctcctgaggcaccaccggctctatgctgcgggcaaaacccagctgcaccggcccccgcacctggccgcagttcaaggcggccttgacaaaagtggtcatcacggcgccgaaagtgcgaatatcataaaaattcttacacatccagtcccggatcttccggtccagatcggggtcggccttctttttttccttcacatttttctctgtgatatccagttcggcataagactctccgtcactgcggttcaaaggcaccccgtccttcacatagatgcgccagccggtggcctcttccttcaccgtctccacatagttgcggatcttccgcttgagacacacatccgtcacgatgcccaggccggtttccgggtccacccggggcatattgccggcgtcgggatcgccattggggttgccgttttccacatcgaaaagaatgacaaattcatagcggttcttaataggctcagacatattgcttttcctcctttttttcaaaacggctctgggtctggtggtaatagcccagctggaaagaaccctgctggggcagattcaggcgggaaggatatctttctcccagtttggaaagcaagcctgtgatttgcttatcgtaataagtgcgcaggccgccatccagctttttcaggtgcttctgggccagattcaccagcaccggaaacaccacggccggcgtggccgaagcggaattgaaatacttgtccttgatggtggtattgatgccgggggtggcgctggactgaacggcttccagcacggaaaacagccgccccaggttgtagggaacattggtgctgtccggattgagtgacacagtcaaaacctcctttggtacatcgggatgtgtatttttcagataatatgctttgagaatggccgcccggcctcgggtcacgctgtgttctgcccggatgcgcagggccacaccattgagcaaggtggccggataacgggtatcggtgagaacagagcgaagcacctcgccagccatgttgggggccggggtcttgtcccggctgttctgattgaccgtctcgtccagcagtttccacatgggaatggtgtcaaatttgtcataggcgggctttacaatttccagccgctgctggtgggcctgggcgttgcggagaaaggctccaaagctgttgcgcaggaaaaagcgtaccgaaagacgggctgcattgggagaaatccccagaatatagaaatccatatccgggtccagccgtgctccgtccagttccaccgcccttccactgcacaggcctttcagtgcgctttgcagatccgacaatgtataggccggctcctgtccgaagaacatccagcccatcatattctgatagacatctccgccgcatctggcccagcagaccacagtggtatcccccatccggtaggcatgctcccggtccgagagaaggtggttcaaggcggtggtataggcaaaagcggcgtatttgctggtgggagcattgtaattctgctcttttccataggagcaaaaagccggagcgttgaaggataccaaagcagctccactggactgagccccatacacatttttcacagaaggatgggtgctctccaccgttccatgttctcctgtgaccaggcaaatcatctgcggcccatccccttcggcccgatagtgatcgtcccatgcccgccggaccagcgcatcctcatggacaaaggcgccgtcatgccggaacaccagattgcctcccgccataagctcctcccagcagtcggccagtgcgggatgaccggcggcctgttccggctgccatgtgcggaaaaaggccagcaccgcttgggcagccgggctgtctaccccatccagcagctcctcatgaagagccttgcacgcctggaaacattccagggtccgctggggctttcccttgttgtccacgcccaacagatagcttgcgttgtcacaaagaaaattgggaacgatccccacggtgcgtttcaccggcgcaggcagcctcatgatctgagggcgtagcacggtctttttccctttcttctgctctgtctgcagggaaaccacctgttccagcgctccctctgggccgatgcacaaagcataggaaactttggcctctccccagccaaggggggagagctgaccgctgttttccagcgtgcggtaatattccgtcagcgcctgcaagatcatcgccgcacctcctcgctatcccagggcggaacctccagtacaccatcccggagaatcccccggaaaaagaggggggtgatattctccggatcggtataatccatgtcatagagcatccaccccaggtcccgctctcccttcagttcctccgggacatccgggacaccttcccacaggcggaactgagcggaaaactcccggcagccgaagtagggctgatgatagaactgtccttttcggatccgccgtttgacgatgtcctggaattttcccgggttgtcccccggcgccgcctgctccgtcatttcgaaatgggcctcgatcacataccgcacatcccgcagcagcaaggcagcccgctgctggatatcatccgaagtgctgagatacagctctcctttcccacgctccatcaccgtacgagcagtgcgggcgggaatggtggatttcacctcattgcgccgcagattggtaaagcggatgggagcacagacatgaatgcgatcaatagaccaatgtattcccgggtgccaataaatggcctcgatcaatcctcgggcggtcgaaggggtcatcacatcatagctgacccgctccaccttcatctccggccgggtaaacagggcataattcccccagacttccagcttgatgggcatatgcgtcactcctttctgattttcgttctggtctgatttcaatatatcacacagccatacgcgagtcaatgtatcttttctaattcaatgaaaaagcataatccaatttgccaacaaagacggttttatgctatactaaaaaatgtcgctgaaatgcgtggattgaaatattgatttagaaaagattgggccaggaccgtggggaagcgtttacgcttccccacggtcttttaaataaacaatcccttcccgctgtcagcctctagagataggccggtgtcctcccggtacagatccggatttcgcagaatggctgcgccgttttccagaacctccagatcccccgctgcctccagtgcagcaaagtgcttttcataaacagataccccatactgtcccaacatccgcagcaactttcgccctccctcaccggcgcgcagccgttccagcagctctgcgccttctttccacgggacatacaccgtccgggtggggctgtcgatgagatgaaacttctggtccaccacacggaaggggaaaaactgggattggataagggacaggattccttctttatcctgggcctctctccccttcagatccagtaattcagaaaaataatcgtggatggcctcctgagaggtcatatcgtcatggtgggacatggccgccttccctgcgccaatggccacagaaaaaagcggcggcgttttcccctccccctcaaagatgtaaaccacactctcctccaaaggtcgccggccttcccggttgcaccgtccggcggcctgcaaaacagaatccagcccagcctgctcccgaaacaccgtggggaagtccacatccacaccggcctcaatgagagaagtggacaccacccggcagcaaagcccctctttcagacggcgccttatctccctgagctgctccttccgatgccggggacacatcagcgtggacagatggaagctgccttccccatccagccgttcgaatacctcctgggccgcctttctggtattgacaatgcacaggacctggctgtgggtgttgagctgtgcagccagctcatcccaggtcaaagagcccaccttctgaaaccgcacccggcggaacacctcccattgacaggtatccggcgggcacagctcccgcatgggaagctgggggagaaattcctggaatatcttttccagggccggctgtgtggctgtacagaaaacagcggagacaccgtaatggtccaccaactgggaaatagcccaaatgcagggccgcagataaggaacaggcagcatttggccctcgtcaaggatcaccacgctatccgcgatgttgtggagcttgcgacactgagaagagcggcaggcatacagcgattcaaaaaactgcaccgccgttgtcaccactaccggaatatcccagttttccgtggccttggccaggcggatggtatggggattggcttcctccagatcatagagcacattggaatggtgctccaatacattctcctcccccaggatctcccggaacacttccgccgtctgttcaatgatggaggtataggggatgacatagatcacccgacgcagaccgtgcttttttgcgtgagccaaagcaaaggcaagagatgccacggtttttcctccgcctgttggcacagtgagggaaaacagtcccggcgcctgtgcctctccttcttccatgcaccgcttcagaattttacagcgctgggcattcagctctccgcggggtggaaaccagccggatatgtactcctgaagcctgtcccacagctgctttatggtggttgtgctattttctcttccctgcccctccataaaggcctcggtatccaggaaatcggcatccaccagacaggaatagagcatcctgataaaaaacatcagctcgagccccgattgtttccggagaaaatccggaacgcctgcctggggccaggtcacctcctgctcccaggccccgtagggttccaggctcccggcccgtttgatgcgcccccacaaagtggcctgatctccgctgtccgtctggctgccgccgtcgggcaggccaccgtggtgcccggccacggcgaaggaaacgagaatctgcctgcgctgccagcattccaccgctccggctgtggagtgatccacctgaatgggagccccatgtaaatgtttctgaaatgcctgggaatactttccgatatcatgggtcattccggcaagaaaggcctgttcatcaccaccaaacggcctggcaaagctttgggctaaagcagctgtacctcgcaaatgctccaaaacagactgtgtctccccctggtctgaaatgtgagccagataagaagattccatgttcctccccctttgttttgtatccatattttgattattgcagaagaagagtacaataaaacggactatctattccaatttcttcaccccgccgcgtattttggattattttatacgcccagagaaactgtaaatatatgcaaacaacttaaatccagtatatcatgtgccatcctcagatacaatatttccctttttagcacaaaggggggaggtacatcatgtaccccccc

SEQ ID NO: 4156 - DNA, 2357 bp, Unknown
  16S sequences of unknown bacteria
acttattgacccgcaaaacaccgaaaagtagccatttttcgtagaaaaatgagcgaatttgaggtgttttaggattgcgagagcatgaaatgcgaagcaatccgtgtatcattgggggcaaaataccttttgacccgccaaacatgagaaagtagcgatttacgtagtaaatcagcggatttcgaatgtttgcagaattgcgggagctgcttcgcagcggagcaattcgtaggcatcagttggggtcaaaaggtctttttgacccatatgatacaaagaagtcttattctacactgataatatagtaataaatcggctggccaccgtaattcagctctacatcacagtccggaaactcctcttcgaccttggaccggagtacctcagcctcttcttcctttatatcctcgccatagtagatgctgatcagctcagactcctcgtcaatcatctcccttaaggtatcgagtgcgaccggatccacatcagatccgacagccagaattgcatggtctcccacgcccatgatatcccctgcatgaatcgtcttgtcatcaatatgcgtatcgcgaaccgcatacgtcagctgtccggtcctgacatggcgaatctcctcgctcattgcctcttcattttctgccgcgctcttctccggaacgtaattgatcactgccgtgatgccctgcgggatcgtcttcgtcggaatcacaataatttccttgtcttcggtcagatcgcgcgcctggttcgcagccataataatatttttattgttcgggagaataaaaatcgtatcggcgttcacctttgcgatcgcgttcagcatatcctccgtgctcggattcatcgtctgaccaccctcgatcagataatccacacccagatccttgaaaatctcggcaattcccgctccgatggatacagagataaagccgaccggcttgcggttttgctgctgtgcttcccgttcagccttctcctttgctgccttctgctctgcttccttcttctctgcttctttaaaaagcttctcctggtgctcctcgcgcatattgtcaatcttcatacgggtcagtgaaccgtaagtcagcgccttctgaatcgcaagtccgggatcattcgtatgcacatgtaccttcacaataccgtcatcggaaacgaccacaatcgaatcgccgattgactccagatatgccttgaacgccagctcagtctcctctgtatactccttctcaagaaggataatgaattccgtgcaatagccatagcggatgtctgccggaacctgctccttcaattctgcgtccggctttgtctcgccacctgccggagtgatctcagagtcatagtccacttccttgccgaggaatgcatcaaatgcacccttcataacctgcagaagcccctgtccgccagaatccacgacacctgcttccttcagcaccgggagcatctccggtgtctgattgagcacttcctcactgcggcggatcactgcatcgatcaggctctccagatcaatatccggattctcctccagaagctcaaccgcacgctccgcaccgccgcgggctaccgtaaggatcgtcccttccttcggcttcataacagccttataagcggtctcaaccgccttctgaaatgccgctgcgagcgtcgccgcattgatctcggtctcagtcttgatgaccttcgtaaatccgcgcagaagctgggagagaataacgccggaatttccgcgcgcaccgcgcagagaaccggaagacaccgccttggcaaatgtctccatcgtaatattctccatgcctgctacttctttcgccgcagacataatggtgagcgtcatatttgtaccggtatctccgtccggcaccgggaacacattcagttcattgatccactctttttttgattccagattctttgctcctgcaagaaacatcttcgcgcacagggatgcatcgatcgtatttattttcactggtagctcctccttaatcaatcacccgcacgccttcgacgtacatatttatcttttccacttccataccggtaaattcctctacccggtactttacattttcgaacagattgtctgctactgcggaaatgcttactccgtaggatacgattacgtggaaatcgatggtgattttattgtcctcaatcttcacactgaggccacgctccaggctgtctcttttgagaagccgcaccagtccgtccttcatgctgacaattgccatgccgacaattccgaagcattctactgccacgctgcctgcataagtcgcgatcacattcggatcaattacaattgagccaagctcattgctcatacgtcctttcatagatca

SEQ ID NO: 4157 - DNA, 1665 bp, Unknown
  16S sequences of unknown bacteria
gtacttgagggcgttgtcgcagaggttgaatcccgtctcggtcagcagacggcggacgccagggaccgtaacggcctcgccggtgacggtcatggtgatctggcgctgctgcgcggcgctctccagcgacttgaccgtgtcggtgcagagggagagcagctccaccggctcggtcagtactacgcccgcgcgatccacgacaacttcggccttgatttcgacgtggtcttcgggcccgcatacaagggcatcccgctttcggtggtcacgacgatagccctgcacgagctctacggcaaggaggcgcgctactgctccaaccgcaaggaagtcaaggaccacggcgacaccggcatcttgctgggcagcagcctcacagatggcgaccgtgtggtcatggtcgaagacgtcaccacctccggcaagtccatcgacgagacctacccgatcatcaccggccaggcagatatcgaggtcgtcggcctcatggtctcgctcaaccgcatggaagtcgggcgcgagggcgtgaaggccgccatcgacgaggtgagcgaccgctacggattccccaccgcctcgatcgtcaacatgcgcgaggtgaccgagcacctctacaaccgcgaggttgccgggcgcgtcgtgatcgacgacgagctcaaggccgccatcgacgcctactacgagacctatggggcaaaggcctaagaaaagctccgagccgctgttctacttcaggtcccggtctttcgaacgcaagatgagcgccgagatgtagaccatgagcgccgtgccgaagatgaacccggcaaaccccagcgcggggataccgagaatctgcggctcgagctcggtcgtgcacaacacgcacgacccgatgatcatcgcggctgcgagcagcgcgaaagcgaagttgttgatcgactctctgagcccgctcacgactttcttgttcacgtccatgttcatgccgagcctgacctgccccttctggagcatgtcgagcgtgtccatggccttgctcggcagcgccgccatcgcctcgacgctctcgacactcgagccgacgaccttgcgcgcgcggcgtgcgatcttctcgggcgtgaacgagtcggcggcatattttgccagcacctgcatgatgttgagcttgtcggagacgagcttgatggttccctcgagggtcacgagcccgcggcccatggttacgaggaagggcgcaagctcgaaaccactcttgcgcatgctctcggcaagctcgtcgaacacggcgcccgtgtcgaagctctccaggtcgacgtcgatgacctcggagatgatgttctcgcaggcgccgagcagcgcaccgtggtcgatgggccccgtcggagtcgccaccttgagcaggctccgcttgaggccgtaggcatcgcccttgacgagcgactcgatgatctctcccagcacctcgcgctcgcggccgttcatctcgcccatcatgccgaagtcaatccagcgtacaccgtgctcgggggtgatgaggatgttgcccgcatgcgggtcagcgtggaagaagccgtcttccatcagctgctgcatgtagttgttggcgatgaggtaggcaagctggtcgcgctcctcctcgctcagccccttgacggcgctcggctcgcccccgcgccggtcggg

SEQ ID NO: 4158 - DNA, 2266 bp, Unknown
  16S sequences of unknown bacteria
taggcattcaggggcactcccgccgcctccagcagcaggggacgcagaaagcccgggcggataatatgtccacttgttctccgtctttatgaattaccaatttttcaatttcttcggtttttacaccgcctatcgcctgagaaaaggtcaacggacggaaaacataggcaatgccgccgaaaatcacggccgcagccacaacgcagcaaatcagtaatttggttgattttttcatattatcacctcataatctcacatattagacgccgcactttaagcagcaaaacattgctttcggaaaatttaatctcgccaaaaaatattttatgcttccgccgagcctcctttcaagctaataatacattagactttcttgtttgtcaataatttctatcagttttgcaaataaattgtcatcttgatttgttattttagacatttatgctcataagtccgtggcgattgcagaagaaataaagcttgcccctgcccctttttcgaaaccttgcagacggcgctccttcggggtaaagcttggccgtttcaaagcggtcgtgagtgacataggccaaaaaggaaatatagtgttccttggtcatggggtgatttaccgtcacaaaaatctcgtcctcgacattttccacggtgacgacgtggcagtcgtcgggctgttcggccgattgtcggggcagctccaccccgcagcagcacaccgacgcctcgccgaatgttctgatgacatttccgcaaagaggacaaacataaatttcgcttttgagcatattggccgaacggtttgcgtttaccgcctcgttgcccgacaaaagctcggccaccgaaaccgaaagggctgccgccagcggttcgatgagggaaatgtcgggaagtcccctgcccgtttcccatttcgatactgccttgccggtgacgcagattttttcggcaagctcgttttgggtcagctccgccttttctctcagtcttttgaccgtttttcccgtgatgtatgaatccataataattctcctttctttgtcggattataaatccgttttgacggaaaatcaatccacgcaccgtggaacaaaagcccgcattaaaaaatgcaggcttttatcaattgttaaaaggccggttttgctacttgagcttatatttttccgacctgtcgggatttcggtattcgtgcttttcgtaatagcccaaaagctcgccgccttcgtcgcgcagcgccaccatataaacatccttgttttgcttttcgttgtgaaaggtgaaaacacggtttaaatcgggattttgttcaaaggcgtttacgacctcttttatggcttcgaccgagcggctgttatggcagtcgaaaatgctctttgacacaaggctttgtccgcctcttttttcataattttttaccgcggcgggattcatataaataatgttgtgctctttgtcgcaaatcaccaccgaggccctgtcctcgtcgattatggccttgaaaaatttctcaagcttcattttaccgtctccttaagccgattttttctgtcgttctttgtgttataaaggaacattgcaacgcctgctccgcaaataagcaggtagcccaaaacgcttaatgcgtcgggaacctgaccgaaaatgaagaatccaagcagagcggcaaaaatcacctgggtataatcatacaccgaaatttccttggcgggagcgtagagatatgccttggttatgccaagctgaccgacgcaggccgaacagcccgctcctataagaaaggcaacctgtttaaaggtcatgggctcgaaatcggcgattataaagggaatgcacacaacgcaggaaaaaagcgaaaaccaaaaaataattctcgagctgttttctccgttggctccgagacggcgcacaaaggtgtatgcgataccggctcccattcctccgcaaagccccacaagagacggaatcagctgagcgtttgcaaatcccggttttattatgagaacgctgccgagcattgcgcaaagcacgccgagaatttgaacgaaattaggcttttccttaagcagaaagaaggaaaaaacaatggcaaagaagggggacagcttgttaagcatgttggcgtcggcaagcacaaggtgatcgatggcatagaaattggccacaagacccaccgtcccgaaaaacgagcggcaaaaaagaaaggggatattctgcctttggggcctgcagtttgacggtgagtttacctgcgagagagtcggagatatgg

SEQ ID NO: 4159 - DNA, 2909 bp, Unknown
  16S sequences of unknown bacteria
tgccgccaaagcgttagctgtgaattatgcggtggtgccttaacagaggaaggaatttttatatgtcaagctctactaaaaaacaaaaccgcatacttctcatttcactgacagccattctcgcagccacagccgtactcatcgcagtcacgggaagcgcaaacaagaaaaaagccgaaactctccccgcggaaaccgtagaaaccgtcgccgagacaaagaaaacctcgacagagacaaaaaaggaaaccgaaaaagctcccaaaaacagctccaccgaggaagttgaagaaaaagtcacgggaaagaccgtagcaaaggaagaaaccaaagaaaccgaagagaaaaaggacgccgaggtagccgtggtcattgacgatgttctgccggaattttcttcaccggtgaacggaatcgcgataaaggattattccgacaatgttcccgttttctcgtacacgatggaggattacagggttcacaacggcgttgactttgccgcgtctgtcggaactcccgtatgcgctgccgccgacggtactgtttccgagataaacgacgacccgatgatgggtgtatgcgtatctctgactcacgcgggcggagctgtcacaaagtacaagggtctctcagaggaatccatgagcatggttaacgtcggagacaatgttgtacgcggacaggctatcggttctgccggagacactgctctcatcgaaagcgcggaggaaaaccacgtccacttcgagcttacggtaaacggagaagcgcagaatcccgcagattattttaaggtaacaagaatatccgacctcaccgaggactgacgcaatacaaacaaaaagagctgcatgttcggaaaaactccgtagcaggcagctctgttttattttgttttatcagtcttcgagagcgtcttttcttgaaaggttgaatcttcccttttcgtcaacgcctaggaacttgaccttgattgtatctccgacattgcatacatcttcgaccttttcggtacgcttcttgtcgagcttggagatgtgaaccatgccttccttcttaggagcaaattcaacgaacgcgccaatcggaatgattctggttacaacgccttcgtaaatttcacctacaacaggctcaaagattatcgcttcaatcattgcacgagcagcttcaagagaagtcttgtccacaccggaaatgaatacggagccgtcctcttcgatatcgacctttgcgcctgtatctgcaacgatctgcttgataacgcttccctgcttaccgataacgtcggcgatcttatcaacgggaaccttcattgttatcatcttaggagcatattcggaaacctccggtctgggtgcgggaattgccttgagtattacttcatcaatgatgtagtcgcgtcccttgtgggtaactgcgagagcttccttgattatctccggcgtaagaccgtctatcttgaggtccatctgaatggaggtgatacccttgtgagttccggctaccttgaagtccatgtctccgtagaagtcttcaagaccctgaatgtctatcatcgtcatccatctgtcgccttcggtgataagaccgcaggaaattccggctacgggagcctttatcggcacgcctgcatccatgagagcaagtgtagagccgcatacggacgcctgtgatgtagaaccgtttgaggaaataacctcggatacgcagcggatagcatacgggaattcttcaactgaggggagtacgggaacgagagaacgttctgcaagcgcgccatgacctatctcacgtctgccgggacttcttacagccttagcttcaccggtagagtagccgggcatattatagtggtgcatatagcgctttgtctcttcctcggagataccgtcgagcatctgaacgtcggagattgagccgagagttgctacggtgagaacctgagtctgtccgcgagtaaacatacctgagccgtggtcgcggttgaataggtgtacttctgcggcgagaggacgaatctgatccattcttctgccgtcaacacgcttctgctcatcgaggagccagcgtcttacaatcttcttctgaaccttatagagaacctcgtcgagcaccttgcggttttcttcggtgttttccttatcgaactgttcgtaaaccgcgtcgtaaatgggagccattcttgcgtcgcgaacgttcttgtcgtcggtatcgagagcaacctttacgtcctctgcgcagaaatcgtaaaccgcgtcgagaagctccttcggaatttcagcggagggataagagaacttcggcttgcctatctgagcctgaatgtcttcgataaacgcgcagagcttctttatttcttcgtgagcgagcatgatggcttcaaacatcttgtcgtcggaaacctcagctgcgcctgcctcaatcattacgacctttttctttgttccggctacggtaagctcgagggaggaacgctctctctgctcggcagtcgggttgataataagtccttcttcctcggtaagacctacgaaaacgccgcctataggaccgttccacggaatatcggagatggacagagcgatggatgcgccgaccatagccgcaatttcgggggaagcgtcatggtctacggcaagcacgagaagggagaggacaacgtcgtttctcagatccttcgggaagagcggacggataggtctgtcgataacacgggaggtaaggatagctttttcgctcggtcttccttctctcttgaggtaagagccggggattcttccgacagcgtaaagtctttcctcaaagtctatagaaagggggagaaagtcaatgccgtcgcgaggtctttcggaagccgtggcacagcagagtacagcggtatcgccgtatcttacaagaacagaacc

SEQ ID NO: 4160 - DNA, 22533 bp, Unknown
  16S sequences of unknown bacteria
ttggcgcgtctaactcatcactgaagtaacgagaatgcgacgcgcagttattcaacggtaatgccgctccttctgccgctccagcccgtgcatccagtccgccctgtgatagtagataaaaaacaggatccccgacagcgtccatgtgatcggatacgcccagaagacgacatctataatcggattgagatgcaccgcaagcgacacgtacggcacacgcagcagacaccagcacagcagcatcacaaacatcggtacagacgatttgcctgccccgcgcatgattcctgccgtacagtgtgagtaggccatcaggaaataaaacggcgtgacgatgtgtgcctgctttgtcccgtaggcgatgacctccggatcattattaaaaaaggagatcagcaccggcatcgtcacatacagtacaagaccgatcagctcggtcagggtcatgccgcacagaacaccgaaccgcgcaccttttctgacacggtcgtacttccccgcaccgaggttctggctgatgaatgtcgtcagagccatcgagaagcaggtgaccggaagcgccgcaaatccttccactttcgaatatgcgccgcagcccgccatcgcaatttttccgaaactgttaatatttgactgaataaatacatttgcgatcgagattacggaattctggattccggccggcagaccgttcgtgatgatctgacgaagcataaacggattcagctgaatgcaccgaagcgatacacggtattcctccgggctttttctcgtcaggcggtacagacagagcgccgcgctgacaaactgtgaaatcgccgttgcggcagccgccgaggcaacgccgaaatggaacacaccgataaacaccagatccagcacgatatttaccactgacgaaaagatcagataatacagcgggtggcggctgtcaccaaccgactgcagaattccgacgaaattgttgtagagcacaaagccgagcgagccgaggaaatagatgcggaagtacgcggtggattccggcagtacctcgatcggtgtcttcatccacacgagcatgcgcggtgccagcagaagccctgcgaccatcagcgccagtccgcacagaataccgaatcctaccgtcgtgtgaatcgccttctgcagctcttttatttcccgtgcgccgtagtaccttgcgatcaccacaccagcgccgactgcaagtccgttaaaaaaaccgaccagcagaaagatcaggctgccagacgaactgaccgccgccagggcattgctcccaagcagatttccgacaatcagagagtccgccgtattataaaactgctggaacagattgcccagaaacagcggaaatgcaaacgcaagcatttttttccagatggaaccctctgtgagcagtgtttttgaatttgtttctgacatgttttttctttttcccccacctatctcagcagccgcttccggctcacacactcttcccgtttttcaatccactcatgcagccgcggatagagacgctctgcctcctcgtagccatgccagtagaaatcctccagcttctccagatcgcgctccgtacggctgacacatgtggcggtcggacggatcacaaataccattccctttttctccagacgctcgatcagatccagcgtacggttgtatgcatgactgcgctgcgccagtgcttttatgaggttgggatattttcgataccagatttttgccatccggatgaccgcatcggtcttttcttctttataatagccttttcttctggtcagaataataatattgtgatcgaagccatcggcaatcgccttacgcaccggaattgaatccgcgatgccgccgtccagcatcggaactccgtccaagtctaccattggagcaccgaacggaaggctggacgatgcccggcaggcgttcatcagccgcgctttgtcgcggtattcctcgatgaattctgcttttccggtgatacagttcgtgaccgccagaaggcatctggtcggggattttacgtatgtctcaaaatcaaacggatacagatgattcgggaattcatcgaagatcagatccatattcatgaaatacttcgtatgcatcagcgtcttaacaccatacagctcattgtcgagctgtgcatccagcatacactccttggtccgaaggatctgattggaaacgtaatcaactgcattgcaggctccggcagatactccgatcacatacggcagttccacctttttttccatcagataatccagcacgccacttgtaaaaatacctctctggccgccgccctccagaatcattcctgcttttttcatatccctgtcccgcctttctatcatcagagcggattctgtattccgctttgcagcacagcggtacaaccacaccgctgatttatttctaccttgtttttgcctgtttttctcagtactcaaacagtatagcacaaaaaaattttaatttctatcccggagcatcagagaaagaaacatcctccgtttttatccggaggatgctctggttctgttttccgtatattcggctgtctttattcggctgcttctgtggacgcctcagtggctgcttctgtagctgcctcggttccatcttccgcagcttctgtctgcgcctcggtaccggcttctgttcctgcttctgcagtttcttcctctgccgcctctgtggatgcttccgtttccgttgtctcttctaccgttgtgttctcttccagaaaatccagcaccttatcctgcagtgcgctgatgcggatcgtatcctcatcatacgctgctttcagatcatccacggaatcatatccgtacgtatctgcatacctctggcaagctgcttcgtaatcatcatcgctgacctcaatgccttctttttctgcgatcgctttcaggtacatctctgcatccaggttctgctttactacattcagtgcttcttcattgaactgctcctcggtcattccgaaatagttctgcagaagatctgcatattccatatcatactgggatgccatctgtttgtatgcgttctgcatatttgtgaggccataatccagcatctcctgcggataatccctgaccgtggagtttgcgctgatctgagagagaatatccgacttgatctcgctgtcacgggaatcctctttgttctttatcagcgtttctttcacagattccttgtatgcgtccacatccgtgtactcaccgtctgtgatggtgcttaccagatccgaagtcagttctttcatacgctttacggaattgacggttaccgtaaatacagtctcttttcctgccagttcctcagacggataggattccgggaaggtcagtgtcagatctacggtatcaccgatcttgacacctaccaggccatcctcaaatccatcgataaatgtgccggaaccgatctccagatcgtatccctttgcggtgccgccgtcaaatgcctctccgtccagcttgccgacataatcgatatttgcggtgtcgccctcttctacggtaccttcggtcacatcttccatcgcatcgctgcctgcgttggcactgatctgagcaagaatttcttcatctgtcacttcaatcggagcgatctttactgtcagtcccttatactcgcccagttccacataatccgatgctgtataatccggacgcggcaccttctcatatgtctcctcggtgtccgcttcagtactgttctccgctgcctccgtcgctgcttcggctgctgcctctgtatctgctgcctccgtcgctgcttcagtcactgcctctgtctcttccgccatcacagccggtgcaccagcagatgcagttgccaggcatacggtacatgccagaatcgccataagatttctttttttcatagttaagccctctctttatctttgatctattatccgttcggtagctgtttttatcaaatctacgcgatatctacgccattatagcatatccgtttttacttttgcaccgggttctctcttttttaagaaaaatcacagaatttacacagaactgaattttgcaaatctgctcatttacacttcttcgttcttacgaacatctgtacattcgcagaagattctgttatactcttcttacggaaagtcagaacacaaaaaaggcggcctatcctcttcggagggacagccctccagacgaaagaaaggagggatgccgatgtacgttacatacactgatctgattcagtttagtatcttcatcgttgctctcgttggattgtgctacacgatcttcggagcaaaaaaatagccgcccactaccgccatagtgaacggctgatgctgtagagcatcaaagcatttcatttttatcggagggtaggccgtatgtctctggctttccctttttgtatctgtagtatactacagacgcttcttaaattcaagtcttttgcttccttaaattacgattatcatcgaaatacacgccggtcccagccgttttgcattgcttttcattttcttttcctcttacagcgcccgcatccagacgatcatctcgccctcgccgcggttgttccagtacggatacggaacagcggtaaattccacgtcctcaagctccggcttgcgcagtccgtaaaggccgcccttccaggaggattccacgccgcgttttccttttcctttgatgaccacacagccgccaaacagctctgagcgctcctctccaagcggtgcgtcggtatccgggaaaatccacggaagattggaaccgttgtcgcactcctccaggcagtatacgagcggtccgcgcatgatcgctgcctttccggcatcggcacgcacctgcggatttgcataaacgtagtgcgccggtgtctcaaatgcaacctcgacgcggcagtccttctccacgtgcagcttccagtaaccgttttccgtgcggcttccgactgcttctccaccgaccgtcatgtgataattttctgcgtaatccggcacacgcacaagcagatccattccactctccggcacattcgaaaatgcaaatcgaacgctcggctcccacgggaaacgggtttccatgcagacctgcgttgccggtccgtccccaaaagcgatctccgttgtgtttgatacaaaaagattaacatacagttcacgtttcttatcatccaccgagtaaatatactggccaagcgatgccagcgtccgcgcgatattcggcgggcagcacgctacgccgaaccatttctgacggatcggtttgacatgctttttggaagtgcccggcatgcaggcaggcggccatacctccagcggatttacatagaagaagctctttccgtcaagcgcaatacccgcaaggaccgtattgtaaagtgcccgctccacaacgtccgcatagcgggcttcctttgtgatctgattcatccgcatgccgaacatggcaagtccgattgatgcacagctctccgaataattgtactcattcggcaggtcgtaatcgaccgtaaaacgctccaggtgcccagaggagccgataccaccggttaaatacatgcgcttctgtgtgatattctcccacagcgtctcgcaggcttttttcaggccgtcatcgtcgtacgcttccgccagatctgccatcgcgctgtagaggtaaacggcacgcactgcatggccttctgccgtcttcagttcgcgcaccggacggtctgactgtgaataggccggcgtataatccacaaactccggaaagatcatcttataatccggccggcccatttccttcataaaataattttctccgacaccgcgtgcatcgatgaaatattttgccagatcaaggtatttctggttgccggtcacacggtacagcttcacaagtccgatctcgacctcttcatgccccggataaccgtgaatttttccttcctctgtgccaaaggtatcggcgatcagatcagcaaaacggcacatgcagtccaggaatttccgttttccggtgccttcataataagcaaccgccgcctccatcagatgtccggctgtataaagctcgtggccttcacacaggtcgctccaccgtctgtctggttccttgatcgtaaaatacgtgttgatgtaaccatcctcacactgagcctccgcaatcaggtcaatgacctcatccgccgtcttctcaagcgcctcgtccggataacatgcaagcgaaaatccgactgcttccagccattttgccacgtcagtatcctgaaatactgcaccgtagaattcgcccgcgcttctgcctgccgcaatgcggaagttctccaggcaatggctcgactccgcatccggaatccggtcattcattgcctcccactgatacggaatgatcgcatttcttaccaggtccacgtgtttcgaccagaacggatcactgatctgaatggtctttaagtcaagggaatgtaaacgcataagtttgtctccttttctttcgtttctgcagcctccggctgctgttttcgcatatccgacaaaatttgtgacagcattttctgtacgcctgacagacttcctgcggagcttctgccagtaaaacggacattcgcaatccgcttcgcgacctgtgttcattttcacgcagtttcagacactgtccacactttccacgaaattgccggaacttatccacagtgtaccatagatttctcctctttccaagtatgagactgtctccccccaaagatcaaaatagccctgatcccttctgagccaaagcagatattcgcaatccgcttcgcgccttccttccctccccgatttttccgtcacttactgcttgcactttccatggaacaatgctaaaatatggtttgaattctgtttgtgggagggtacatatgtcgacatttctcaaggtattactggttatcctgattattcttgtcatcgcactcgttgtcctctacttcgttggccggaagatgcagaaaaagcagatggcacagcaggaacagatggaggctgcaaagcagaccgtcagtatgctgatcatcgataaaaaacgaatgcccatcaaggaagcgggacttccgcagatggtcatcgatcagacgccaaagcttatgcgccgttccaagcttccgattgtaaaggcgaaagttggaccgagaatcatgacactcgttgcagacgcagcgatcttcgacaccattccggtgaaaaaagaagtcaaagccgttgtcagcggtatttacatcatggaagtacgcggcgtgcgcggaccgctcgaagctccgccaaagaaaaaatccatgatgcagaagctccgtgcaaagctctctaaagcccagaaagagcttgaggccgaagaatcaaaatcaaaaaatcagaaggcaaagaaaaaaagtaaataaaccagtataaaaaaggctccgtggggattccacgaagtcttttctttttctctttctgcacactttacatcagccggaacagtccgctgtcttttgccataatccggatatggatcgcggcatccgatacgtgttcataattcatttccagaatgtaatcgatattgacatcgatcagatcttcgctttcctgcacatccattccagttacttcgatgcccgccagcatattcccgtacggtgtgccataccagctcatattttttttgccattttcaaacaccatgctggtcttcatcggtcccgtcttgtgaatctccatcgcgctatctgagagtttgaggcggtttttgatgatgtccccggtctcttctgctacctcatcgtagagcacaaagtgctttccgttttttttgtaatattttcctgcagaggtgatctccaccttatcctctgcatctttttccccgtttactgcatgaagtcccgtcacggtaatcagtacgtcttccgtcataattttttcagtactcctctatgttgattttccgcgcacgctttacgtcatacggcaggattgagttcgcaaactctccgaatttctccgccgcgtcactgacataaaactgatgcatctcgtcttttttattgttctctcctgtgttgatcagctgttcctgctccagaagccttcgcagctcctgagccgtctcatacgccgggttgacaagcgtcacctgatcgcctgcgattttgccgacgagcgagcggatcagcggataatgtgtacagccaagtacaagcgtgtcgatatccttgcgcagcaactcgcttaaataccgccttgcgacctcctctgtcacgctgtccttcagccagccctcctcgacaagcggcacgaaaagcggacatgcctttccaaacacgacgatctccggatcctgctgctgaataaaacggtcgtatgtgcggctgcggatcgtgctctccgttccgattacgccgacacgtttgttgtgcgttgctttcgccgccatgtgtgcacccggtttgattactccgatgatcggaatgtccagatccgtctccaccgcgtcaagtgccagcgcactcgccgtgttgcaggcgatgacaatcgctttcacgccctgcgtctgcaggaaatgaataatctgcttcgaaaatcggattacattttcctgagatttgcttccatatggcacacgcgctgtatcgccgaaatagacgatcctttcatttggcaggttgcgcatgatctcccgcacaactgtcagtcctcccacgccggaatcaaagacaccgatcggggcatcggaaaggtgtaacgatgctgcatgcattgtgttgttgtctgtattctttatttcggatttcttttttattgctgtcatttttgtctcctgatattactatattcttagagtctctggtaaagcggatattcgcaatccgctgcgctacttgcaggatcgtaagggatcttcccgcaagcaagtccctatccattgcttattgctccgcgcaaccccgcaggggacttatctgactcggttaaaaaactgtaagccactcgcccgctcagaaaatcagcggctccccgtccacaaatgcaaagcaaaccgcttcctctttgataaactccgcgcgcccgttcgtgccttccgtgattgcctctttgagttcctgcagctgcgcctgcggcaccagcgttttcaccgtcacgatatccgtgtactcggagcctgtgatcgtaagccctctctgcccgagcagatactgcaccttgccaagcccgttgtagtccgtcctgatgccgagcagtgcgccgatctttttctcaatgatcttgcttgcacgtaatccttcctgcacggattttgagtaagcacgcaccagaccgcccgtgccgagcagtgtgccgccaaaataacgcgtcacgacgaccgctgcattgtggacttcctcaccgagcagcacgtcgagcatcggacgccccgccgttccctgcggctccccgtcgtcactgcagcgctgcagctcctggttttcacccactacaaacgccgagcagttgtgtgtcgcattccagtattttttcttcatcgccgcgataaaatccagcgcttcctcttcactttccaccgggcgcaccgtagcgataaaccgcgatttcttctcgatcagctcgccctcgccgccctcgtatactatctttatctctttcatggtttcacctgtttctgtttttgactggccgctgtcaaagcggatattccaggtccgcttcgctgcttgctcataaccgagtagctgcttcgcagcttatcaggatttgcttgtaccactcctgatacaagcaaatccccacccactgcttattgctccgcgcaaccacgcaggggacttgcctgactcggtcaaatttcattcttcatcatagcaagatttcggtgctgtggcaagcactcggcgtatgtttttgtcccgctcaggaaatactgtttttatgatcccgaattccttatgattctacaagcagcacagcggacctggaatatccgctctgaccagaaggagcctgccatgaaccacctgtctttcccgcaaaaatttcattttccgaaggttcgcagcctgcatcatcgtctgcgtcgtcttccctggcgcaaaattctgatcggcgctgccatctcgtttgggatactgtgtctgcttttccttctttttctgtggcgtctgatcgcctccgcgccctcgatcgatgcgatttccgtctccccgcaggaatctgccacttatctgtgtgatcaggagggcaacgaaatccgccgcctgacgcttgccgcttccaatcgcgatatcgtgaggcttgatgaaatctccgtttatctccagaatgccgtcgtcgccatcgaggaccggcgcttttatgagcatcacgggatcgacacaaaaggcatcctgcgtgcatttttcagcggcattacccacggctccttttcggagggtgcgagcacgatcactcagcagctcatcaaaaacagcgtctttacacagtggacacaggagaactccttttatgaccgcgtgtgccgcaaggtgcaggaacagcatctcgcgctccagcttgaaaaacggctttccaaagaagagattctggaaaattatctgaacaccgtaaacttcggctccggctgctacggtgcacaggccgctgcaaggcgatactttgcaaaggacgcctcttccctcacgctctccgaggcagctgtgctcgccgccgcgctgcagaatccttccggttatgatccggcgctgcatcccgcggcaagcagaagccgccagctcaccgttttgaattacatgcagcagcagggctacatttctgctgctgagcatcaggctgcagaaaatgatccggtctacaaccgggtccgacagacagatccggaaatggacaccggatccgtctattcttattatgaggacgcgctgattgcccaggtgcaggagattctgatgacggaaaaaggatactcgcaggaacaggccgcccgcgccgttttctgcggtggtctgcgcatttactcggcgcaggatgacgctctccaacagatctgtgaggaagaattttccaatcctgccactttccccgatgaagccggaaacgatgcgcagctgcaggcttcgctcgtcctgatcgatcagaaaaccggctgcgtacgtgccattgtcggcggccgcggcaaaaaaaacgccagtctcacgctaaatcgcgccaccgattcgctgcgtcagcccggctctacgtttaaaattcttgccgcgtacgcacctgcactggatgtctgtgacaaaacgctcgcctcctgctatgaaaatgagccgttcacttacacagacggcactccggtcggcaactgggatgacaccgattacggcggaaacgtcacaatccgcgaggcgatcgtacgctctatcaacgtcgccgcggtgcgctgtatcacggaaatctcgccgcagatcggtttttcctacgtcagacggttcggcatcacaacgcttcatgaggcggacggatcggacggcgcatccgacgtcatccagccgcttgctcttggcggcatcacggagggcgtctccaatctcgagctttgcgccgcctacgccgcgatcgcaaacggcggcatttaccgtacaccacgatttttcacgcgaattgaggaccgaaatggcaacattctcttcggtttttccgaggcagagaaccaggtgcgcgatttttctgcatcggaattcttccaggaaacgccgatacagcgcgacaacacccgtatcttaaaagacagcaccgcgtttctgctcaccgatgtgctgtgcagcgtcgtttccgacccatccggaactgcttacggcgcgatctctgccgccggtcagcccgtcgccggaaagaccggcaccacctccgactaccgtgacatctggtttgcgggcagcaccccgtattatacgtgctccgtctggggcggatatgacgatcacagtgcgctcccctcctccgcacacagctatcagaaaacgctctggagcgccgtcatgaaccgcgtccacaccggtctttcaattgctgcatttccgcagtcggactccgtcatctctgtctccatatgcaaagacagccaccttcgcgcaagcgaaaacggctgtcccgatacgtatctggaatattttgctgacggcacgcagccggaggaaacctgctctctgcatagtaccgtgctcacgccggaaaccaaacggcaaagtgagcaggccgttatttacccggagctgcttgagcagctgagtggcagcgactccagtgcagatgaccacgatgaaaattcgttgatgtctgagcacacggcacagaaaagcgatggtgccacagattcttcccttcagcaggaaacaaactccctcgaggatttgatgaagcggctctacggtaagcctgctctgccctgagtaaacagtaaagcagattgcaaatatcctctttagccttctgccgcccaccgtctgatcctgcactgatgttttttgctcttcttgtcataactgattccgaccaacagaatatttcccatatagttttggatcgaatccggatactttttgtcctgaatctgcttaatcgcagtatttgcgttctgattccatttcagttccacaacaagcgccggataatcttcccgatattccggcttcgggataaacacaaaatccgcaaagccacgccccgcaggcagttcacgtaccggtttaaaataatactgcatggcgcttaagtatgcaatcgcaagcacactgctaaatgaattttcattattataggcaatcgcagaaacataatccatatgcagcttctcaagtccttccgctaccgccgtttcttccatatcgagcgttgcatttaaaagcgcttccgactcctgccagaaggctatcatttcgttccattttttgcttctgacagcagttgtgagttcctgtctgagttcctcattcggtacaaatgctgctttccgatcctgatcgtatcccagatagccaagatgaatcagataggtaagcacatcatccttactttgcatattttgcgcatcattttgaaaaacagatgtatgcacttctgtctttgcacctgccagcatctcaataatggcagttcgaagtccgtcataattcatattaatgagtggcacaaccgtctcatatgacgcagtctccgaccagtagcttctgaattcgcctcgaagcatcagactgacaaccgctcttggattgtaaacatggtaaacgcccagatgataaccgtcgtaccatttccgaactctctcaaaatcctgatcgtacgtctcacaaagctgccttacttccgattcgataaaaccgatataaggagccagacgtcccgcgccaagcattgtaaactcatcgaaattattcagagcggactgcgttttttccttcttaatcggcagaataccggtaagatatgccagcctgatgtatttcatcggttcacttcccttaaacagccctctcaggaaatcgatatacttctcctgcacattctgactcaccgctttatctctgagcagtacatcccactcgtcaataatgatgataaatttgctgcccgtcacactgctgagcctggaaagcgcctccggaagggaattcatttcctctttcatctcttccggataacagatcttcagctcctcgattgtcttttctgtaatgtatcgaatcacctgctctggtccaccggcaggattgatacaccactggatatccagatgaatcacatcatactgattcagatgcttcctaaaatcaggcgcactgctgatctccagcccggaaaacattgcctcagaatcacagcccctgctgtaatacgcagtcagcatgtttgccgtaatcgattttccaaaacgtcttggacggctgttgcagatataaccgtccagagtatcgagcacccggtttgtgtaattcagcagaccggttttatcaacgtaaatctctgaattaagcgcaacctgaaacgccgaatgatccggatttacgaatcttcccattcttacattcccccatcaaaccgaaactccgccggatacccgcgttttgattttccggtatccagggtgcacatcttctccatgtccgcctcttccagcgtaaagtcccagacatccaggttctggcgctgacgctccggatgaacagatttcggtatgacggtcaggccgcgctgcagatgccagcgcagtacgatctgcgccggtgtcttttcgtatttcgcagccagttccagaagaagcggttcgccgagatcttttccttttccgagcggtccccacgcctccggcacaattccctccttctggcaaaatgccacagcctgcggctgctgaaaacacggattgctctcgatctgatccaccgccgggcagacatttgctttcgcaagcaatctctgcagatgcgccggctggaagttgcagacaccgatcgcccggatctttccggcttcatacagccgctccagcactttccaggattccgtcacctcgccaagcggccagtgcaggtaatacagatcaatgtaatccagtcccagtgcttcgaggctcttataaaatgtctcctcctgccgtccgccgcacatatccgtataccatatcttcgatgcaacaaacagctccttgcgcggaatcccgcaggcgcggatgcctgctccgacatcctcctcattgtgatagtacatcgctgtatcaatcctgcggtatcccgcttccactgcactggcaagcgttttttccgcctccgctccgcgcacctcccagaacccaagaccgacgcggtctatttcgattccattatttaattttatggttctgctctccatattctgttcctccgctatatccttcaatccacaatcttttaatcgaatcaggcagattccccgtctcaattacgaacatccggcactgctgctatcgttcttccggcaatttttctcacgcatttatcttgtcaaaatcttgatatgcttatctgcgcttacgccaccgctgtatcgccggacggcgctgcctccggatgatccccgtttgaattttccggatacgctccactttgctctccattatatcctggctgctccgcattctgctcaccatcctgttccggctggtttccatttccctcatccgctctgtaaccgtctcccggaagcgcactgtcagtgccgtaatccggctcttcctcttctccggtttcatactcctctgtctctgaaagctccggcataaatttttcctgccatgccgttcctttctgctgaatctccatcacaagattgagcagctgtgcctccgtcagttcgaaaaacatcttttcattttccggcgcttttaactcgcccggactggcctgcacagaaacggttccatttatagaaccggcgcctgtctcatccgctatcgtaagcccgtccactctcagatcaaaactttctcctgctttgatctctgtgaaggcagcgtcaagtccgatcattccgacttcctctccaaaattcagaacgccatcatattctcctgtttcagcattaaaacttacgttgtaaaaatcctcatcaaagttcactccatccgcatcactctgtaacagatgaagtgtatatgtttccgtattttcggtctgtttccgctcgcccgacagttccactgtgacctcattttcgtcattttcgagtttcaaagagcattcaaatccggcgttcggattctccggatctgcaaatgcaaacgaaagcttttctgtgattactccggtactgccaagatagatgtccgtcgaaccatctgcaccgcctatgatgtctgatgccgcatctgtgttttgtcctgctgtatcttcctgcatcccaccaacctcggtatggaagcccggtacgctgacccagaatgatgccgtcgggccatccggtgcgccttcttctctcagctctttttgatactcctcaaattctgccgtatcaatcgttgcttccagcgtcacattcgtcacgaaaccattttttgtgtgaaaatcaagcgtgagctcatcttccgtcgcatttttcaggcagtcaaaaaattcgtccggatctccatactctgttaccgtcgcaacgtctgaaagctgttctatcagtgtctcatactgttcctgacaaaaatccaggaagggctccgtcggcacgatcaccgagtaaatcgtttcttctccctgtttctttttctccacacgcgtggcatccgtcacttcttcccatgaatcatctccgtcatctgcagcctcttcttttttctttccgtctcctcccgcaaatgacagatcaacatcctcctcaagcggctgatctaacatctgctccagccatgaaccactatactgctgtaaaaggctgcccgagcgaatcgccagcgctccgtcataaaactgcggaatcgacactgccagctggtcttcatctgcatacagggaaagggttaaaaactttgtattttcatccgttgcggcctccagatcaaactgccatctttccgcatcctctgctgcccgcagattcatctgtagatatccatcttccgatgtcggtgcctctaccccaagcaattcccacgtttctctggaaactccgaacttcgtctgcacagaaaatccatcttcctccatattctcctgcagttcgtccagaccaagtgttttagaaagcagtgatttttccccctgctccatctgtgtctccagaatttcctccaactcttctcccggatcttccttcgcctgcgccgctgccggcacaaccaatgccgctgccgcaaaaatcgctgcctgctttacaaatccttctctttttctcataaaaatcccccttttttccgtcgaatcagccacaatatccgaccgtttttatagcaattctgcaaaataatgcatcccatccgatctgtcgggcgtgaaatactgcgtcagaaatctttgccccacccgcaaaactcttaattccagtataacatagccatacatcactgccaatctcacaattcttaatcttttctgcattccctcgcatgcagaacatatccaggcatattcttatccccccacatgcagaacatatccgggcatatttttattcccctcccccgcatacaaaacatatccgtagcatattcttattcccctcccccgcatacaaaacatatccggagcatattcttattcccctccccgcatacagacggagccggagcacgttttcgattgtccacatgtctgcgacggatgtacggtcaggacggatgcaatccgtcatgaacgaacagacgtcagaaagacaaggtggacaatgaaaatgtactccggctccgtccccctcccgggaatccaattatccgcttccctcccgggcagcatactctctcctacttcccccgcgccgtcttacagatcagatccacgcacgccataatcccaagcgaagagctgtccagcaccagatcatacccacggttatcatcccagcgcatgcacgtattcgcgctgtaaaaattggaacgtctgcggtcaaagcgcttcagtatattttctactttgcgctcctcaatgccatattcctgcatcgcacgcttcttgcggaattcacggtccgcatggataaagacacgcagcacatcttcgcgctcccgcagaatccagcctgcacaccggccgacgatcacacacggcccctgcagagccatatcctggatcacctgctcctccaccacgtagagctcgccttcctccgtcaggccatcccgctcaccaagtgccacgcggtttgccatgccaagcgaaaacagcaggctgtttgatgtcgattcctccagatgaatcagacgttccggcaccgtctgcatgcgctccgccgcccgttccagaacctcttttccataacacggcacgtccagttccagtcccacacgcgttccgatctcacttccaccagacgcatactctctctcaattgttatgatacggtatttcatcctttccacccctctcatatctcaccggaccgacagcaaattttccactgccatcttccggattctccattaccttttcttttatgcctcacccggtctgcagcaaatttcctttcgctgcagacccggctcttctattgcatttttacgccgtctgctcaaactggctgttgtacagatctgcgtagaatccgccttttttcatcagttcctcatggttgccctgctcgatgatatcaccgtccttcatgacaagaatcagatctgcatcgcggatcgtggaaagccgatgcgcgatcacaaagctcgtacggccttccatcagcgcatccattgctttctggatctggatttccgtacgggtatcgacagaggaggtcgcctcgtccagaatcagaatgcggttatctgccagaatcgcacgcgcgatcgtgagcagctgcttctggccctgtgaaatattgctcgtctcctcgttgagcaccatctgatagccacccggctgctgcataataaatttatgcacatgggctgcctttgccgccgcgatgacttcctcgtccgtcgcatccagtcttccatatcggatattttccatgatcgttccggaaaacagccacgtatcctggagcaccattccgaacatctcgcgcagctcgccacggttgaagtcacgcacatcgtgaccatcaatcagaatactgcccttgtttacatcataataacgcatcagcagcttgaccatcgtcgtctttccggctccggttggtccgacgatcgcgatcttctgaccgtcttttacttttgcagagaaatcatggatgatcacctgctccggatcgtaaccgaactgtacatgccggaattccacatttcccttcagtccatcggttgataccggatgctctgccttctggtcttcctcatcctcctccaggaattcaaatacacgctcagaagccgccgctgcggactgaagcatattggttacctgcgcgatctgctggatcggctgggtaaagttccggatgtactggaagaacgactggatatcgccgacctcaatcgcatttttgatgaccatgaaaccgccaaggattgcaacaaccacatatccaaggtttccgataaactgcatgatcggcatcatgataccggaaaagaattgtgatttccatgctgaattatacaactctttatttactttttcaaactcctctacgacatctttttccttattaaatacctttacgacattgtgtccgccatatacctcttcaatctggccatttacttcgccaaggtacttctgctgactgcggaaaaatccctgtgatttgcccataactcctccgatgatccccatagaaaccgggaggatcaccagcgccgccagcgtcatccacacattgatgctcagcatcatgatgaaaacaccgatcagtgtcgtcacagaagtaatcagctgtgttacgctctggttcagtccgttctgcagtgtatccacatcgttcgtaactcttgagaggatctcaccggtcgttctgctctcataatatttcagcggaagccggttgatcttttttgaaatatcctttctgaggctgtaggtcgtatcgttcgaaatgccggtcataataaatccctggataaaggaaaatatcgccgagcacacatacaggcccagtgcgaacagcaggatctgcgtgatttttgtaaaatcaatgcctccggtaccgccaatctttgccaccaggccgttgaacagttccgtggtcgccttaccaagaatcttcggaccaacgatattgaacaccgtgcctgcgatcgcaaatacaaacatgatcacaaaacggattttatattttgacatataccggatcagcttcgccatactgcccttaaaatctttggccttttctccggccatcatgcgcgggccccccggacctctgcgccttcccatattatcactcatggtgctttactcctttcctgatcttattttgccagctcttcctcagaaagctgagaagtcgcgatctgacgatatacctcacagttcttcagcagttccttatgcgtaccgattccggccaccctgccctcatcaagcacgatgatctgatctgcatgaaggatcgtactgatacgctgcgcaacgataattgttgtcgtctccgccgtcgattctttcagtgcacgccgcagcgccacatctgtcttataatcaagtgcagaaaaactgtcatcaaaaatcaggatctccggcttctttgcaattgccctcgcaatcgaaagcctctgcttctgcccaccggatacgttcgttccgccctgggcgatcggcgtatcatatttttcttctttttcttcgataaattcacttgcctgtgcgatttcggccgcctttctgatctcctcttccgacgcatctgtacagccatagcgcagattggaatcgatcgtaccggaaaacagcacgctcttctgcggtacgtaaccaagtcttgcacaaagatccttttttgccatctcacggacatccacaccgtctacccggactgcaccggatgtcacgtcatagaagcgcggaatcaggttgaccagtgtactctttccgcttccggtacttccgatgactgccaccgtctggcctttttccgcgcggaatgaaacatcctccagcaccttctcatctgcctccggataagcaaacgaaacatgatcaaactcaacaacgcccttttctccggccgccggaagcttcggctgatccggatcatggatcgtcggctcagtgctcagcacctcatggatacgttttgcagcaacattggcacgcgggatgatgatcgacatcatcgcgatcatgaggaaggacataataatctgcattgcatactgaataaatgccatcagatcaccaacctgcatggagccatcatcgatcgcataggcacccttgtaaacgatcagaacagaaatgccattcataatgagcatcataatcggcatcataaaggtcatgcagcggttgacaaacaggttcgttttcgtcagatccaggtttgcctgttcaaaacgctcctcctcatgcttttccgcactgaatgcacgggataccatgataccggtcagctgctctctcgtcacaaggttcaggcggtcgatcagtgtctgcagttttgtaaaacgcggcatcgccaccttgaacagcataccgatcacaagcatgatcaaaataacagcaagcgcgataatccagctcatcgatacatccgtcttgattaccttgagcacaccgccaattcccagaatcggagaataaagtatgaggcggaagcccatcgccagcagcatctggatctgctgaatatcgttcgtgcttcttgtgatcagggaagcggttgaaaactgattaaattcgtgactgttaaatccgatgactttgcggtacacatccccgcgcaggtcgtgtgcgaccgttgccgcaactcttgctgagaaaaaggtcacaagcactgatgccagcatcgccagcaatgccagcagtaccatctgaaccccgacctttacaagataactgatctgaaggctgtccagatccttgcccagcgcctcatattcattctgtacaaacagaattgctgactgcgccgtcatcatctccggcatatcatcaaacttctctttgatctgccctacaatctggctgcgcgtcgcttccggaagtgccttcaccgcatcaactgcagacactcctgccggaagctgcatcgcaccagcctgagccacctgagttgtatccgtgctctgggcggatgcatcttctgccgcattctgtgctgcttcactctgggcggatgcagattctggcgcattctctgccgcttcgctttgtgcggatgcagattctgtcgcatcctgagctgcttcactctgggccgatgcagattctgttgcgtcctgagccgtctcgtcagagctgtctgtgccctgtgcattatccatctgctgcaatgctgtcactaccatctcaccgtccagcagagaagaagccagcgcctcacgcttctccccttttatgctgcttttcagctgatacacatcaccatccggctcatagctgtcttccagtgcactctgcccatcctcatccagaaacgtcatcaatgtatcgtacgtttcctcacgcatctcatccggtacaccgtcctcgatgcctttttgctgaatgccttcatttacaatctttgaagtatactccggcaaggtcagatcacagtacgcctgtaaaaacaaaagcgcaacgatcgcaaccaccagccctgccgaacttttcagatactttgcaagttttgtcatggtttcctccttcttattttctgtttcttctattataataatatcgtaactgttcagagccaacctccaaaatgctacgcatttcgtcggtgtg

SEQ ID NO: 4161 - DNA, 7303 bp, Unknown
  16S sequences of unknown bacteria
ggggagccacgagctcgcgcggcgagaacggcttgatcaggtagtcgtctgcgcccagctccaggccgatgatgcggtcttccacctcgcctttggcggtgagcatgatgatgggcacatccgaggtgtcgcggatgatgcggcacaccttctcgccgggaatcttggggagcatcaaatcgaggatgaccaggtcgaagtggtgcttgttgaattcctcgacggcctgctggccgtctgaggcgccggtcacccagtagttttcacgttcaagataagctgcgactgcctcgcgaatcgccttctcgtcctccaccaggaggatgcggcgagtttcagaacccatgtccacggagtcgctcctttcgtcatcgaatcagctgcaccgattctaccatttgccctggtgcggcacctgcgctgcagccttcgcgtaaccaagtttcagattatcttcagctacaccgcgttcggctcgatggcgcgcagcgtgaccgtcctggtcgtgccctccgtcgtggattttgcgatggtcgcgtagttgtagacggtgtcggtcttgcccacgcagacggggtagtcgccgtaggactccgtgccgccgggcgcatcgaccgtgaagtagcggcggttcttgtagtcgacgaacacggtgcgcgagcccgacttgcagaacagccacccctggcacagccccggcgccgtgaccggctggcgggcaagtctcaggtactggtcgttgccgatcgggtagtacgtgcccacgcgggcgatgccgccgccgtagtcgtaggacgcggcaatggagaacgcgaactggccgtccaggtagatggcggtggcgggcttgaacgagcgcggcatgacctgcttggcgacgaccgagcccgtgcccgactgaatcgccgtgagctggtagtagacgccgctcgcatccgcgcgcggcatggcgcacagcacctccccgctcgcggtgaggccgccgttgaagcgcccgtgcgacgtgaggatcgtcgagccacgcgagccgctcgcagacgccttgagcacggaatcctcggaggtgtgcgagccgccttcggcaggttggacgatccagtaggccgtcgtgtcgatgacctcgagctcgggcgtgtcgtagtccgaggtgccgctgtcgacctgcacggactggccgagcttgagcgtggaggcgtcgattgtggcgacgtacacgctccagtcgcccgtcaggtagttgctctcgacccatgcgagcagctggtcggacgcgcgcaccgcgtagatgctgtagccgtcgtcgccctgcaccgccgcttcgagtgcgctggtcattttgcccgtggcaagcgtgacgagcgagacggtggtgagcgggttggcggtctttccggcgcacagcgcggcggccagcttggagcccgtcgtgtacatcatcgtcccggcgttgaaggtcccgcgctccacgagcttgtagtagcccgcggcgtcgtcgatgctcgcaaacgagtcgagcgtgaccacggagctgtctgccaccgtgagcacgtcgggcgcgtcgttggacgacgacttcccgcaggcggaaagccccaccatgctgcccgcgcccacgaccgcagcgccgagcaccgcgcgtgcggtgcccgacagaaagctccggcgcgtgagcgtgtcttgcgccgcctgctttgacccgtgcgcactcaagggcgtcaccgctgcttttcgatgagcgccttttgcagcgcaatcgcgagctggtcggggcacgaggtcggcttgccgccgcactccgtgcccaggcagcagtcgatcacccagtcggcgggcatgccctcgacgaggctgccgatgcccttgaggttgccgttgcagcccccgacaaacgcgaggttgtgtaccttgttctcgtcgtccaggtcgaagctgatggagcgcgagcagaccccgcgcggtcggtacgtgtattgctggtccgtgttgaacatgctttcctattccttgtggttgacctgcccggcgctagaactcgagcgcctcgagccggtcgaagatgacgtcgatgcgctgcaggaacgcgcgcgggtcgaagatggcgtcgagctgctcgtcggagagcgtgcagtcctcgtccgcctcgaggttctcgcggaagctcgggccctcgacggcctgctgcatgtcgccccacaccttcatggcgttgcgctgcacgatcacgtaggcgtcctcgcgcgtgatgccggcatcttcgacgagcgcgagcaggacacgcgacgagtagatcaggccgcgcgtgcggttgaggtttgccaggctgttctcgcggtagagctgcagcccgtccaagatccattccatcttgccgcagatgtagtcgaacgcggtgaacgagtcgggcatgacgacgcgctcggcgccggaatgcgagatgtcgcgctcgtgccacagggcgacgttgtcaaagccgacctgtgcgtttgccttgatgacgcgggccaggccgcagacgcgctcggccgtgatggggttgcgcttgtgcggcatggcagacgagcccttctggcccttcttgaacggctcctcggcctcgagggtgtcggtcttctgcagcgagcggacctcggtggcaatctgctcgagcgtggccgcgcttgccgcgagcgcggaaagcacctgcgcgtggcggtcgcggttgatgacctgcgtggacagcgggtcgggctcaagccccagcttctcgcagacgtactgctcgacaaacggatcgatgttggagtagcttcccaccgcgccggagatggcgccgacggcgatgaccttgcgggcgtcgagcaggcgctgctcggcgcgcttgagcgcccaggcccacatgccgaacttcatgccgatggtcatgggctcggcgtggatgccgtgcgtgcggcccacgcacagggtctccttctcctcgagcgcgcggcgcttggtgatgcggccgagtctgcgcacgtcctcgataacgatgtcgagcgcctgggtgatgaggtagcacatggccgtgtcgcccagatcggagctcgtcatgccgaagtgcacccagcggctcggcttgggcgtgccctcggggacttctgcgtcgatgtactttgccatgacggtcgtgaacgcgatgacgtcgtggttcgtgaccttctcgacctcgtcgatttccgggacggtaaagtcggcatgcgcgcggatccacgccgcctcttccttcgtgatgccgatgcgcccgagctctgcctgcgcctcgcaggcgagcacctcgatttctttccacacctcgaacttgttctccagcgaccagatatgtcccatctgagggcgggtatagcgttcaatcatgggcaggttcctttcgaaatcgcatttcacgggcgacgccgtcgattgtcttggggcagctcgggcgagcgtaatcttctcgcatattacgctcatgatgcaacgcccgggcatcggtgcgtataatcatcgcagaaaaacaacgggccctttgcctggcccagcaaattctcggaggagtgaatggaatctcacctagcgggcgatgccccgtctgacgttcccataagcgacggcgagcgccttataaaactcgcactgtacgtgaaagagcatgcgcccgtcgactttgcaacaatccgcaccgcactgcatgccgaatacggcgcctacgaaggcaccgacaaggccgcggcccagcgcttcgacgacaaggtccgacgccggttcgagcgcgacaagaagaccctgcaggactacggcctgttcttcaaagtagacgaggacagcaggtactcgatcgacgacgaggcgagctttgccgcgccggtcgacctcacgcaggaggaggcgagcctgctcaggctgctgtgcggcgcgctcctcgacgacgacaactaccccctcaaaagcgagctccgcatgatcttggtcaagatcggcgacgagctcgacgtgcccgacctgctgccgggcatggacaagcccgcgcccgagcagggcaagccgagcgcgggcttcaacaaggtgcgcaagtccatcgacacgcgcaagaacctgcgcttcgactacgtcaactcgcgcgggcaggaaagcaggcgcgacgtgcagcccttcggctgctttctcctcaacaagaactgctacatcgtggccttcgaccccagcacaggcgacgaccgcatcttcaggctcgaccgcatgagccacgtcagcgtcaaccccgcgcgtcccgccgtgcccgactttgacgagcgcgtctttgacgcctcgcagtactacgggctgcccttccagtttggcgacgaggcgaccgaagtcgaggtccgcttcgacgaggattccgcctggcgggcgccgcgcctgtgcctgcatcaggggacgctctcgtacaacgacgacgagacggtgacctggcacgtgagggcaaacgacctcaacgcgctcgcgcagtggtgcgtcgagaacggcccgggcatcgagccgatcgcgccgcaggaggccgccgacgcctaccgcgggggactctatgcggcgcttaccgccttcgacagcgagaggagctggcaatgaacgacaagaagctcctgctggccgtattcgcgctgctcgaacgcgagaacaccgtgtccatcccccagctcgccaagctgctgggcacgagcgaggaaaccgtgtggaacgcgctcgacacgctcgtgtactgctacgactccgtctcgatccggctggacttgaacgagtcgtacgcatcgctcgtcaaagacggcacgagccggctgctgcgcctcaccaaaaacgagaccgccctgctgctcgacgcgctcgcctcgcagggcatcgccgcagacagcgagcttgcccgcaagctcacgcagagcaaggggttcctgagcaactccgccgaggaggcgctgccgcatttccgcacggtcaaccacggcgagaacggtgcgatcatggtccagctggcaagcgcgtgcgaaagcgaggagcaccacctcgtgcgcatcgagtaccagcgcgacggcgccgtcaaggcccagccgcgcgtgatcgagccctacacgatcagctcggacgacgaccaccgctacctgcacgcctacagcctcgaggcgcgtggctggcgcacgttcagggcagaccgcatcaagtcggtcgagatcctcgacgagaccttcgagccgcgtgaggacatgcccgagggcgccgaactgctgctgcgcgatgcctcgcgggcgcacgtgcacttcgtggcgggcacgcagctgccgccctggccggagataaaggtcgtgaagcgctacgacgacggctcgtacgacgcgagcgtgccgtggctttcggggatgtggcttcccaagcacatcgtcgggctctttggcaaggcgctgccgctcgacccgccggagctggtcagcgagacacgcgagtatgccggggaactctggggcgagagctaggcggacaggctttctgccaggctccgtgcgcgctggctgcccgtgcagggcacgccggcgccaaagagcagctcgcgctccgcctcgggcaggaccgagcgggccttgtctcggaccgtgtttaccgagatgaagaactggcgcatcatcgcgacgagcaggtacttgcccttgcgcgagagcgtaatctcgtcggcgtcctcgtggtcgaaggcgcccactgccttgaagaaggcgtactccacgggcaggctcgcggcgacggaagagccaaagtcgcgctcccacttcttcttgtcgaggcgcaggccgaacagctgcatcatgaagcggtagcgcatgtggtcgcgcttggtgaagtgcgtctcgcccatgatggacatcttgcccgcgttgatgcgcttgtcgtattcgttgacggagaagctgttcacgtagcgcgtgttgttcatgaacgtcatgccgcccgagccgatggcggggtattcctcgtagtcgacgatgtactcgtcgatcatgtcgttgttggcggcatcgaaggtccaggcgctgctcatcgtaaacatcgggtcatcgccttcgacgagctgcgagaggatgatgtcgtagaagcgctgctcgcgctcgtagtcgaccttgcccaccgttcgctcgagcgagcgttcgaccgaaggcgaggccatgagcgggtagaacgtggtctggttgcaatgcgtgagcttgatcgtgtcgaggtcgtggcgcagcatctcctcggtctgtgccgggaagttgtacatcatgtccacgttgagcgatttgaacaccttcgcgtccgccacgttgcggatgcgctcgagaatctgctcggcgctgccgtatttgtcgtagcggtccatctgcttgagcaggccgttgtcgaagctctgcacgcccacggacaggcggtccaccacgccgtcgagcttctcgatgtactcgtcgacgaggtggttggggttggtctcggaagagacgtcggagatggagaagttctcctttgccaggttgatcgtgtcgacgagctcgtcgatgaggatggtgggggttccgccgcccacgtacatgctctcgaagtcgtagcccatgtccttgagcatcatcatctctttgcgcaggttggcaaagtacttgtgggccttgccctccgagaacgggaagcggttgaacgagcagtacgggcacaggcgctcgcagaacggcacgtgcgcgtagagcatgtagtgctcgccgggcttggggccgggcagtacgtcggttttgctgggagaaaggtcaaggcaacgcgatcccaagacgcggaccccggtggagatgagacgctcagttaacattgatcaccctagaaacgaaaacaaatcgatgaaaattgtatgctctatctaataaatagaaaatagacaagaagcaaaactaccacaacaacggcgacgaagccgaaatagcagcccttgtttcccgaagcggcgctgaacgccgccttctcggtcacggtctgcttggtcttgtaccacacgctgcccttgggaaggtcctcgagctgcaccttctgggtgccgcaccacttcccgtccgattccacgacgcgctcgagctccttggcggaaagcgcgaccgccgggtgttcgccctgcgcgatgcgcttggaaatgttgcgcacgaaggcgtcgaaggcgtctttgtgggaatcgtcgtagcagaagatggcgacctcgccccagtacttgtcctcgagcctgttgtaggcaacggcggcggcgacggccccgaggaccatgacgaggacc

SEQ ID NO: 4162 - DNA, 4672 bp, Unknown
  16S sequences of unknown bacteria
ggcggggcttttgcgccgcgtattctcacgtgaaacgcggaagcggtctttttttcgctctttactttttgccgaagaccgcctgcgtgatcacagaaacgatcgcgcagagaatgccgccgacgggaaagaccacccagcccgggtgccagagattccagataaagccgatgagcaggtatgccgccgtagcggtcagcatgatagcgccgctgactgcgctcgaaatccgttctcccttttccgctctgctctttgcggaaacgtcgaagccttcctccgcattttcgcccgcgccgcccgcttccggatcctccgtaaagccttcccgactgcattctttattataatttttcacgtcgtattttcccgactgcattcccgcgtatacgtacagtcccaccgcgatcgtaacggtgagcaggaggacggccgcggcgaaattttcccattcctccaccgtaaagcccgcgggagcgtaggcctcccgataggtcatcgccaccacggcgatcacgccgatgaggatgggcgccgtcgcgcccgcaataaagtacggcatcttcctacgaaaagcgcgcaccgcgttttcggggtatttttccatgcgaggattttcccgctgaaaattctcgtgcgcaatgcctcccgccacaaaaagcgccacggcgacggtgacgcagcttaaaagggtcacgacgcccgccacctccctgacgcctgcggaaaggagaaacagcatcgccgtaacgcccgccaaaatcaagcacacgccggcggtgatctgcgcgcaaaaagaattcatatgcttgtcatacgcctccaaattggctttatattcgccggcatccttcgcggaggcgtcgccgcgcaccagcgtttccatatcgcagcggaacagatcgcacaaaatcagcaatttttccatatcgggaaaggcgctgtccgtttcccagcgggatatcgtctgccgcgtcacttccagtttttccgccagggtttcctgcgtgattccgtactttttacgatagaaaagaacgttgcttccaaaactcatcgtcataactcctttcgttttgttaagatggctctattatatcgtaacggacgcgcaatttcaagcgctttgcagttgcgtttcatgaaaaagacgtatcatttgacgttacattcccgtattttcccatgtttccgctctgtcgatgctttttcactacgcggaattttccaaacacttcgcgtcttatgccactgcggagaaaaagcgcagcagccagcgcggaacggaagaaaacatttccgaacttgccgcgacgaggctttggaaatcgcagacgagttttgtataactccctttgggagcgccgtcggcaatgacgagaggagcgctcgcaaagccttccatagaagtggcggcgatcctcgaagccacggctaccccgcccattgcgtaaacgccgacggctaccccgcccacggcgacgattcccaaagcgacggccccgagagcaaaaatacccgcggaaatcgcgccagcggaaattcctcccgccgccaaagcgcctaacgccaataagccgagagagagaacgcccagggaaaggatccccatcgacagcattcccagcgatattattccgcaggcgaaattgcctatcgcaatgattcccttcgccttatagaggcccgttcccacatgaatatggacgagcggaagtccgaacaaggtccgcttgctcttgtattcataatgaaaacgaggaaaaaagaaggcggcagggtattgacgacttgttttttcgccgccttgctccgcagtaaacgcgctcctttcgtcctcttggtccgaagtattttggggcgttcttccgtcttcttttctgaggctttcctccgattcccgggcggcaaacgcttcgttgccgataagttcgtctgcggacacacaaaacagccggctgagcgtgagtatattttccatagagggagaagccagccctgactcccatttgaatatcgtctgtcgggaaactcccgccttttcggcgagctgttcctgcgaaagccctgcttcctttctcaacgtcgataacttgcgataaaactgcataacactcctctcgggacgatcgctgtccccgcgttttttctaagtatatctttttccccttcgtttgtcagtcaatgccgatttacttttcgtaaactattgtttacattcgccgttttgcccctttttaaagcgtttccctgtttttaacgacgcttcgacgataaccgcgctccgtgtcttttagaaaaaatcaaagattctcatgctttgcgtcggcgggaaaggcgggagaaaggatagaacgattccgcggaacagaggggaagaagaaaaaacggcgattgtttttaaacgcgcgcgagttccttcgtctttataaacgcgctctttctctcttcgtcgttttttctttcgcggttatccgtaaaactcccatacaaatcatttccctttaagagagtccgccggactttccgccggaaggtaccccctacccgcgcgcgccgaaaatcgtcgagccgagccgcaccatattgcttccgtgagcgacgcaaagacgatagtcgccgctcatgcccatagagagatacgcgacgtcgggattttctcctttcgccttttcgtacagagcgcgcatttcatccgcgagcgcggcaaggagtccctcgtccttcgagtcgggcagcatcgccataaatccgcggaccctcaatcctgccctttcgcacaaccggcgatagctctcgtatgccgattccggggcataaccgcccttgctgtcctcccgcccgatatttacctgcacgaggacctcggaaagtacgccccttcgaacagactgcgcggagatctccgacgccagctcgtcgcggtcgcaggaatggaagagagccacgtttccgacgagatatttcaccttattcgtctgcaagtgtccgataaagtgctgcggacaggcttttaaaaattcgtgtttttcccgaaattcctgtactttattttccgccaccgcgtccacgcccgcgtcgatcgccgcgtttatcgcgtcggcgctctgcgtcttggtcgccgctaccagcaataccttctccccgaagggatttcccgtcgcgagttccgcttttatcctctttacgttgctttgaatttccgaaagttccatacttacctcctgcgtcccctattttaaacgcctttctattatcaaaaaatttccgctttgagaaaagaacaactatcaaaatgcgtttgccgaaaaagcatccgattatgctttcgctcgttgcgcctgcgcaaatcgtatgcaaaaaacgtcttgcggcgggacgacggcgttcctataaatatattctagtatactcttttaaaagccgattgtcaattcgctgtgtgatttgataaattcgattgtaaaatatctttaaaatgccgcttttttgcttgcttttcttcttttgcggtgttataataattaaaagaatagataaaatcgataaggataatcagttttttaaatgaatacggaagaattaaaaacattcatatttttgtcgaaagtaaagaattttacgctggcggcagagcaaatgtatattgcgcagtccaccgtcaccaaccgcatcagcgagctggaaaaggaagtggggaagaagctcttttcgcggggcgccaagacggtgacgctgacggaagaaggcaaaatatttctcaaatatgccgaacgcatcatcgaattgcaggatacctctatcgaggaaatgaacgccgtttccgcttatacccgcaagttttcgataggtgccatcaacgccacctatgaaagctatgtgcgtccgctgatggataagtgtctgaaaagcagcgggacgacctcggttaaagtgactttgggacactctctcgatctgattcagcttttgcaagacaacgtattggacctcgtcttttccgctattcccttaaagcgcacggggtacgtctgcgaggtattcgataccgaccgcttggttttggtgacgggcagaaacaacaatgagtatcatgacgggatcacacaggatcagttgacgcatattccctatctgatgtgcaattttgcgctcagcgacgtgggcgtgttcattcgctctctgtttcctcaaaattatgtgttccgtctggaagtggataattcctccaaattgtttcattatctcgaacagggactcggatactccttcctcccctataaaatgatcaaaggcgaactggacgaaggaaaattggaagaggtccgtttaaaagatttttccgcgcccaaggtgatgacttacctcatctacaagcagggatacgacgtccgaaggtttttagaaaatcgcttcgacgacgcagacgcgaaataaaaggacttttttcgcagaagggaataaatttttcgaagaaaaacgcaacgaaaaaatttttcatagattttttgaaaatccgtgaaaaaacagttgacaaatcctttcgtttttagtattattaattagctcttttgaatgcgcctatcctttggaaaaacgcgttcgggatgccattatatcgcggggtggagcagctaggtagctcgtcgggctcataacccgaaggtcgcaa

SEQ ID NO: 4163 - DNA, 12360 bp, Unknown
  16S sequences of unknown bacteria
gtcaccgagaaactggtcgaggccggtgtccgccgattttgtcgaaaatttccgccttgtaaaattcgacggcagccgctttgtctttgcctattccgacaaatcggcctatgaaatttttatgagcgacggcataaatcccctgagaaccgcagcagccgccgcctgcggaaaaatgcccgacataaggtttaaatacgagccgaaaaaggctaaaaaaagagcctcctcttcaaagcctgccgagccgattttcgacagcgagtttgacaccgaggtgcgccgcgtgaactataaaaagggcataaagagcataatcgcctcatttatttgcattgtgcttgcctttttgattgccgtggtgggcataaattattttgcaaacagaaaattcaaggaaaatttctattcgctgagccttaaaaacaccttcgacaattttcgcataattcagctttccgaccttcacaattcaacctacggaaagaacaacaaggagctgaccgaccgcatttcaaggcttgcccccgacataatcgtcatgaccggcgactgccttgacaaaaacggaagcgaggacgagataaccgagctttgcaccgcccttgcagccgtggcgccaacctattatatctacggcaacaacgagtggcagcgctccttcgactgcggcgagacccttgaggacatcgacggtctgacgggaggaagcgacggcggcagagacgcaaataagctttattccgccgacaaagggcttaaaaacgccctcgaaaaaaccggcgtcaaggtgcttttcaacagctccgacattattgaaatcggcaacaacagggttaaaattttcggaacgctgacctccaacccctcggccttttggccctatgcgggagatgaattttataaatttgtcagcgaggacaccgattgcgtaaagctgtttttgtgccacgagccgctgcttttcgaaaccctttacgaggatttttggggagaccttgtgctttgcggcgacacccacggcggagttgtgcgactgccggctctcggcgccctttattcgagggatttcggactgttgcccgaacgcgcagaccactttatctacggaaaatataaggcgggaacttccgaccttatcgtaagctccggactttcaaacaagggcttcccccgcgttttcaatcagcccgagcttgtaataatcgacgtcaacaaatattgataggaggtggaaccgtgctttctcaaattttaaaggcggccgctcttgccgttccggcagttgtgcttgttttggcaattgtctcggccgttaaaaagatacgaaatcaaaccaaaagccaaaccaaggcgcggcttaaaaagcttcgccccttccgcttctcggctcttttatttgccgttatcatctgcctgacctacaccgtgggcatttatttcgacacgtcaaagcaggcgtcggccgtcataagccttaattatgccgaggcctctctcggtcagaacgccaacgggacgagatataatatgtcggaaataacctgcgacgaggttatcgagcggctgatagaaaagggcggaatagacggactgaccgccgacgagcttaaaagctgtttttcggtgtcgccgctgacgcagggcaattcctattcaaaggacgaatatcacataaccaccgagtatcagataagctacaccgccggcaagaagagtcagaaatacgattcgagaatgcttgtgcagctgctgtgcaattcctaccgtgactattatttcgacaaatatgtaagcgattttcaggttaagcttgacaccctgtcgggagaggtggaacagcttgattatatggacgccaccgacctgctctccaaaaagaccaacaagattttgaactatctctacggccttcagcaggaaaattcctccttcatttcgtcaagcggcgccacctttgcctcggtcgcctcaaaggtttcgaccttaaattcggcgcagataagcgatatgctctattcctacattctgcaaaacggaatttcaaaagatacgggactttacctcaaccgtctcgaatatatcaacaagcagcttgatttcgaccgtcaaaagcttcagcagtcctatgacataaccaattccgccgtcgcaaaatacgacaaggacatggcaagaatagtgctcgtccccacctgggacaacgacggacagtattatatgggacgcaccaaaatcggtatcgataccctttcggttcagtcggtgtcatacagcaaagacattgcctccctcgagaaaagcataaaggacaatcagcttaagatttccaagttttccgaaagcacgggcaacaccgagcaaaacaggcagtatatttccgagcttataaaaagcaccgagcaaagcgtggaaaagcttgccgaggaggcccgtcttatcgggcaggaatattattccggtcagatgaaccaatgtatttcggcaacggtatatgcaggctcggtattttcaaggataaagacccttgcggttgtgttcctctttgcatacgttgccttttgggcgaaaaaatccgcaaccgaaatttcggcttcggaagacagcggcgacagggtataaaggacccttaaaaagcacgacaaaacggagatatttatggaagaaaaaaagattttcaaatatataaaaaggctgctgccctttgtgttcatactttcggcggttctgtcggttctcataaacatttccctcacaaaggaaagaacctattcggcctcggcggtcataaactataactatgagtcggccgagcagggcaaaacccccatagacaccgaccttgacgtcaacgagatcaaatcgtcctctattatgagcaaggtcatcgaccgcctttcgctgtccgacggttattcggccgacaagctttcttctcgggtgaccgtgaccgaggttcccgaccccgacaaggaggctcagaaggaggccaagctcaaggagggagaggactatacctacgttcccaccacctatattgtggaattcaccgccacaaacagcgagggcagagagtttgcccaaaccatgcttgacgaaattctcgacacctatttttcggttttcggagagaattacatcaacgtcgaccacataagcaacaacatagacaaaatctatgacaacgattacgactatatccaaatggccgagcagatcgacgacaccatcgagcagaccataaacaccctttatgaccgcgacagcgcctatccctactaccgctccaccgagaccggcacctccttcggcgaccttatcgacgagttcaccttcataaaggacgttaccctcaaggatttgttttccaaaatctatcggtatcagataaccaaaagcaaaagcctgctcaacgccgattacaacacccgaatcgacaacaacgccataagcggctccaacgagcgcgccatgttcgacgatgtggaagaggtcatcgatgcctatgtttataaaatgcgggaatcgggcaacaccgacatcaccgccgactacattttaaacgaggttcacgagaaggacataaccgacggcgacggcaacgtcataacaaagggcgaccagacggtgacctatgacgagcttatatacgcctggcgggatcacgaccttaacgacgcacttgccgcaatcgacacggcctattgccgttatgtgcttgacaccttcaattcctgcacgggagcctgcgggggaacctgcggcggctccgacaaaacctgcacccagctgtcaaatcccgattatgccgccgaggagcaggacgttgcaaattccataaaggaaatgtcggacaagctttccgagctttatgacctgacggtcagcacaagcagcgaatacaacgaatatctcggctgcaaaaatatttccattctttccaccgcctccacaagggagagcataaacgtcaccctttacagcgtgatcgcctttgtgttcatcatggtggtgtgctgcggcggacttatcgttttcggccgcatgaacgacattgtcgtttccaatttctatatcgacaaggccaccggcttttacaaccgcgcctatttcgacaaatatctccaaaagaacagccgcaccattctcgacgacggcacggtcatgatgtcatttaccataaccaatcaaaaggagataaacgccctgcacggccgaaaggcgggagacgaggtcatcgagctttttgcctccgcgcttaaaaccgtgttttcaaagagcaaatgcatggcggtttacaacggaaattcccatttcatcatcgtgctcgaaaagagcgacgccataaccgcagaggaccttgcggcaaacttcgaggttgcccttgaaaaccgcgaggaatgcgaaaaaatcgaaattaaataccgcgcgggtattgccgagaccttcagagagagaatcaaatctccgagagcgctgcttgtggaggccattaaaaacggcaagaatttcgaggtcggtccaaaagaaaactgaattcaaaaaaatttaaaagggaggtgacggaatggtaagcgaagcgcgaaacgcggtcataaagatatatttcaccgtgctgctctttctcatgtattattttataaacgagaccgcctttatcggcggaataggtattacctaccgtcatcttttcgcccttgccgtcattttttccgcctttgtgtattttcttttccgccccgatgttgcaggggcggtgacttcgataaaatcggcgcttgtttttgccgtgccgctgcttgtggtgctgctttcctcctgtctcgtgtggataatcgacaagagcgacataaccacgattttccgcggaatttcgggctgctttatttacaccaactggctgtcctgcgcccttgcggcgggagccgtgctttatgttttcggcaaaaacggcatatggtataatcttgccgctatcgttgcgtcaaacctgctcatgattttgaccataataatgtccgacgggctcggcaccttcatgaaggaatttttcgagcttatagcgagctttgcgtcaaataccggcgatacgattgtcaaggccgaaattcacgagctggccttttgtctcggcgcgtatataatttatatgctttataagcccataaaaaaggcgtggttttgggtgcttttttcacttgcgctcttttgctttgccgcggccttcaagagaattgccatgattgccatggcggcggtttttgtcataaggctcatcacccttttggcggcaaggttttcaaaaaaagccgagcggctttgcgtcaacgttgttatggcggtttgcgtcgtcgcccttataggctatatatgggtcataaaggccgacgtcttttcggccatggaaaaggcgggtatagacacaagcggccgagcttttatttactctcacgtcaataatttctatgaattttcccccttcttcccgggcaacggcatcggctttctgacctatcagctgagcgaggtgctcaacatcggcgtttcggcggtgcacaacgattttcttcagtttttcgtggatctgggcttttggggatatatactttggctgctttccgtaacggttttgcgaacgggctatttcggtcgcggcggcgacaacgattcggcggtcataaccgccatgctgacggtttatctgataatagtctcaagtaccgacaacaccataaactatccgctgctcaccacgaccatgggagttatcatcatgggaaacaactacaccgcccgaaaagaggagcgggagctttactttgaaacgcaccctcttggggcttagaggtgaaaaaatgaagatactgcttgtaaataaatttttatacccgagaggcggagccgaaagctatatgctgggcatcggaaagaagcttgagcagctcggccacgaggttcagtatttcggaatgtttgacgaaaaaaacaccgtcaaaaacgagatcggcgaatacacgggaaacatggattttcacacctcctcccttaaaaagcttgcctatccctttaaaatcatatattcctttgaggcgaagaaaaagctcggcagggtgctcgacgcctttaagcccgacgtcgtccacctcaacaacataaattttcagctcaccccgtcgataatcgacgagacgaaaaaacacggaatacccgtcgtgtggacgctgcacgattatcagctcatctgccccgcccatttgctttataacgcccaaagaaacgaaatctgcgaaaaatgcgtcgcaaggggaaagacgccctgcataaaaaacaggtgtatccacggctcgcttgcaaaaagcattatcggtgtggccgaatggcgtttttacagaattaaaaagacctataaaaaggtggatgtctttatttccccaagcaaatttctctattcaaagctttgctccgacagccccgagctttttgaaggcaaaaccgaggtcatgcacaactatgttaccgagcgaaagcttcccgaaaaggcaaaaagcaactttgattttccttatgtcgttttcgccgggagactgagcaaggaaaagggaaccgatattctcgcaaaaacggcaaagctgctgcccgacgtgaaattcgtcgttatgggcgacggccccgaaagggcggctttcgacaacatcgaaaatgtcgtcgcaaccggctttgtcagcggcgtggagcttgacgaaaacatcgcctttgcaaaggctctgctgctgccgtcggtctgctttgaaaactgtcccatgtccattctcgaggccgagatgttctcggtgccctgcgtcaccatggatatgggcggcatggccgagcttgtggaggacggaaagacgggactgctttcggagagggcggacgccgaaagctttgccgcggcggtaagggacattttgtccgacgaaaaacgccttgaagccatgagaaaaaactgcaaagagaagtcgggtcaaaatctgaccctcgacacctattgcaggcggctgcttgaaatctacaaaacggcgggggaaaagcaatgccgaaaataagcgtaatagttcccgtttatcgggtggaaaaatatctcgagcgctgtgtaaattcgctgacctgtcagaccctttccgacatcgaaataattttggtggacgacggttctcccgacggctgccccgccctttgcgacgagcttgcgaaaaaggacggccgcataaaggctttgcacaaggaaaacgagggcctcggccttgcgagaaattcgggtatgagccttgcgagcggcgaatacatcgcctttgtggattccgacgactatgtaaaaagcgaaatgtataagatcctttatgaggcggcaaagaaggaaaacgccgacatcgccatgtgcgggttgtgctgtatcggcggaataatgagcgcaaaggaaaacgacgttcaaaacataaactgctttgacgattataccgttttttgcggcaaggagggcatcgaccgccttatgctcgacatttcgggtgcccttccgagtgagaatcaggacagcaaatacggcttcagcagcgtgaaaaacatctatcggcgggaaattatcgaaaaaaacggcataaaattcctgtccgagcgcaaggtcatgagcgaggacgtctttttcctgcttgattttctcgacaaatgcgagtgcgccgtgggagtgccgggagcgttttattgctattgcagaaacggcgagtcgctgtccaaaagctatcgcggagaccgctttgaaaagtgccggctcataatcgacggcataaacgaagtgctttcaaaacgcatggacgagagcgtttataaaatatacaccgaccgccttcttcaggcttatgctcgggcggcctgtatgcaggaaattcagttttcctcaaaaagcggcctttcgaaagccgagcttgacgggcggctgaaggcgatatgcaattcgaaaagacttcgggaaacccttaaaaattatccgtggtataagctgccctttacccaggctgcctttgcctttaccatgcgcttttcccttataaagcttcaaaagtttcttgtgaaaattaaggacgggagatagaactatgtatttttcggtgattgttcccatatacggcgtggaaaaatatataagagagtgcgtcgacagcatactttgtcagaattttgacgacttcgagctcattctcgtcgacgacggctctcccgacggctgcccgaaaatctgcgatgaatacggggcggccgacaaaagggtcagagtcattcacaagcaaaacggcggtcttgtttcggcaaggcaggaggggataaaggcggcaacgggacggtatgtaataaacgtcgacggcgacgactttatcgaaccgggctactttaaaaaggcggccgagctttgcgaaaagcatgacccagacataatcaccttcggcataaactatttcgacggcgaaaccaaatcctttgaccccgagccgctttcggcgggactttataaggaaagcggcctttgtgaaattcacgaaaaaatgctgcttactcccgacatgaagcatatgcactatttcctttggggaaaggcgttcaaaagggagcttataaccccctgccagcttgaggtcgaccgacgcatttccatgggggaggacgtttgctgcctcatgccggcctacctttcggcaaaatcggtttatgtgtccgaccttgcggtttatgactgccgctgccgccgcgattccatgtcgcgcagctttaaaccgagccattttgaggatctgcggctcggcacaaggctgctgcttcgaaagggagaaagcgtaagcggctttaaggacgccgtatacagatatgccgcatttatgtttttcgtggtctttgcaagcggggcgcagcagggagaaaaaaacctgccgggtcttgcaaaagcgtccttctcggacgaattcgaaaaagcctttgaaaatgccgagttttgcggcataaccccgaaaagcaaaattgccgtaaggcttcttaaagcaaaaaaattttccgccgcataccgatttttaaggctgtgcggcagattgaaaggtaaagtctgacatgaaagaacaaactcccgacatttcggtggtcacggcggtttataacggcgaaggctttttaaggcagacgcttgacagcctgctttgccaaaccgcaaaaaatttcgaggcaataataattgacgactgctccaccgattccacccccgaaattctgaaggaatattccgagaaggacggccgcataagggtgtttcgaaacgagcaaaacatgaggcttgcaaattccctgaacagaggaacagagcttgcacggggaaaatatatcgcaaggcttgacgccgacgacatttgcctgccgaaccgttttgaaaaacagcttgcctttatggaaagccgccccgacgtcgacctttccttttgcaaattcttcactttaagggaggggaaaatccttccctgctcggtgggaagaaagaccgacgccgacagcgtcaaggccatgtttcttttcttttgccccgtgcttcatcccggggtgatagtaaaatcctcggtcatgaaaaaatataaatacgacccctcccacacctgctcggaggatatagacctttggataagaatgctttgcgacggggtcaaaatcgagggcagcggcgattatctcatgctctaccgcatacacggcggctcgataaccgcaaattccgccgaaaaacaaaagcgagaggtcattttaagcgaaagatatttctactcgaaaatgctcggtgaaatgccgaagcggtgggaagaattttatataaacagcgtttatttcaaggagaaattcgacaggaaaaggctgtatgaattttatcggtatatcataagggcaaaccgaaaaacccgcgcctttaaaaagagcaccgtggtgagcgggacggccgaggtgcttgccgaatataacaaaagcgaaaatctcgggcctttttcccgcctttttatgctcaaattcggcggagcggattttgtccgctgcgtttttgaaagaaagcgcagggcgcaagttgacatcgacgcggcaaaaaagaccgcgcgcagccttaattttaaacaaacaggcaatttaaacggattgccgatatacggttcggagaaggagtaaaatggacagcaacaccctaactttaatcatcatcattgccgtttttgtctgcctctcggggcttggcgtgtttttcacccgtcgggcgctgggccagttcgacaaaaggggaaaggccggctttaagccgctgctttcggttcagaaaagatacgacaaaatcagacaggtgacgagaattccctgcggcgtgctctacatcaccgccgccgagcaggaagccgaccttgcggcaaatctcggggacgggggtttttcccgtcttgaaaacgccgtgctttcctccttcaacggtcaggaggacatggtttccaaaatccgaaagggagagtttcttgtgctcacccgcatgagcgagtcccgattgacggcggccctttcccaaatccgtcgtgatatgctgcttttttccaaatcaaacccctcggaaaagcatcttgagctctatttcggcgcctatctcatccccgccggaaacattgattttgagcagaccgtgtcgagagcaaagctcgcctgccttgaagccaaaaaaagcggacggaaatatgtggcatgggactataatctgcaaaacgactatgacaaccgcgccgaggtggaaaaaagtctgcgccgcggcgtgaaaaacaacaatttctttttggaatttcagcccataatcgacatacaaagcggcaacattgtgggcggcgaggtgctcacgcggcttaacggaaattccggagtgcttcttcccgccgactttatttcggcggttaaggataaaaatatggaggccgaattcgaccaatacgttttcggcaagacctgccgctggatagcgagccacagggaggtctgcaaataccttaaatatatatcggtcaacttcacgagagccaccctgtcaatcgacggcatggccgacaagatacttgaaaagcttgacgaatgcggaatcgaacgcggctttgtcgcggtggagcttgtggaaaacggcggagaggccggaattgtcgttgacggcataaagcaaaatctttcggcgctcaaggaggcgggaatgcccataatgctggacgacttcggcgacggatattcatcctttgaggatttgaaaaactatcccgtcgacgccataaagataagccgctcggtgaccgaaaatatccaaaccgccataggacttcggattttcaaaagcatgataaacgtggcaaaggacatggacgcccttatcgtctgcgagggagccgaaaccccggcgcagataaaagccataagagactgcggagtggtttatgttcaggggtattatttctaccgttcggtaagccccgaccaattcgaaaaggcgataatcaaaaacagaacaaagcaaggagaaagtgaattatgaaaatgagttttttcggctataaccgcaaggaaaccgacgattattttgactatctgaccaaggcaaacgccgagcttaccgagcaggtggagcagcttaaaaagaaaaacgccgaaatggagaaggctctttcggaatatgaaaatctcgacaaaataaacaagcgggaaatcgaaatgctgggacaaaagctcgaccgcagcgaggccagcgaggacgattataagcgccgctttgaggaggcctgccaaaagcttgactccaaggacgacgcccttgacaacgaaaagctcggcattatttttgccgtcgcctaccgcgacatggaaaacaaaaacaaggcggtcagcgaaaaaatcagagaatatgccgacatgatgttcggcagaatggcaaaatatcaaaacgaggtcgccgaaatcgtgaccgaggtaaacgagatgcagcttaagcagaaaaaggccctcgaaaagctgtgctccgaggccgcagaaaagctggatatgctcaccgccgcctccgacaagaccctttcggatatgcagcgcatagagggcagcaaaaacgccatttgcggccaaatcgaaaacatgataaacgagaccatcgacaccggcaaggctctcaatcccccttcaaagcagtagcgcggaacaccgtataaaattttttgaggagagaattttatgcccgacgagatttttaaaatcgacgagaccggctccatcggcaagcgctatcgccgccaggacgagatc

SEQ ID NO: 4164 - DNA, 31565 bp, Unknown
  16S sequences of unknown bacteria
gggtttcgcaggtggcatcccggataacaacactctggaacgcatggcccagggcggcctcatagtcccgcttttcgattgcaccgcagtccacgcacaggtagcggtcatagcccagggtcaggcaggtgggggctacgctgtccagcaaggtccagttgtggtcctcgccgcaggtgccgtccccatcggtttcctcggtgctttcgtcccgcaggtggacataggccacgccgtcctccaccatgtcggtgttcttgtaggtgtaggtgatctcataatacacggggtaatctccggcctcggtgtagttgggggcgctggtcatggtgcagccgtccgccgtgtggccgtagcggatagcggtggtgacacctgcctcggaaagatcggacactgtgacagtatggggctggccgtccaccacgccgaagtagtccgccacaacagacttagcggcggtgtaggcggtttcggcgtagccgcagtcggcgcaagttgccatctctacaaagcggtcatgggccagctccgggcggatggccgtttccatgtggtgccgctccagggtggaactttcctccttgtaggtgccgtaacagaacgcgcagtattcgccgctggtggtgataacacgatggtaggtgctgtccacctgctcaacggtctgcgtttccggcagttcttcaaagaaatccgccgcacagtcatagagccaatacacattcttgttgcaggcataactggtagcgcccatgttgctgttgatggtgccgcagacctcgcagacggctttcgtccagtggtagccggtatagtaggcgtcctggccgggggtgccgtccagaagatcgcccttgctctcgccgtccagacaggtgccgtccgaatatttgacatttcgggtcagcgccgtttccccgttgcgggtgtactcaggaacacggaacacctcaaaggcagttgccttgtcacagacgcagcaattaaaggtttcccttgtcaccaccgagtttgcgtccaactcattggtacggttcagagcctcctgccaatgctccgccgggtcatggtagctgttctgctgggcggcaaaggccgaggggatcagggagagcatgacggctacgaccagaaggaggaccgtcagcctccggggggaatgatgattgtttttcaaattgcacctcctaaatttgtcgcagaaatcagaaaagcccctgggacactttgtcccaagggcttacttctccagttccgcctttttctccggcggctgcttttccttccactcgtccagcagggccatgatctggtccttcatctgccggggagtgacctccttgccaaaatacttactcaattctgcggtggaaagaatcactttatctacctcctttttttcctggctcaaaatgccgtcgatggcgtccgggttcagtttgccctccttgtccagttcccgcagcttctgcgcctgggagagagagggtgcggactgttccccttcgatggaaaccgcgatgaactgctggtttttgggacggatgaaggaaatctcaacggcaggtgtaaaagacagccgcttttcattcaccatcttttgcagttccggcaccaactcgttgagccggatataccgctgtacctgcttgtagttgataccgttgcgggctcccaccacctcagtagaccgcttgccagcgtccttgtcgtcctcacctaacttgacgccctggtgcttgatggcctcaacctgctgtttcaacgccctggccttttccattgggagaatatgctcccgatggcgcagattatcgtccgtcatggtgaggatggcctcgtcatccgtcatgttgcggacgatacagggcatattccgatacccggccaattcgctggccttctgacggcggtggcctgccacgatctcataaccgccgccctcacgggggcggaccagggcgggctggtttacgccgccggtcttgacgctctccaccagggcctgcatctccgcatcgtcccgcacctcgaaggggtgatccttaaaggcgtggagttcggacaggtcgagatagacgatctcctccttgacggggtgggtggcgtccctgggctcggtgggccgttctggcagcggtggattgaactccacaacaggagcagctttgctgccgcctggagtgcgggaatctttcttcttggccggggccgagagcccggcaccctttccttgggacttcttgtcccgaaggggagccttgtcgggagcagatttgccctctttgggcgggcggccccgacggggctgttccggcgtttcacgctccttatcgggcggggtaacctccttcgccgtgggattggttctgcccgtttccttacgggtagtagcaacattcactatcttactagtgaaagtttgggcgggattacccttttggggggtaatcgcctgcttaacctccttttcgggcttgggctgttcgggagcatcagagccggtagactctggggcagcaggctccgctttatctacgggagttgccttttcgaccagggcgggatctgtcacaacagacttggccttgttgggagcaggctgcttcggcgcaggggtctcggtgggtatttccccctctggagtaatattctttttatcgtctgccatctttaacctccttagtcatggcataaaaaaaccagtcagcagactggctagcaacaagaaaacctcctttctatttaatctatatggcaacgccccccatagtcttcttggacagcgcactatatttttagtaagttgccctttttcgtgcaacaaatatatgctttttcgctattattgagagaagaattgcaaaaggcttatactttaagatgcacttttaaatcaaacatatgttgaaaagaatcgaggttgtgctataatgagtataccatttcctataatgaggagggcctatatgcatatattgacattccggctttcaatatttggtgattacaaacagtatactcctacttctgcaaattcaattgcatggactcaagctttgcagactgctggatatgattttttacctaacatcattcaaaccactcagcagataattaatgttccttttgtatctgctaaatttggttctaatgacaaacgtatgcagtttgtttctccagatggagatgtaaatattcgtattctcgcagaacgagtggatgttgagttttcgctgggagcatccgacacgacggagcagtactttactgaaaaacttccagttgctagttcaattatgaatataatgcttgctacgttgggaaatgtgcaaggaaacagactagcctattacgttgatgtaattattcccgaagcagaggattcatcatttgcagatttctatcaagcaaataacttgggtatttctgttaataacgcttctgaaaagtgtgttgaatggagtcataaattcaatagcagggtacctatcaaagttggtggtagcgatgaattgagtaatgcaattcttgttttggaatctgggattcttcaaactgtaaacgcagcgactggtgaacagaaggaaattaagggattgcacattgttgctgacattaatacagtggccgaaaacaaggtaattcgttttaattccgacagtgtaagttgctttgcatctcacgctcaaacactgttcctcaatcttttgcggcaagttaaagagaagtttactgcttaattttgtgtacagaggtgggtacaattgcaaacaacatttctcgatttcttaactaaatctactggtgattacgacccctctctgtttaatcttgaatcacattcaactggagacgaagatcaagtttcacagaaggaacaaatcgctgagttctatagttttttgaataatgtctgcaagtctctattcttcaatgacagcaaagaacagtcaaccgcagatactgttcccagcggatacatcatacataatgtcccaactgataatgcgactgccctcccaccggaaattagagacaataatgatttgctgataaagaaaagattaatcgctatcattcaaagttgctattttgaatctggaatctggactgaagcagatgaatattttgataggctaaagacctcgagaggggatactgtaaactcgttgggacttttggctgacatcgtgaatcacaatctatcaaatgatcacatcttggagggcgtgctacatattctatcgaattatagctatgcagaactggatccatatggcattactatttctctagcgtgtgcattgaatcattcgcccgttatccaagatttactcatctcgtgctttgaaaaatgggataccattgaagctattgatatccttcagaaactcaaactggaagatgcctggctgatagaatacagagatgaggtcatagaacaactaaagagtaaagaaatgagtgcataaagcgggggctttctatggcatattatgtgcgcaaatttgcacgtgcaaagtggtctcttttagaaaaggagactgaagatattattgataattataaagctgatacaattgcaaatgatatgcgcacaaccggaaacacattgtcattatggaaagtcgatagcctgtcggataccgacattgagcctgtcattgtaattaacagtttattgggcgatactatctcaaaattagatttgatattcattccagaacaactcatagaaaactatactcttgagcagaaggatggaaatactgttgttgcaaattatagcaaccttcattacaatgtaacgcagttgacagtaggaaaacacattctttttgcgaaagaaataatgctaaagttaattgctcttgaaaaccaaagtagcaaacagccggattaccaaccacttatccggcgataccaagaaaaaaagcagctggaaatgatagaaaagtggatacagaagggtgaaattgactttagccaattaaaagaaaagcaacagaaagccattacagatcagcgtagtacaactgagcaataaattggtggtaaactacgtattgaagcacatctccgaagcccggttgcaggggcatgtaaccgatgggtttgggagcctggttgaagcggtacccccctgttggagaaacctaaaaactcaatatcacaatctttcctatttggaggacatagcttagctgggagcccgggtacattggctaactccccttcaaaaactatggaaaatgccgctcaaatctattttgagcggcgtgactttcaatttaatgtttttacgataaaacctcttgctgacggcttgcaaaccattgatatgactggatttttccaagtcctataattacactcggaccaccacaccgagtctggatgcggatttgcgttccaggctctttttgtttgcttccataagcgtcacgcggcgcaagaaccggaatcgctggcgcctatgatccggctgagtctggacacagttctgtgttccaggctcttttttctgcacggagcggttctgatgcgattttctccggggcggctgtttccgggctgccgggactgtataggggctgtccggcggggcaatacttcctccaaacgaaggaaggtgatgctatgcgaatccccaagcatatcgggattataccggatgggaaccggcgctgggccagtcaggcggggctggagaaaaaggacggctatatccacgggctgaccccgggactggaactgctgcggcttgcccgtcaggccggagtgggggagatcacatactatggatttaccaccgataactgcggccggccccaggaacaggtccgggcattttccgccgcctgtgtggaggctgtgaagctgatcgcagccgagccggtttcgctgctggtgatcgggaatactgaggcggcagtgttccccaaagagctgctgccctataccggagcccgtgccgatctgaatggcggcggcatccgggtgaatttcctggtgaactacggctgggaatgggatcttgccggtctgaaccgtcccggaagtgaccggaagcagatttacagggaactgcattcccatgatgtgtcccgggtggatcttgtgatccgctggggcggcatgcgccggctgtccggattcctgccggtgcagtcggtctatgcggatttctatgtggtggaccggctctggcccgatttccagcccgaggatttccatcaggcgctggcctggtaccagaagcaggatattaccctgggcggctgaccgccgcagcatttccccaagaccagctcacagccgtccggcagaaaatctgtcgggcggctgtttgtttgtccccgggggaggaacattgacacccgcttttgcgtatggtataatacttatattctctttgcgctgcatcggacttccggaataccgggggaaactacagtacaaactgaacaggccgtgagtcttttcgtatggaaaagctctgggagccgggccgctcaggcggcagcagatgaactgacttatttcgtacatctgtgggacaggaagtatgttccacgggtgtatttttttatacccgggacttacaaactgttgtgatgatgagtgccataagagctgtctttcccattcaggagggtacatttatggacagaaatcaaaaagaagcactggcaatgcgggtctcggtggtgactattctcggcaacctggccctgaccattttcaagctggcagcgggcgttctggctcactccggcgccatgatctccgatgccatccattccggctcggatgtgatgagcacctttgtggtcattgccggagtcaagctatccggtcaggaatcggatcaggaacaccccttcggacatgaacggtttgaatgtgtggcagcgattctgctctcggtgatgctggctgccaccggcgccggaatcggctgggccggcatccagaagatcttcggtggcgccggggaactggttgtccccggacagctcgcgctgatcgccgctgtggtatccatcctctccaaggagggcatgtactggtatacccgggccgccgccaaaaagattgaatcctcggctctgatggcagatgcctggcaccatcgttcggatgccctttcctccatcggcagctttgccggtgtactgggcgcccgtctgggcatgccggtgctggacccggttgccagcgtggtaatctgcctgtttatcctcaaggctgcctgggatatcttccaggacgccatctccaagatgatcgaccgtgcctgccctgctgagatggaagcccggatgcgtactgccgcgctggagcaggagggtgttctggggatcgaccggctccagacccggctgttcggcgaccgcatctatgtggagatcgacattgctgccgatgcggattccactctggcagaggctcacactgttgcggatcgggtacacgactgcatcgaagaggaattccccaaggtcaagcactgcatggtgcatgtcaacccctttactccccagccggttccggaaccctgcatgtaggataagctgattttctgccctccggggcagcacaggcggtatgtggttttccacataccgcttttacattttacgccttgtttagggaaccggcaggtgctacactgaagaaaaaaggacccctctgccggatgcttccggcagatcatgaaatgaggtgttttgtatgaaacgatggattcttctgctctgctgtatcctgctggctctttcggtgaccggctgtaccggggagaattcctcttcggacagcagctcggagccgtcctcttcccagacccagctgcaggaggacccggtggacccggagactgccgccgctttggaactggtggcggaggcagactgcgaagcgcccgatttcctcacagaagagcagcagaccctctaccggaaggcctatacagcttataagcagtttgcgctgtataccgatgggttcggcagtaccgaatggagcccggtgacggtggaggaatatgacaatagcttctgtgtgggcaacggctccatcaccacctggaaggactatgaaaccgccatgctgggcctgttcacatccgattatctggaggagctcaacctcacggtcactgaactggaggacggtaccaccctgcgctatgcccattttgccgactatcaggggcagctggccttttcggacggcgcccggggcagcaatatcacctatctggggccggatacctttgagctgatctcccagactgaggacgagatccggttctatgtcatcggcacctatcaggactatgtggaaaacgaagctggggaactggtgcaggaaggggagatcacccagcagaagtatgagatcgtgctgacccatacagaaaatggctggcggttcagcaagtttgccctgaccatttaagcagggcggcaggggagaagtgtaaaattccggtataatttccatggaaccgcttgcggaatttcgtcatttggtataagattagggctgtgaatctgtgcagcaggctgaatgatctgttggagcgggatctgtccggggacagacctgcatccgaaaaaccatcacacagccgatctgtccggaggagccaaactattttgattacgctgtatccgtatcaaggcggaacggcagtaaggagatcctgacaaatgaatctgaatcagaaaacggtccgtctgagccggcttgcgctgttttcggcgctgattttgctgctcaactacaccccgctgggctatatccgtgtctttgcactggagatcaccctcatcatcattccggtgaccctgggtgccatgctcctgggcccggcagacggcgccatcctcggcggcgtctttggcctgaccagctttgccacctgctttggttccagccagttcggtgtcactctgctggcgatcaaccccatcggcaccttcatcacctgtgtggtggcccgggtgctggctggcggtctcaccggcctggtgtttgagcgcctgcaccgctcggaaaagctccgccccatctcctatgcagtgggcggtctgcttggcccggtgttcaataccctgttcttcatgagctgcatcgtgctgttcttctggaacaccgagtttatccagggcatggctgccaccatgggcgccgccaatcccctgaccttcgtggtgctgttcgtgggcatcaatgcagtctttgaaacagtggtcagcttcctggtgtccaccgccctctgccgggtgctctatccggtggtacaccgcggcactgctgccatcgcagcctgactttccctctgatctttccccggagcctctgtcccatctatgggacggaggctttttctttgtttctatccgggagggattgtgttaaaatgaaggcagatcatctttttacgcagtcaggagggacaccatgctgcagctcattttaggccgggccggaagcggcaagaccaccgaactctaccggcggatcggacaggtggcagaagccggcggacaggccattctgctggtgccggaacagttctcctttgaaaacgaacgggaactctatctccgtctgggaccggagctctcctcccgggtggaggtgctgggcttcgggcgcctgtgcgataatgtattccggtattacggcggtctggcgggacgggcgctggacgatacagcccggcgcatcctcatgggggtgaccctccaggagatgggcagcggtctggaggtctatgcggcccaggcggacaagcccggcttcatcgaggacatgatcggtgagatcggcgaactcaaggcggcaggcgtcacacctgaccgtctgttcggccttgccctgcccggaaatccctccctgaccgagaagatcggcgacattgcttcgatctatgccgcctatcaggcgcttatcgaccgcagttatctggacggcgaggacgacctgatccgggcggtgcagatgctcagtccccgggaattcttcggtggggtgagcgtattcatcgactcctttaccgcctttatggaggcggaatatcagatgctcggcgccatgctggcgggggcatcggatgtgaccgccgcctttacctgtgacgggctggacgatcccgaccagggtctgggcgtcttttccgcctcgaaggagagtgctgcccggctggtgcagatggccggggacagtgctgtgccggtggcagagcccatcctcatgggagagccgctgcggttccagagcgagggactccggcgggtggagcagtacttcctgcgccccactgccggagggaaaccgtccggggagggggtcatcctggtccgggctgccgatccctatgaggagattgcggcggtggcggcttccatctgcgaggatgtgcgccggcggggactgcgctacaaggagatcgcggtgatctgccgggatcttgcgccctatcgcatcgcgctggagcgcaccttcggaaagtatggcattcccttctttgccgacctgccccagggggcggcggataccccagcggtatcggcagtgcgggcggcgctggactgtgccgccgagggctttacggcggggaatatcctgcggtttgccaaggcggcagccgtgggtatcgaccccgaagccgccgctgagctggaaaactactgctatgtgtggaatgtgggccgccgggactggcagaagccctttgagaaccatccggggggcttccaggcggagttttcgcccgaggacaccgcccgtctggagcgcatcaatggggtgcgcagccgggtgatcctgccgctggaacggttccgccgggagctgagggaagcagacggcccgggattttccacagcggtctatcacctgctggagagcatcggggcggcggaccatatcgaggccctctgccgtgccgccgaaccggaggaggaacggctgcggcagctggaagaacaggaccgggtctgggaagagctgatgaacctgctggacaccctggcggcggcgatcggaccccggcggctgccgctgcgggtgctggcaagcctctttgacagcggtgccgctgccatccgcatcggggagatcccccagacgctggatcaggtcattgtcggcacagccgaccgcatccgtcccactggcatccgcagcgcctatgtcatcggtgcgtccgccggggtatttccggcagcctgcggcagtgtgggactctttggggaaaacgagcgtgcccagctcatctcggcgggactgcagctctcccagaccgcccgggtacaggccgtgcgggaaaaattctacgcctactttgcggtgacagtgccgtcagagcggctgtggatcagctggcctgccgccggtctggacggcagcagcaatacgccgtcggtgatcgtcaccgaggcacaggcgctcaccggagctgctccccgcacgccggaacagctcggcctctccggggcggtgaaccggtcggttgccatggagcagctggcggcgggttccggatctccggagtaccgcagcgctctgcgggcggcgctggacagcggcttttcgctggaggaacatgccgatgccgcatacagctaccgggcggcgctttcggatctgggactggcccggcggctgttcggcggggatatgaccctctccgccaccaggctggagaagttctatggctgtccctatgcctatttctgccggtacggcctggggctcaccccccggagccgggcggagctcagcccgctggagctgggcaatgtgatccacctggcgctggaggagctgctccggcgctacaccccggaacagctccgggatctggaggacagcgccctgcgccgggagatccgctccattgccgacggctccctctccgcccgcacccaggaccgggacgccctgcccaagcggttcttctacctctatgggcgcatggtggatcagatcttccggctggtgcggatgctggcccaggagctctgtcagagcgagttccggcctctgcggttcgagtaccccatcggcgaacaggagggcacccgtccgctgcgccttgacactgcctcgggcgatgaggtccgggtggagggcaaggtggaccgggtggactgctatcacggcagcgaccgggactatatccgggtcatcgactacaagaccggcggcaagaaatttgacctttcggaagtggtgcaggggctcaatatgcagatgctgctctatctgttcaccctgggggaaaacggcgtggccgatcttcccagccccggggaagcaggtgttttgtatatgccgggcagcgggcatttcacccgggaccgccgggacgccagcgccgagagcattgccgaggatcagcgcaagagctactgcatgagcggcatggtgctggacaatcccgaggtcatcgaggccatggaactgggcaccgccgggcggtatatcccggtgagcctcaaaaaggacggcagctatacagcgacaagctcggtgatcaccgaggaacagctcggactgctgcgccggcagatcgccggcaatgtggtgcggatggcggagctgctgcatgagggaaaaatcggggcagtgccggcgaaccggaacggacgcctgccctgtgaatactgcgactaccggtctgtgtgcggacgggaggcagaatggcctgaccgcccggtggtcaagctggaaaaagcggagatttatgagcaactggaaggaggacagctggcatggcagatgtgacctggaccgaagaacagctggcggcgatcacagcccggaacccgggcattctggtgtcggcgggagcgggcagcggcaagacggcggtgctcaccgagcgggtggtgcagcgcatctttgacccggtggacccggtggacgccgaccggatgctcatcgtcacttttacccgggcagccgcggaggagatgcgggagcgcattgctatcaaactccgggccgtgcagcgggaacaccccgaggacagttcggtggcccggcagctcattctgctggaaaaggcggacatcagcacggtgcacgccttctgccagcgcatcgtgaaggagaacttccagctgctggatattcagagcggcttccgcattgccgatgaaaaggagctggaggtctggcgcaccgaagccgccggagagatccttgaggaggaatatgccgccggggaggagagttttctctcgctggtggagctgctctcggaggagcgcagcgaccgccgggtgaccgataccctgctgcggctctacgattttgtgcgggcgcatccgttctatgaggcctggctggaacaggcgctggagcgctaccgcagcgaagcccccatcggcggaaccgactggggaaagctgctcatttccgatgctctttcggaggccagacaggcgctggaagccatggaggaagcccgggacctgctggacggcgacgagaagatccagaaggcctacggcagctatgtagccaccctgtatgcggcggcaaaagggattctggactgcctcaccgccggggactgggacggcgcctatcaggcggcacagcacattgacggacggttttcggctctgcggggctatgaggacgagtggaaaaaggcccgggtgactgctctgcgggatcaggccaaggagctgctggaagacctgcgggacgaggtattcctctgcaccgaggaacagttccagtccgaccgccgggcgctgctgcccatggtggaaaaactctttgccatgacggcggaactggaccgccggtatgccgagcgcaagcgggcccagaatgccctggacttctctgacctggagcatctggcgatccggctgctcatcgagcgcagcccggagggggaggagcatcccacccgtctggcagaggagctctcccggcagttccggcaggtgttcgtggacgagtaccaggataccaacgccgtacaggaccgcatcttccgggcggtgtcggacaacggacggaacctctttatggtgggcgatgtcaagcagagtatctaccggttccggcaggccgacccggcgatcttcttggaaaagaaggagcagtttgccccctggcctgtggaggaggaccagccggcggcaatttcgctcaataggaacttccgcagccggcaggaggtcaccgagggaatcaacttcctctttgagcagaccatgagccggacggtaggggagatggactaccgggacggcgaacagcttcaggccggggcagtctatcctccggcggagggctgcgggtgcgaggtgcatctggtgcagaagcagaagggcgaggattccgcccgggaacaggaggccgaatacattgccggcctcattgaagagatgatccatagcgggtaccaggtatcggatcacggggtgatgcgcccggtgcgtccggcggatatctgtatcctgctgcggtcggtgaaggacaaggccggggtctatctccaggcgctggaaaagcggggcatcagcggcatcggggaaaatggcggcggctatctgtacagccgggagatctcggcggtgctgtcgctgctccgggcggtggacaaccccctgctggacatcgacctggctgctgccatgctctcgccgctggcggccttcacccccgatgaactggcggagatccggctgaagggccgggaccgctcgctctatgcctgtctggtgctgcatgcccaggagaacgcaaaatccgcggacttcctccggctggtgcagcacctccgggcgaggtcggcgggaatccccgtgagccggctcatcaccgagctctatgacctcaccggctttgaggcggtggcccggtcgatggaaaacgggcgtcagcgtctgcagaatctgcggctgcttccggagtatgccgctggctatgaggagcggggctattcggggctgtccgccttcctgcggctcatcgaccgtctggtggaatccggggcggacctggacaagggcaccgtggtatccgccggggagaataccgtcaccgtcatgagcatccacaagtccaagggactggaattcccggtggtgatcctggcggactgcggcaagaccttcaaccggcaggacctctcggctccggcgctgctccatggcaagctgggctttgcctgccggctccgggatcagcagcgccggctggaatacgataccctgcccttagctgccctgcgccggaagctgggtgccgagctgtgcagcgaggaactgcggatgctctatgtggcgctcacccgggcacgggagcggctgatcctggtggggaccgtttccaccacccaggacaaattctgtgccaaggaggtcaccgacctcgaggacggacggctgccggctgcggcagtgcggggcggcagcacctatctggactggatcgtcatggcgctgcttcaccacccggacggcactgctctccgggagctggcggactgcgaagaggaattcccggcctcctgtccgggacacttccggatcttcaccgggctggaggcggaatcccggacggcagaggctgccccggaggaggaactgcccccgcctgacccggcgctcaccgaggagctccggcaggagatggactggcagtatccctggcaggacgccaccgagctctcctccaaatttgccatctcccatctggcagaagaggtgggcgaggtggagaagccccggttcgccgcgcgcccggcctacctttataaacaggggctcactccggcggaaaagggcagcgccatgcacacctatatgcagttctgcagctatccggcggcggcacgggacgccgatgccgagctggagcgtctgatggcggaccgcttcctcaccgaggaacagggcgctgccatcgaaaccgaccgcatccgcaccttctttgaatcgccgctctaccggcgcattgccggggcccggcaggtgtggcgggagtaccgcttcctggcggtgatcggcgaggaggagctcgccggtctggccgatgccgggctgggggagaaccgcaccaccgtccagggcgtagccgactgcatctttgaagaggaggacggcattgtcatcgtggactacaagaccgaccgggtcttttccgaggacgcgctccgggagcgttaccgggtgcagctggggctctatggtcggctcatcgggcgggcactgggacgcccggtgaaggaatgtctgctctactcctttgccctgggccggaccatcgaagtgccgttttaagagcacaggccgggacagtataacggcttgccgggaccctgaccgccagtgagggttccattgcggcaatggtggggcgggttcttccctcttttggaaaaatgaggaccgaacatcggggaagaggcctgtcaatccgcagatgcaactgctggttgacagatagttggtcgacagcaaccgggatttcaggtacaatatgggtacagcagaaataccgggaggtgttcatcatggctttgggcgaaaatatcaggaagcggcgggaagaactcaggctgtcccagggatatgtggcggaacagctgggcgtcagcagacaggccgtatccaaatgggaaacgggtcagtccgagccaaccgcaggcaatctggttcagctggcggaggtgttcgggatcagcctgtccgaactggttgaaccccagcgggacagcggggaacaatcgccttccggagaggaacgggctgggaaaaagcccaatcttatcctgcgggccaatctgatcaggattgcgatcaccgcacaggcggcctttttgttcacctgcacctcgatgatctaccagttccagcacgctgatctccccgaaaagaacctctaccgtggggcggtgatcttctcactggtgatgctgacgctcagttccatctggatggcagccaatcaccgctatgaggcggacaaaaaccagcgccggaaaaatacaaggatcgagcttgtctactgctgtatccagctgctggtgggtctgctgacgatccgctttggcatgggccttgcgggcggggtgatcatgatcgcggtcggcagtgtctatctcctgtacatcaaccccaggttcatggcccgccggctgacgaaatgagagaaaaaacggttctttcccggaaccggggagagatgaaaaaagtgcttgacattccggtggggagctggtatactgttctggtaaatcgagtagagcggtagttcgctttcaccggtgcgcgatcaagcagcacatggtagatacgggttcatggacggtttcccaagggggatcgttttgtgatgtgtgtttatcagagcgtgggcggaatactgcctgcgctttatctttttattcagtctaatggaggtgcgttagcattaaggatttgccgatcaatgaagaaatccgcgacaaggaagtacgagtgatcgataccgatggcagccagctgggcattatgtccgcccgggacgcctacaagatcgctctggaaaagaatctggatctggtgaagattgcgccccaggccactccgcctgtgtgccgcatcatcgactatggcaagtaccggttcgagcagtccaagcgcgaaaaggaagccagaaagaatcagaaaaccattgatatcaaggagatccgtctttcgctgaatattgatgtcaacgacttcaatacaaaggtaaagcaggccatcaagttcctggagggcggcgataaggtcaaggtttcgatccgtttccgcggtcgtgaaatggcccacccggaactgggtaccaccatcatgcagcgttttaccgaaagcgtagccggatacggcacggtggaaaagcagccgaagctggaaggccgcagcatgaccatgtttgttaccgcaaagaatggtaagtaaaatttagggaggattcattattatgccgaagcttaagacacacagcggagccaagaagcgcttcaagatgaccaagaagggcaagatcaagagagctcaggctttcagaagacatattctgaacaagaagagcaccaagcgtaagagactgctgagaaaggctgcctatgtacatggcaccaacctgaaggctctcagactgctgatgccttacaagtaagccgaccgcttgctgaaaaaatcggatcactactttattgtataaactcttggaggtataggaaatggctcgtatcaagggcgcggttatgacccgcaaaagaagaaagaagactctgaagctcgccaagggctacttcggcgcaaagagcaagagatttaagatggcgaagcaggccgtgatgaagtccggtcagtatgcttacatcggcagaaagcagaagaagagaaacttccgctctctgtggatcacccgtatttcggctgcctgccgcatgaacggtgtgaactactccacctttatgaacggtctgaagaaggctggcatcaccctgaaccgcaagatgctctctgagctggctatcaacgatgctgccgctttcaccgctctggtagagaaggctaaggctgctctctaatttttcgcacagaaacgcccgtttttcacagaaagcgggcgttttttgatacctggaaacactgccggaatcagtccggcggattgacaagaggcacactctgggcatacaataggaaattgaacaaagcccccggttctgccgggagaaaaggaacggtgaccgtgcaggaaatcacatcttcacagaatccccggatcaaggaactggtcaggctctccagccagaaaaaggagaggagcctgagcggtctttttgtcgtggaatcggctaaactcgtggaggaagcagcccttgccggcatcggcattgaggcgctctaccgcaccgatgaagccgccgaaaaatatgcaccctatctcgccccggcccaggcagcctgcggcagtgaggtgcgcatcacccgtccggtggcggaaaagctggcggcgtcccagcatacccagggggtctttgccctctgccgtatccccgagccctccctcactgcggagagcctgtcgccccagggacgctatctggtgctcagctcgctccaggacccgggcaacatcggcgctgtgcttcgttcagccctggccttcggctgtgacgggctgatcctctcggacgactgccccgacctgtacagccccaaggtgctgcgggctgccatgggcggcgtgttccgccagccggtgctggtgagccgggatctgcctgagctgatccgctccatgcgggaaaagggcatcgacaccctggcagctgccctggaccgctctgccatgaccagcgatgaagcccggctcgaccgggacggcgtggcggtggtcatcggcaatgagggctccggtctttccaccggaatgatcgaagcctgtggaaaaacagtgtttatccccatctcggcccggtccgagagcctcaatgcctcggtggctgccagcattttcctgtgggaaatgcgccgccggggataaccggacgatttctttgggagttgggagggaatcctatggaacaggctgtttattggctgtggttcgccgggctgttcgggcggggaacccggctttcccatgaaatgctggagttctacggctcggccaaggcagtctttgaggcgtcggagcaggaactgcggcagaccgccctgctcacccgggaacagatcgcccgggtgctgtgccatgacaccgatgcggcccagcgtcagtatgacgaggcgctgcgggagggctgccgggtgctcactcccggggacgacgaatatcccgactgtctgcggcatatctatgcaccgccgtccgccctgttcctgcggggaagcctggcggggctggaggagcggcctgccattgcggtggtgggttcccggcacagcgatgaatatggcctgaccgtagcttcccggctttcggaggagctggcggcagccggggtgagcattgtcagcgggcttgccatggggatcgatcaggcggcacatcgggccgctatcaaagccgagggcgtcacaatcggcgttttgggctgtggtatcgaactcgattaccccaagggcacccgtcccctccgggaactgatggcagaaaagggcgctgtcctcaccgaatatccggtgggagagccggcccgcccggggaacttccccatgcgcaaccgcatcatctcgggactgtcccggggtgtgctggtggtgcgggcggacgagtacagcggttcgctcatcactgccgggcatgccctcagtcaggggcgggatgtgttcaccgtgccgggacgcatcgacgaaaccctctcccggggtaccaacaagctgctgctccagggcgccaaaccggtgacctgtgccggggatattctggaggagtatgcctcggtgcccagctggggcaggagcgttcccagtcaggtcacacccgatccggtgcggctgcgctccgggagccgtccccgtccccagcgcaagccatcgggacagcgatccggtctgccggcagatccggcggcctgccctgatccgccccggcgcagggctgtccctgagtatctcagccgcagccaggcggacctgctcgggcagatcggttcccagccggtcacagctgcccagctggcagtccagaccgggcgtccggtgggggagatcctctcctcgctcagtgagctggagatctatggactgatcgagagccatggcccgctgggctatacggcactctgattctatatgaaatgttccggccttcgggccgtttggcagacggttcttttcattcgggaaccgtccgataaaggagtggaaacgatatgtcaaatctggtgattgtggagagccccgcaaaggccaaaacgatcaagaaatatctcggttccggctatgaagtggtggcgtccatgggacacatccgcgacctgcccaagagcaagatcggcgtggacatcgaacacggcttcaaaccggactacattgaaatgaaggacaagaaggagcttatctcgtcgctgaagaagcaggcgaaaaagagcgacaaggtctatctggcaaccgacccggacagggaaggcgaggccatctcctggcatctggcctatatcctggggctggatctcaacgatcagaaccgtgtgaccttcaatgagatcaccaagagcggtgtgaaaaatggtatggaacacccccgcaccatcaacattgacctggtgaacgcccagcaggcccgccgtatcctcgaccggatcgtgggctacaagctgtccccgttcctgtggaaaaaggtgcgccggggtctctctgccggacgggtgcagtcggtgactgtccgcctgatctgcgaccgggaagaggagatccgcaagttcgtttcggaggagtactggaccatcgacgccaagctgctggcctcgggcagccgcagtccctttgccgccaagttctacggcacccccgagggcaagatggagcttgccaaccaggaggagaccgaccgcatcctggcagagctggaaggggaagccttcaccgttggagcggtgaagaagggcatccgcagaaagagcccggcaccgcccttctccacctcgaccctccagcaggaggcctcccgcaagctgggcttccaggcccgccgcaccatgaaggcagcccaggagctctacgaaggcgtggaggtggcgggcatgggcgccgtgggtctcattacctacatgcgtaccgactcgctgcgtatctcggacgaggcccaggcagacgctgccaagtacatcggcgaaaagttcggcacccagtacctgccgccgtccaagcgggtgtataagtccaaatccaatgcccaggatggacatgaggccatccgtcccaccatgatcgaaatgagcccggacaaggtcaaggacagcctctctgccgaccagtacaagctctacaagctcatctgggagcggttccttgccagccagatggcaaatgccctctacaatacagtggcagcggatattcacgccggcaagtacctgttcaaggcctcgggcttcagtgtgaagtttgacggtttcaccaccctctacgaggagggccgggacgacgctgaggacgccgaaggcaagctgccgcccattgaaaccggcgacgccctcaaggtgaaatccctgggcggcaaccagcacttcacccagccgccggcccggtacaccgaagcctctctcatcaaaacgctggaggaaaacggcatcggacgcccgagcacctatgcccccaccatcaccactattctggcccggggctatatcgagcgggaacagaaggccctgaaacccaccattctgggcgaagtgaccaccaagctcatggaggagcagttcccgaacattgtcaatgtgaagttcaccgccaacatggaaaagagcctggacgaggtggaagagggcaaggaggactgggtcagcaccctgagcgagttctatgacgagttctccgccaccctggaacaggcggaaaagaatatggaaggcacccgggtgaagatccccgatgaggcaaccgacatcatctgtgagaagtgcggacgccccatggtgatccgtctgggccggtacggcaagttcctggcctgttccggtttccccgagtgcaccaacacccgccgtctggtggacaccggcggcatctgtcccaagtgcggcggacgcatcgtggtgaagaagtccaagagcggacgcagcttctatggctgtgaaaactatcccacctgcgactttatgacctgggataagcccatcgaggagaaatgtccccggtgcggcagcaccctgttcaaaaagacaggacgctttgccaagatccactgcctgaaggaaggctgcggctatgaaaagggggtatccaaggaatgacccctgtcactgtggtaggagccggattcgccggctgtgaagccgcctggaccctggctcagaacggcattcccatcaccctctgggagatgaagccccagaagttttccccggcgcatcactccccggactttgccgagctgatctgctccaactccttcaaggccagccgtctggaatcggcggcaggtctactcaaggcggagatggaacggctggggagcctttgtgtcccctgtgccaaggagacagctgtggctgccggcggcgccctggctgtggaccgggaccgattctcggcgctggtcaccgaaaagatccgcaatcatccgctcatcaccgtccgggagggcgaggtcacagagattccggacgggaatgtgatcatcgccaccggcccgctcacctctgaggcgctttccgccgccatcggagagctgatctcggcggagtatctcagcttctttgacgccgccgcccccattgtggaggcgtccagcatcgatatggacaaggtgttcttcgccgcccggtacggccggggggacgatgactacatcaactgcccctttgacaaggagggctatgagaagttcgccgaggaactggcaaacgccgagagcgtggagctcaaggagtttgaaaagcgggacttcaaggtctatgagggctgtatgcccattgaagttatggcccgccggggcgctgacaccatgcggttcggccccctcaagccggtggggctccgggacccgaaaaccggtcaccgtccctgggcagcggtccagctgcgccgggagaatgaggccggcaccctctacaacattgtcggcttccagaccaacctcaaattcccggaacagaagcgggtattctcgatgatccccggtctggaacacgcggtctttgcccggtatggcgtcatgcaccgcaatacctttatgaattcgcccaagctgctccatgcggacttctcgctgcgcagtgacccccgcatcttcttcgccggtcagatgaccggcgtggaggggtatatggagtcggcttcgtcgggtctgatcgccggcattgccatggcccggcggctgcggggacttcccccgctggagctgcccgaaaccaccatgctcggcgcgctgacccggtatatcagctcgtccacggcggaggatttccagcccatgggcagcaatatgggcatcctgccgccccttcccgagaagatcaagggcaaggcggagcgctacggcgcactggctgcccgtgccatgcaggatctggaacagaccctgagagatttggaggcataagctatgaaaattatcgttgacgcgttcggcggcgaccatgcgccgctggctgtgatagaaggctgccgtcaggcagtggacgagctgggggcagagatcctgctcaccggtgatgaggagaagatccgtcaggctgctgctgaggcgaagatctccctggacggtatggagattgtccatgcgccgtcggtgatcccggtggaggaggaccccaccaccctgctcaagaagtacgctgattcctcgatggcagtgggtctgcgcctgctcagcgagggcaagggcgaggcctttgtgtccgccggaagcaccggcgccctggtggtgggctccaccctcattgtcaagcgtgtaaagggcgtgcgccgcatcgccatcggcaccctggttcccaacgccggagccggttacctgctggtggacgccggcgccaaccatgactgccgtccggagatgctcctgcagtttgccctcatgggcagcgcctatatggaaaaggtgcagggtatcccgaagccccgggtgggcctggtgaacatcggtaccgaggagaacaagggcacccagctccagctggatgtgctgcccctgctcaaggaggcgcccatccacttcaccggcaatgtggaggcccggggtctgcccctgggcgaagtggatgtcgccgtgaccgacggcttcaccggcaacatcattctcaagaccaccgagggcatgggcaagttcttctccaatgagctcaaatccatggtcaagagcttcccgggcgtgctgggcggtctgctgctggcgggcaagctcaaggctctcaagaagaagtccgactccaacgaggccggcggcgctccgctgctgggtctgcgcaagccggtcatcaaggcccatggcagctccaatgccaaggccttcaagaacgccatccgccaggccatgacctgccatcagaacaatatggtcggcctgattgaagaatatatggaaagctaccgtgcagctgaggccgttgccaaggcagaagctgccgccggagaggaggaagcacagtgagagagatgcatgagctggaaaaaaccatcggctatgagttcaaaaatgagggatacctgcgcactgcgctgacccattcctcctatgccaatgagatgcgctcccgctgcccgtacaatgagcggcaggagttcctgggggacgcggtgctgtccatcatcgtgtccgactacctgttcaagagctcccatctggcagagggcgacctgaccaagctgcgggcctccattgtctgcgagaagtcgctctggggctgggccaaggagatccacctcggcgattatatcctgctgggcaagggcgaagagaactccggcggacgggaacgcccctccatccaggccgatgcctttgaggcactcatcgccgccgtctatctggacagcggcatggagcgcacccgggaattcctgatgccctttgtgctgcgcagcctggaaaacgaggaaaagcccgccttcaaggactacaagaccctgctgcaggagatcgtccagaagaaccccgaggaacagctcagctatgagctggtggaggagcgcggccccgaccacgacaagacctttgtggtgcaggtgaagatcaactccaatgtcatcgggcacggcgagggcaagagcaagaaggccgcggaacagatggctgccaaggaagccgtcgagctcatgggagaataaggtgaagcacgccaacatcgccctgtttgtgccgcatatcggctgccctcaccggtgcagcttctgcgaccagaacgccatctccggagcggagtgtccgccggagcccggcgatgtcaccgccgcctgtgaaacggccctacaaagcctgggcagccgggcggctgaggcggagatcgccttcttcggtgggagtttcaccgccatcgaccgggggtatatgctccggctgctggacgctgccctcccctatgtccgggcggggaaggtgcggggtatccggctctccacccgtcccgacgccgtggagccggaggtgctttcccttctgcgggagtacggcgtcaccaccatcgagctgggcgcccagtccatggacgaccgggtgctggaactcaacgggcggggtcataccgcggaccaggtgcgccgggcggcgtgccgggtgcgggagatgggcttttcgctggggcttcagatgatgaccggcctgcccggggatacctctgagggcgcctggtacaccgcccgggagctggcagccctctccccggcggaggtgcgcatctatcccacggtggtgctggacggcacccgcatgggggagtggtaccgccagggcatttaccagccgccgggagtccgggagagtgttccactctgcgccgggctgctggactttttcgaaggccggggcatccgggtgattcgcctggggctccatgccagccggtcgctggaggagcgtctgctgggcggggcatatcatccggcgttccgggaactgtgcgaaggggaactgctggtgcagcggctgctccggggccttgccgggcgtgttcccggcccggtgacggtgcggctcaatccccgggaccggtcgaagttcatcgggccgcgccggcagaacctgacccgtctggcagagctgggctggcaggtcaccatccgggaagatacagagatcccggcgggacagatcctgccggagttggaataaaaaacggacggctgtccgtcccgaatcggcgcagcagcgcagactggggacagacagcggcagaaccgagaggagtgagggaattttgcagatcaaatcgctggagatccagggcttcaagtcctttcccgacaaggtgaagctcacctttgaccaggggatcaccgctgtggtaggccccaacggcagcggcaagagcaatattgtggacgccgtgcgctgggtgttcggagaacagtccaccaagaccctccggggcagccgtatggaagatgtgattttcggcggtactgccaagcgcaaaccccagggcagtgccatggtcaatctggtgctggacaactcggaccgtctgctgccggtggacagcgatgagatctccatcacccgcaaactctaccgttcaggtgagagtgagtaccgtctgggcggcgcttcggtgcgtctcaaggatatctatgagctgtttatggataccggcctgggacgggacggctattcggtcatcggacagggacgcatcgcggagatcatctccagccgcagttccgagcgccgggagatcttcgaggaggcagcgggcatctccaagtaccgctaccgccggggtgaagcccagcgccgtctggatgccgccgaggagaacatgctccggctccgggacattctctcggaactggagggacgggtggaaccgctgcgcaaagaggcggaaaaggcccgggaatacctggcgctggcagacgagcgccgcaccctggagatcggcgtgtggctggcgaagatcgaccagctctccgcccagtaccgggagctgcaggacaagttcctggcagcccggggcgagtatgacagcctggcccgggaagaggagggcatggaggagcggatcaatctgctctacacccagatgcaggactgtgctgtcacagcggacggactccgcacccgtctgcgggaatgggaggcggaggcagcccagatccggtcggatcaggcggtgggggagaacaacatcgcccacagccgggagagcatcgcctcgctggaagcggagcaccgtcaggggctggaacacaccgatgccgatcaggctgctgccgctgaggcggagaagcgcattgccgccctggaacaggccggggaggagatccgcagccgcctgaccgaggaaacagcccgtgcccagcagaacgaaaagcagctggcagagctggacggggagatcgaatccctcaagttccggcgcaccgccatctataaacagatcgatgatgccagattctccggggcagcgagccagtcgctgctggaggagacccaccgccgtctggaggaaatccgccaggcaagcggcagccgggacggggaactggagcgcacccggcaggagctggcggagtgcgaggaactgctcgccggcactgatgcccggcaggaggagttccagaatgcccggaagggctgggagatgcgcctgcaaagccggaaggaacgctggcagcagctggcggatcagcttgccgctgtacagaatgaagcggcccagaagcgccagcgggcgggcatcctcgagggaatggaaaagagcctggaaggctatacatacagcgtaaagtttatcctgcagcagagcagccggggaatgctccggggcgtacatggatcggtgtcccagctggtggcagctgccgacccccggtactccaccgccattgagatcgccctgggcgccggtatgcagaacattgtcgtggaggacgaaaacgccgccaagcagtgcatccgcctgctggaccgggaacgcaagggccgtgccaccttcctgcccatgacggcagtgcggggacggcgcatggacgaccgggagtttgccggcatggagggcgccgtgggcattgcctcgtcgctggtcactgctgagagccgttactccggcattgtggagcatctgctcggacgcatcctcatcgctgaggatctggactgcgccgtcaccattgccaagcggtgcggttacaaattccgcatcgtcaccctggacgggcaggtcatcaacaccggcggcgccatgaccggcggttatactgccaagagcgccggtctgctgggacggcggggcgagatcgaccagctggaagccgaagccgctgccctggagcagaaggctgcggaacaggagcgcaccctcaccgccgccagggaggagatcagccgcatcgaagcgcagatctggagcattgacgccggtctgcgggaggtatcggacgaccgcatccgggccgagggggagaagaagcgcctggaacagatccttgcttcggcgggggaatccgccgccaaggaaaaggcggaggaagcggcgctggcagcccgtgtggaacagctcaccggcgagaaccgcagtgcggaaacggtgctgtccgggctgaccggagagctggatcaggtttccgctaagattgaagccctgcaggaggagcgtcgaaaggcagatgaagccggacgggatcaggagcgccgcaaggcggccctggatctgcagcggctggaacaggagaaggatctggcggcggcaaaggcggaacaggaacgcctgaccgcccggcaggaggacagccggaaccgtctggcagagatccgggagcggatcgctgaactggagcgctccatccagaccgaccgcagtgccattgaggccgggtcgatgcgtctggagcagctggcggaacagaccgtcactgccaatgagcgcatccgccagagtgaggagacccgccgcgactgcgaacagaaggtgagcagtctgcgttcccagagccgggagctctccgcccgcaaggaaacccatgcccgggaagccgcccgtctggacgaacggctccaggcagcgggcagcgagcgggatcaggtggtcgccaagctgtgggagagctatgagctcacccccaccatggcagtgcagcaggtgtccgctcccgaggacccggcggaggccgagcgccgtctgacagcggtgcgcagccgcatccggggtctgggcagcgtcaatgtgggcgctgtggaggaatatgaggaggtatcccagcgatatagcttcctgtccgcccagctggacgatgtggaaaagtccaagcgggaactgggcaggctcatcgaggagctcacctcccagatgcgtcagctcttcctggagagcttcggggagatcaaccgtcacttcggacagatcttcaccgagctgttcggcggaggccgggcagaactgctgctggaagaccctgctgatcccctgggctgcggcatcgagatcaaggtgcagcccccgggcaaggtcatcaagaacctggcggcgctctcgggcggcgaacaggcctttgtggcgatcgccatctactttgccatcctcaaggtgaacccggcgccctttgttatcctcgacgagatcgaggcggcgctggacgatgtgaatgtagccaaatatgcccggtacctgcgcagcatgaccggtcatacccagttcattgccatcacccaccgccgtggtaccatggaggaagccgatgtactgtacggtgtcaccatgcaggaggaaggcgtatccaagctcatcgaactgcgggtgggcgaactggaggaaaaactcgggatcggtgcgggccagaatgcctgaccgaccccgttaggaggatactatgggattttttgaaaagatcagcgccgggctgaaaaagacccgggattcgctgatgggccgtctggaggatctggctgccggttttaccaaggtggacgaggacttctttgacgagctggaagaaacactcatcatgggcgatgtgggcgccaatgtgaccatgcgcatcatggacgagctccgggaccgggtacgccatgccggcatcaccgagcccactgaggtcatcggacagctgcgggagatcatcaccggcctgatgggggaggagagcccgctggatctctccaccaagccctcggtggtgctggtgatcggcgtcaacggcgtgggcaagaccaccaccatcggcaagatggcggcctatctccggggcgagggcaagcaggtgctgctggcagcagcggataccttccgtgcggcggcagcggaacagctggcagtctgggcagaccgtgccggtgccgagctgatccgccacgaggagggcagcgacccggcttcggtggtgtttgacgccatccacgccggcaagagccggggcgccgatgtgatcatttgcgataccgccggacgcctgcacaacaagaaaaacctcatggacgagctttccaagatcgcccgggtcatcagccgggaactgcccgacgcggcagtggaggtgctgctggtgctggatgccaccaccggtcagaacgccatctcccaggcccgcagcttccaggaggccgccgggatcaccggtattgtcctcaccaagctggacggcactgccaagggcggcgctgtcatcggcatccgggaggagctgggcgtgccggtgaagttcatcggtgta

SEQ ID NO: 4165 - DNA, 13306 bp, Unknown
  16S sequences of unknown bacteria
cctgctgcgcgctcgtccagctcaaaagcgcgccgctgcccaccagcaacaggcgctgtttcgcgccttcgcgcacttcatccagcagccgggcgcaagtggtggcggcgatgcagcccgcgccgctgccacccgcgtgcgcgtcctgccaatcgtaatagagcgaagcgccgcagtccgtgagcttttcttccggcatatccacaccgcgctcccgcagcagttccagcagcaattcccggccaataacgcccaaatcgccggtgacgacgcggtcgtaatcgcccgcgtccgtgtccgtctgtgcgaaatgcgcgcagatggtatcgcacacggcaggcgccatcaccgcgcccatgtggttcgcgtcgcggattttgcggtctaccacccgccccagcgtgccattcgccacgcacacctgcgccccgtcccggcgcgcgagcagcaccgcgcccgcggccgtggccgtccactgcgcggaaggcgggcgctgcgtgcccagttccagcggattgcggaattgccgctccgccgtgcaaaaatggctgcacgcggcggccatcgcgttttcgcgatacccgccgtccaccagcatggcccccaaaatgagcgcctccacaaatgtggagcacgcgccatacaggcccaaaaaaggcgtgcccaacgcgcgcgcggcgaaagtggaagcgatgatctggttgttcaaatcgccgctgagcagcgcttgcacgttggcgaccgcgattccgcccttttggcagcacaattccaccgtgcgccgcagcatttcgctttccgccatttcccaactgatctggcccagcaaatcctcttcaagcactacgtcaaatttgtcccctagcggcccctgtccctccttcggccccgcaatggaagccgccgaaacgatggccgggcgggtgggaaataccagcgtcctgtccgcgcccatcaaatcaccttccccacaatccagtaaatgatccccacgaggatggatgccgtgatgccgtaggccagcaccggccccgccacggtgaacaggcgcgaacccaggcccaacaccagtccttcccgccgaaactccatggccgaagcggccatcgaattggcaaagcccgtgatgggcacgatagaaccggcgcccgcgtatttgccaatgcggtcgtacacgccaaggcctgtgagcgtggtgcccacaaacacgagcaccatggcggtgaacatgggggtggtgatcaccgtcagttgcagcgcgtcggcccaaaaattcagcgcctgcccgatggagcagatcacgccgcccacccaaaatgcgcgaatatatccctggagtttggggctgccgggcgttttttccttcaccagttgatcataggatttgtctcccgcgtggttacgcatgccgctcccctcccaacaggcgcaggggacgcagcgccgccttcatacgaatttcgcgatcccccggccgggcttcgcgcgcaaggcaaaatatcggaatctgctgccgcattggtcattcctcccgaaaaccgttctttcgccagtatgcgcgcaaatccgcgatttatgcaaagcgaggcggcccaggatgcggccgggttacagagtttccaggtactcttccaggcagaggcctcgctcgtaaatttgcgcggcggcctccacgcccacatagcggtaatgccacacttcttccgctgtgccggtcaagctcgtcttctccccgggatagcggaaaataaaaccatatttgtagctgttcgcttgcagccatggatacacttcccacaccgcgccgttgatgtccacggcaatgcccagttgatgttcgctcgtgccgggcacggccacccatctttgcgcctgccgcacggcctcttccgccgaatacccctgcgcgcggtattcctgaatcttttcgtcgtacaagctctgctgcttttcctgcgtacggtagccggaggcaacgaatggccccagtccttcccgctccgccgcctccagcatggccatgagcggctcataaatgcgttcgtccactttttccccgcccggcacgtctaccagatgcaaatcgtagtcttccggcaggggattccaacgattgaccagcgtcaaattccagggtaactcgccggaatgcgcctccttcgcgggttgaggcgcgtacatgccctgctcccccgccgaatacaaactccagcaggcaatcgccgcaaacaaaatcaagccccatgccaccgtcgaaacgcgccgcttgtatgctcgtgctctcatattctcttccctcccaaaacaaaaatccgtctggtaagcattgtaccagacggatgggagcaagattataatggtctattggggaattcttgagaaaatcctaagccgcttcaatctgccgcgcccagattttcgagcatttcccgcacgcggagtttcgcgcggtacacctcgttgcgcgggcaatgctcctgcgcccgcgcggcggcttcgtccaaagacgcgccatcgagcagcgcggccagcatccactctgccgcgctcctctgcggcgcgggcggctcctcttccgcaggcagagacgaaaaatcgaacaccaccgtatattcgcccttatccgccttgggattggcgtcgagcgcggcgacgatttccgcgggcaggccgcgcagcagcagttcaaattttttggtgaggtcgcaggccgccagcaccggacaggcgggatacagcgcgccaaactcggccaccagatcgcgcacgcggtgcggggattcgtaggcgacggccacggggacgcccgttttgcgcagcgcctggagtttttcgcgcagcggcttcttttcgcgcggcaaaaagcccacaaagacgtattcgcgggcattgaacccactggcggaaatcgccgtcaccgccgcgcacgggccgcaaacgggcgtgacagggatgcccgcgcgccaagccgcgtccaccaactgctggccgggatcggaaatggccggagtgcccgcgtcgctcaccagcgcgacggtcaaatcttcccccagcatgcgcgcgatcaccggctcggcgcgtgcctcctcgttgtgccggtggtaagaaagcaagggctttttgagggagaaatggttgagcagcttgagcgtcacccgcgtatcctcggcgcaaattagatccgcccgttccagggcttcccgcgcgcggggagaaaaatcggcgagattgccaatgggcgtggccaccacgagaagttccgccataccggcctcctacagtttttccaccacgcgcagcagggcgctgcgcgcgcggggattggccgcaagctcctcgggcgacgccgtgaccggcttgcgggtgatcaggcgtgccacgggctttttgccgcacacgcacacgggaaaatgcttcgggcaagtgcagggatccgccatttcccgaaaggtgttcttcacaatgcgatcttccagcgaatggaaggcgatcacgcatagccgcccgccgggccgcagaagcgagaggatgtcccgcaacgcgtccgccagcggggccaactcgtcgttcaccgcgatgcgcagcgcctgaaacgtgcgccgcgccgggtgcgcgccgccttcccgcacgcgaaattttttggggatcgccgcgtcgatgatggccacgagctgcgccgtggtttcgatgcgcgccgtttctcgccggtcggcgattacgcgcgcgatctgcgcggcccagttttcctcgccatattcccgcaaaatgcgggcgatctcttccggcggccaatcgtttacgatgtccgccgcggtgagcggcgcgtccgcgtccatgcgcatgtccaacggcgcgtcgtcatggtaggaaaaaccccgctcgcgtacgtccaattggtgggaagaaacgcccagatccagaagcgcgccatcgagcggcccctgcacgagcgccttcgcgtcgtgaaaattgccgcgaatggccgtaaaccgcgcgccatattcggcgaggcgcgcgcacgcggcggcaatcgcctccgcgtcgcgatcgatgcccaccacgcagccgccgcgggccaaaatctcgcgggaatgcccgccgccgcccaaggtgccatccagatacaggccgccgggcgaaacgcgcagcgcgtccaccgtctcatggagcaaaacgctggtatgctgaaattccatattgcctcacaaacacagtcgttccccgggccgcagcaaagagcgcaccgcacccgccagatagagcgagccgcaagcgatcaccgtgccgccgtccgcgcgcgccaaggcaagcgcatcttccagcgaatccacggcctgcgcgcccggatacgccgcggcaacctcttccgcgctggccgcgcggggatcgtccacccgcgtggcgatcacgcggctggccaccggcgcgagcaatttcgcgcaggcttccacctgcttatcgtgcatcatgcccacgagcagcacccgccgcccgggcacgtgcgcgcgcaggtattcggccagcaccgccgcgccctgcggattgtgcgcgccgtcgatcaacacgccatccacccattccagcctgcaatgccaccgggtttttgccaaacctgcgcgaacggcggcgaaatccagcccgcccaccaggcccagcgcagccagcgccagcgcggcgttgcccacctggtgccgccccgcgagcgatatttcataggtttctccgcgaaagcggaaccgcgcgccatgcgcgctctccgcgaggatttccggctcctctaccacatccagcggcgcgccgcacgcgcgcgccgcgctttccagcacgggcagcacggagccgttcgccgggtggatggccgcgggcacgccatgcttgaggatgcccgccttctcgcgggcgatggcttccagcgtatcgcccagcgttttcatatgatccatgccaatggcggaaatggcgcaggcacgaggcgcgatcacgtttgtggaatccaaccgaccgcccaggcccacttcgatcaccgcccaatcggtcttggcttcggcaaaggccaaaaaagcgatggccgtgcccagctcgaaggtggtgggaaagcactcgccgcgcgccaccaaatcttccgccgcgcgcttcacgcgcaggatcaggcgcagcagcgtctcatcgtccagcggcacgccattcacgcgcacgcgctcggcgtattcgcacaggtagggcgaggtgtacagcccggtcttgtagccgcattcgcgcaacgcgcgctcgagaaacgcgcacacggaacccttgccattggtgcccgccacgtgcagaaagcgcatgccgtcctgcgggttgcccaaggccctgagcagcgcgcgcatgttttccagcccgtttttctgcccggcatagcgcgcgccgtgtacccaatccacggcgcgccgcagcgtcatctgttcttcttccatcatcagtgcgtcaccggctacagctgcgtggccgccaggcccaccttacggcgcaccttgctcatggtgcgagccgccagcttggccgcgcgctccgcgcccttcgtcatcacttcgttcaaataggccttatcggcgctgatctggcgatagcgcgcctggatcggctccaattcggcgatcacggcgtccgccaccgcttccttgaaatcgccatagcccttgcccacaaattcgttctcgatctccgcgaaggccttgcccgtgacggcagaataaatgctcatcaggttcgaaacgccgggcttgttctccacatcgtattttaccagcgcttcgctatccgtcaccgcgcggcgcacctttttgcggatcacgttgggttcgtccaaaatcgcgatgaaggtatcctccggatcggacttgctcatcttgcgcgtgggatccgaaaggctcatgatgcgcgcgcccaccttgccaatcagcggttccgggatggtgaacacatcgccatagatggcgttgaagcgctcggcgatgtcgcgcgtgatctcgatgtgctgtttctgatcgttgcccaccggcacaaaattggtttggtagagcaaaatgtccgccgccatcagcgtgggataggcgaacaggcccacgttgatgttttccgcgtgcttttgcgccttgtctttgaactgcgtcatgcgcgacagctcgcccatataggtgaagcagttgagcacccaagcgagttccgcgtgcgcgggcacatgggactggaaatagatcaggctcttgtccggatccaggcccgcggccaggtacaggctcatcagcttcaggcagttctgccgcaactgcgtgggattctgccgcacggtgatcgcgtgcaaatccacgatggaatacaggcaatcgtattcttcctgcagcgggccaaaattgcgcagcgcgccgatgtaattgcccagatgcaggttgcccgtgggctgaatgccagaaaatacgatctttttgcgttcgttttcctgcatggtgaaatcgcctctttctatccgtctattcgtttgtcccgtccgcttctaagaatttctcctccacagcggcgagggattcgatatacgctcgctcttttttgccaaactccatggattccaaaagttccggcctgcgcgccagcgtaatggcgagcgcctgttcgcgccgccagcgctgaatctgcgcgtgattgccgctcagcagcacttccggcacttcccggccctcgaattcgcgcggccgcgtgtattgcggatattccaataggccggaagaaaagctctcgtccagcggggattccccgctgcccagcacgcccggaatcagccgtgccaccgcgtcgatgatcaccagcgcgcccagttcgccgccggtgagcacataatcaccgatggaaatctcctcgtcgatgcacaggtcgatcgcgcgctggtccacgccctcataatgcccgcagagcagcgccagctcgctttcgcccgccagttcctcggccttcttctgggtaaacggcgcgcccttgggcgaaagatagatgcgcctgccccggaaatccggccccagatgcgcgcggaaggcggaaacgatgggctgcgccagcataaccatgcccgcgccgccgccaaagggataatcgtcggtattgcgatgcttgttttcggcgtattcgcgaatgtcgatggcttccaccgcgagcagcccgttctccaccgcgcggcccaggatgctctgggacacgatgggccggatcatctccggaaacgtggtgaacaccttaatcttcatcgaacaccgccacctcgcccagccgcttcgcgtccagcaaaatggttttttcccgcacgtccacccgcaacaccacgctcttgagcgcgggtacgagcacttcgcccagcgggccctcaaacacatacacgtcgttgcccccgggctgcatcacatccgtgagcgtgccaatttcacgtccgtcagtgtccgtggcgcggcagccgagtaaatccacgataaaattttcgtcctcgcccaattccagagcgttttcccggtcaatatacagaaattcgccgcgcagcttttccgccgcgccgcgatcgtccacgcccgccagcttgagataggccatatcgcccgaaaggcggctcgattccacttcgcaaggcgcatactcgccctcgcgcgccaggaacacgcgcgaaaggttttcgaagcgcgccgggtcactggtgtctgggcgcactttcacctcgccccgcacgccctgcggcttcagcacctcgccaatcatcaaatacgcgtccagcacgttttataccagcctttccgcgccgcgccagggcggacgccttttctttcccccgaaaaaacagcggaagggcggcgctcgcagcccttccacccgccggcaggaatgtccccgccgccatacgcaaagccctgggcgcttcgcccggcgctattcgccttcctgctcgtcctcttccaggatgtccacaagataggtcttttcgcccttggcggaagccgccttcaccacggtgcgaatcgccttggcgatgcgcccctgcttgccaatgaccttacccatatcgctgggatccacgcgcaactggatgacgcattcgccctctctttcgagcgtcgtcaccgctacggcctcgggcttttccaccagcgatttcgcaatataccgaaccaattcgtccataccgcgcctcacgagcagcgcttacagcgcgccgcctttcttgagcagggcgcgaacggtgtcgctgggctgggcgcccacgccgagccaatacttggcgcgttcgccgtcgatcttgatctccgccggatccatcagcggattgtaatggccgatttcctcgatgaacgcgccatcgcgcggggaacggctatcggtcaccacgatgcggtaaaagggctttttcttcatacccatgcgcttgagacgaattttaaccattgttgttgcctcccaaaattcctaaaatctatcaatcaatcaggaagcgggccgatgcccgaatccgatggatcgctatttcatgccaaacggcagccgcatgcgctttttgccgcgcatgcccatcacctgtttcatcatgctgcgcgcctgatcgaactgcttgagcagcaggttcacatcctgcaccgtcgcgccgctgcccgcggcgatgcgccgcttgcggctggcgttgaggatatccggattgcggcgttccatgcgcgtcatcgaaaggatgatggccacgtttttcttttgcgccttggccaccttgtcctcgtcgatctgcacgtccttcagcttgctgcccacgccggggatcatcttcagcacatcggaaatggagcccatgttggaaagctgcttcatctgctccagataatcttccagtgtgaaggactgcgtgcgcattttgcgctcaagggacatggccgctttttcgtcgattgtgctctcggccttttcaatcagggagagcacgtcgcccatgcccagaatgcgcgaagccatgcggtcgggatggaaaatttccggctcggccagcttttcccccgtgccgaccagcttgatcggcttgcccgttacggccttcacagaaatggccgcgccgccgcgcgtgtcgccatcgagcttggtgaggatgatgccgtcgatgcccagttcgcggttgaatgtgtccgaaacgttcaccgcgtcctggccggtcatcgcgtccaccaccagcaggatttcctgcggtttcaccgcgtcgcgcacatcgcgcaactcctgcatcagcttttcgtcgatgtgcaggcggcccgccgtgtcgatgatcaccatatcgcggccataatagcgcgcgtgttcgatcgccgccttggcgatttccacgggattcgtctgtccgcgctcgaacacttccacgcccgccgcctcgccgacgactttcaattgctggatggccgccggacggtacacgtcgcaggccacgagcaagggctttttgccctgccgcttgaacatatagcccaatttgccagccatggtggttttgcccgcgccctgcaggccgcacagcatatagatcgtggggttctggggcgaataggtcagccgggcgctggaaccgcccatcagcccggtcagttcttcgttgacgatcttgatgacctgttgtcccggcgtgaggctcttgacgatgtcctcgcccacggcgcgctccgtaaccttggccacaaaatccttcacgaccttatagttaacgtccgcctccaagagcgccatgcgcacctcgcgcatcgcggcctttacatcctgttcggtgagcctgcccttgctgcccagcttcttaaaaacgccctgcagcttatcggtcaacccttcaaacgccatccggcctcacctctccatcttttcaatctgctctagcgcacgcttggccgccattaaatccgcctgcgcgcccggcgcagcctccacgcgatcgagcgctaagcggcactcggccagcgccgcctggatctggcggtaccgcccagccagcccgagcgttgcctcatacgccttgagttgcttgcgcgcctgggcgaacgcgtcgtacgcgccctggcgggtcatctggcaggcgtcggcaatttccgccagcgtcatatcttcgttcacgcgcatttccacaatgcgccgccgcttttccgtgagcagcgcgccataaaaatccagcagccacgcaagctccaccagttcttccatcgctccgccctctgccatagcgccgccccctgccaagcgaatccacttggcatagtatacccgatctcccagcgcttgtcaagtaaaattcttgacaagaccaatcgtcggcaaacccagtataccgcccctgcgggaacagccacgccatatttagagcgacgcccgcatggacgccgctccgatgatgtattattgttttattgcaaggtcatcacgaacaggccgctttccatcagcggcgcttcatagcgcgcattttcagtgtccgtttcctcgatgtgctggacggtggaaacctgcgtctccggctctccgtcattcggaacgagcaacagttgcgccatttcgtccccggccagttcgcggacgcttgccgcgtcaaagatggccgtcaggctggggatggcgttggtcacgtccacttcctcgccctcgatcattgccgtgacgcgggcgcggtagctgccggtgagcgtttccaccgcgccgatggcgtccttttccgcctgcgaaagctcgtctgcctccatgggcgcgaggcgcacgacgtagccgtcctcggtcatttcggcgatctgccattcgagcgccgcgtctccaagcgcgaagcgtatgtgcgtgtagccgaggctggtcagcgcgtccagaaggccgcgggagaggtggagattgcgctgctcgtagacaggtccgccgtcgcgcaggatgggctggccgttttcgtccagaagcggatcagcggtgatcaccagcgtgcgctggatttctttcccgcttgctgtgtccagcgtccgcttggtgagcggcgcgtagggcatggctgttccgaaacggtcggtcacaaggccttccacggctttgcctgccgccagcttcctggcaatttctgagggatcatagctgtcccgctcgcctgtgctctctttcatccaggtggcggtataggtcacatcgccgctcaccgtggccgagaccgccgggttccagcctgcgaacacgtagccttgccgctccagtgtgccattgaacgcgggcgtcgcctcgccctcaagcaggtcgcccgtcacctgatcggcgaagatttcctcgccatccacgccatcggtgtaggtcacagtatacttttgctcttcctcgtcggcgatgccgttgccattccggtcgggcttccaggtggcggtataggtcacatcgccgctcaccgtggccgagaccgctggattccagcccgcgaacacatagccttcccgctccggcgttccgctgaacgcgggcgtcgcctcgccctcaagcaggtcgccggtcacctggtcggcaaagatttcctcgccatccacgccgtctgtgtaggtcacggtataagtcgccgcaactgtggtggcgctgccctgttcctgccatgcggagcggaagctgctgtccgtcgccttgagccgcaggtaaacgatgtattcttcgccattattgagcccggtgatcaggccgtcgccatcctcgtccagaatggtgggcgtgtccggcgcgggatcgcccgccggcgcgaggccaaagtcatacgtatcgcacagggccgcgtcgatgcccagccggtcaacgtctgtaatcagcgcgagcggctccacctggccgcactccggacgctcaggtacaacaagcgtggtcactgcgcccggataggcatcgcttacgactgtaccggagccaaagaaaacagggatttctacgtcgccatcccccgcgtctcgaggcaaaggattccccgtaaacatttcattgatggagttgatcctggatagcgtactcgtataactgccgctgcttgcaaagacgtcgttccattcttcccaagtggtcagtatatccagcggaaagcccaaataaacctcgtcttcagcagtcagaccagccaagtaatccggcacggtcacggtgatgctctccgtctcgtaatccagagtcacgctgggcgcggaaagtttcacgtaactgcgcgtctgcaagccaaaggtatcgttcgcgccgcagatggaaaagctgttctcgttcaaaaggcaccatgtgccctcgcccagggtttcaagaatgttagcgccgtagttgaacgccttcgcctcgccgttcacaaacatggtcacctggatggcgcctgtgttgcttctgacatgggcgttgccgccgaaattgcagggctgcaggatggaactcccattttcattttcgatcgcgccgttgatcgtggggacgttcgcatcctgcccctgaacccggccaccattgtcattgctcagatttccgttgaacgtgccgccggtgatggttccactttcgttgttcacgttgtcatagaacgtgccgccggtgatggttccacctttattgtccacgctgccatggaatgtgccgccggtgatggttcccgcgtttctcacctccctaccataggaaacaccaccggtgactgtgccggtcgcttctatgatgagagaagaataggttggaacgtcgtccaggttcacagagccggtgatgatagtcgtagtgccctctatgcgatattctccaatgcctgtaaagctggcgctgtcctcagggccgtccggtatggaggcggtgaccgtcaccgcttccccggtttcgacggtcaacacgtttgcggtgaggctaagtctggcggtttggcccggctccaatggcaaaaccttccacacccatgtgtcccagtcccaggatgccgtgtatccgtatgttgccgcagagacgacgtccagcttgtcctcgggcacgccgatgttgacggagagctgctccgtggcgctgtctcccgcgtttgtcagatcaacgatgtaccggaggctgtctccctcgggggccttttccctgtccacctcaatcgtcagggtcacgtccgccgcgcgcgcgacgggcgcggccgccagcatggccatgggttccggcgcgggggcgtcggtcggctccgatgtcggcgcgtcggtcggctccgtcgccggcgcgtcggtcggttccgatgtcggcgcgtcggtcggctccgtcgccggcgcgtcggtcggttccgatg

SEQ ID NO: 4166 - DNA, 2068 bp, Unknown
  16S sequences of unknown bacteria
gcttgataaaaaagaaaagacggtcacaacggtgaccgcgaaaccggaactgcgggaggcaatgcaggaagcgaagatgggcttccgaaagctacgatttgaaatggacttcaactgctgcacgctgacagcagcactggcgggaaaaaccatcagtctggaatacgcggagcggttggcagcctgcctcggacgcagcacaacatcactattcaatgtaacaacgaagaaggaactatacgcctacgaaacaatgcacaaaattaaacgaacactgcgcgccatactatcccacgcaaagaagcaacgccttatcaatgataactatgccagcgcagattacatagacttcccaaagcggccatcaaaggagatcgactacatgaacgacgaagacgccaagaagttctacgcggcagcagacgcctatccggatatacgatacaaaacggcggcgatgatcctgctgctgacaggtatgcgacgcggtgagctctgcggactggagtggtcgaacatcgacttcaaagaggctaccatcaccattgaacgatcggttacgacggtggcgggtatcggcgtcgtagataaggagcccaaaaccgagagcagcaagcgcgtgattgccatatcggataagctgctgtcggtgctggatgaatataaggcatggtacgatcagtaccgcttcgatatgggcgatcggtggaaagaaacagatcggctgttcatcgcggagtgcggcgcacaaatctaccccggtaccgtgtacacatgggtacataaggtatgtgacgcggcaggactgcctcacagaacggtgcattcgctgcgacatacaaacatcaccatgcagattgcagcgggcgtaccgctggttacagtggccggtagagcaggccacgcgcgaacgagcacaacgacggacatctacagccacttcctgaaaagctccgataaaacagccgcagaaaagctggagcagctattcgaataacggataaagcaaagccgccactcagtaaaagctgggtggcggcaatttttgtttttggtatggcggtggggagcgatccccactttacaatcgcccacgtgtgaatgtaggttacgccatctttccagccgacaggtacaaagttcacacacaattactgttgacaggatggcacgcccggcgcgattcgaacgcgcggcctttcgcttaggagatggccccaagcgacataagcactatcaagcgagtataaaaaaaccaagagaaatcaaggcttttctccaagtcaggtgtaaatctggtacaagtaaaatcaagccaaaataaaggggttttaccccctcttgttggcaggatgttagcaaaatcaaggcttaatagcgtgtgctttgagttcgatttctctcggagcaaactcaaattatgctgcgtgagtatctacctggtctgtcacttattgagtatactatcatacatagtgccccattacaagagatgtgtggggcaagaaaagtgcctgttttatctctcagtcgagaggtaaagcaggcgctttttttcatatctaaaactcagagtgaaacgaggtgaaaatgatgaatacgcaaatcatcgccattgccaatcagaaaggcggtgtgggcaaaacaacgacctgtgcgaatctgggcatagggcttgcacaggccggaagaaaagtgctgctgattgacggagatccgcaaggcagcttgaccatcagcctgggccaccctcagccggataagctgccctttactctctctgatgctatgggccgtatcctgatggacgaaccgctgcgccccggcgagggtatcctgcatcacccggaaggcgttgacctgatgcccgctgacatccagctttccggcatggaggtttctctggtgaacgctatgagccgagagactatcctgcggcaatatctggacacgctcaagggacagtattcccatatcctgattgactgccagccttccctgggtatgctcacagtcaatgcgttggcggctgccaacagggtcataatccccgtccaggcggagtatc

SEQ ID NO: 4167 - DNA, 4080 bp, Unknown
  16S sequences of unknown bacteria
tcgcatgcgccgggcggcaaaggggcagcggcggcggggcccaagccccgcacggaatcgacggggcgcgccttcgggggctttttcgtcaagcacctcaaggtcatgcttcccataacgctcgccatcgtcttcttcctcggctttggggtagtcgacctgttcggctcgtggggcaagatccacaagggcgtgagcgtcgagggcgtcgacgtcggcggccttaccatcgacgaggcgtcgaacaagctcaacgagcagctgtctccagtcgtgcagtcgatgagcatcaccgtgtacaagaactcggacatcgccagcaaagacggcgtcgacctcgatgccgcaggcaacacgggggatcccaacgtggcgtatgccgacgagaagaagcacgacaacatcgccgcctccgcagatatcgacggcgacggctctgccgacaagtggaacgtcaacgcgaacacgatcggcgcctacgtcgacggcaacgcgctcgccacgcaggcgtttgcctacggccgcgagggcaacttcgtcgcagaccgcttcgtggcgtacttctcgcccaaaaactaccaggcgaccatctcgtacaaccaggagttcttcaacagcctcgtgagcgagatcaacgaggcggctggcacggccatcgtcaacagcacctttgccatcgacgacggcaaggtctcgctcgtctccggcaaagacggctacctcgtcgacgagaccccgttcgtgaccagcatctcgcgcgcggcgttcaacacgggcgccccgtactgcgaggtgcccatgcacacggtgacccgcaacatctccgacgagacggcgcagaaggtcgtcgaccaggtttccgccgcgatcaaagacgacgtcacggtcacgtaccaatctgattcctggacgctcgaccccgccgcgctcggcaagctcgtcgggcagacggtgctgcagcccggccagatcatcgagttctccacgggcaagcaaagcgtcgtccagggcaacgcgggcgactccaaatacgatatgtcgactggtacggacccctccggctatgcgctgcaggcctatatcgaccaaggcgccttcgacaagtacctcgtgagcgtgctcggcgacaaggcgcgcggcggcgcggtgagcgcctcgttcgacacctccgacggcgagacggtcaaggtcataccgagcgtcgagggcaatgggtccgaccgtgccacggccgagatctcgctgcagaacatcgtcttcggaaacggcaagcccatcgtcgcttccaaagacggcaacggcaagacggtcacgagggaggcctcgagcgcttcgcgcaccatcgagctgcaagacaccgtcatcgagcctgaccttacaaccgacgaggccaacgccatgggcatcaccgagcgtcttgccacctggtccatccccctgtcgggcaccacggcgcgcatcaacaacatccgcctgctgtgcaagatgatcaacaactcgctcgtcgcgccgggcgacgtgtggtcgttcaaccagacgacgggggagcgcaccgaggagaagggcttcgacaaggccgccgtcatcgtcgacggcaagcacgaggaccagctcggcggcggcgtgtgccaggttgccacgtgcatctacaacgcggcgtgcttctccgggctcggcatcgagaaccgcgtcaaccacgacttctacatccctgcctacgacgacgagggatttgctgacgctacggtctcgtgggagtccccggacttcgccttcaagaacgacatgagcacctacgtcctcatgaccgcgacggcctcgggcgacaacgtcgtcgtctcgatgtggggcacgaaggacggccgccaggtcaagtgcgagcgcggcgagtggcagcccggcgacaagtacgtccaagttaccgagagcacgcctgacctgcctgccggcacgaccaagatcacgcagaccggtcaagacgggcgcaagatcgatatccactactacgtgacgagcgcgagtggcgaagtgctgcacgacgtgacgttccactcgatctactcggcccaaaacgagatcacgtccgtgggcacgggccctgcggcgggctgacgtagcccgcgcggaaaatccgtgcttttatcctgtcgagcgattgcctagcccggcaatgaatgtcaatatttccaattacacgttgccgcacggcgcgttatcactataagtttcaaggtgggaaatatggcgtaccaagacgagatcacgcacatggaccatggcgagctcgaggcgctccagctgtaccggctcaagaggacgctgcgagagtgctatgagaggattccgttctacaagaagtccttcgacgacgctggcttcgatccgagttccgtgaagaccctcgacgacatcaggagagcgccgttcacgctcaagcaggacatgcgcgatgcctacccgtatgacctattcgccacgccgctcgaccaggtcaaggaaatccacatgtccagcggcacgaccggcattgccacggtgagcggctataccgaccacgacctcaagatctggggagactgctttgcccgcggcatcggctacgccggcggcaacgagggcgacgtcggcctgttcacgggcggtctcggcgcgcactacggcggccttgcctccggcaccaccatcatcccgatgtccgccggcaacaccaagcgccagatcaacatcctgcgtaccatggggtcttccatcatctgctgcaccccgagctacgccatgcacatcgccgacaccgcgatcgagatggggctcgacccgaagaaggacttccccaacctcaaggcgggcatcaacggcgccgaggccttctcagaccagttccgcgagaacctcgagagcaagctcggcatcaaggtctacgacatctacggcctcaccgaggtcatgggcccgggcgtcgccatcgagtgcgccgagcaaaacggccttcatatcgccgaggaccatttctacgcagaaatcctcgacccgaagacgcacgagccggttccggacggggagtggggcgagctcgttctcacgacgctcgacaaggaggcgtctcccgtcatccgctaccgcacgcgtgacatcacgcgcatcatccccggtcagtgcgcctgcggacgcacgcaccgccgcatcgaccgcctgcatgggcgcaccgacgacatgatgatcatccgcggcgtcaacgtcttcccgagccagatcgaagacatctgcgccggcttcgacgagatcgccgactggtaccagatcgagctcacgcgcgagcgcggcctggacgtcgccaccatgaaggtcgagatcaaccccggcttcccgatcgacgaggtccgcaggatcgaagacctgcagcatcggctcaagcgcgccctcaaggccgagctcaacatcaacatcaacatcaagatcgtcgagccgcacaccatcgagcgttccaccggcaaggcggtccgcatcgtcgacctgcgcgaataggaggctgcaccatgatcgaccagcttacggtatttctcgagaacacgcccggcaggctcacggcgctgtgcaaggcgctgggagacgcctccatcaacatgtcggcgctggcgctcgccgacacgaccgattacggcatcgtccgcatcatctgcaacgacccggtcaacgcggcaaaggtcctgcaggcggaaggctttcgcgccacgacgacgaagatcgtcgccgtcgaggtgcccgacgagccgggcggccttgcaaagatgctgcatacgctcgacgaggccgagctcaacatcgaatacagctactgcttcctcgacggtacgacgggcaacgccacggttgccctgaaaaccgacgagaaggcaattgagattctcgaggcagccgggtatcgcgtcatccacccggctgacctctacaagacgacgaagtaggcaccatcatttacgttcagccacaaccaactgcaccagactcgcctgacggcgcgagcgcttccacgggaggcttgcgccgccgcatgcgtttggcttgccgcgcgctcctcgcatg

SEQ ID NO: 4168 - DNA, 5269 bp, Unknown
  16S sequences of unknown bacteria
cataaagcagtgaatgcagcggcatcatagattgccatctctgaaagcatctttctgttgatgtctattcctgctaccttaagtccgtgcataagtctgctgtatgataagccgttcattcttgctcctgcatttattcttgctatccacagctgtctgtactgtctctttttctgctttctgcctgcatatgcgcttcttaacgctctcattaccgcagggtttgctgccttgaactgcttgctctttgctccgtagtagccctttgcctgctttaatacttttttgtgtcttttatgtgcgtttattcctttttttactcttgccatttcctgttcctcccttatttacccatggatcttaacattctcttaagatctgcgcttgtaagtgttgttgattttcttaatcctctttttctcttagggctcttctttgtcagtatatggctcttgtacgccttgtttctctttacttttcctgagcctgtaactttcattctcttgcacgcgcctctgtgagacttcattttattcttagccatttattactcctcctatgttaactttacttttttaatctacttctctgtttttggtaccagcaccatcgacaggttcctgccctcaaataccggcttcttctctatgttggcgatttcagcaagctctgccgcaaagatctccattactttgagtcccttgtccttgtaggctgcctctctgcctctgaagcgaagacttacctttaccttgtccccgtcctttaggaacttgcccgctgtctttgctttaattctgatgtcgtgctcctctataaaggtgctgagacggatttccttgacctgtgtggtcttctggttcttctttgcttccttttcttttttctgaagctcatatctgtatttaccgtaatcaagaatcttgcataccggcgggtctgcctttggggctatgcagacaaggtccatgtccttttcctcggaaagggcaagcgcctcgtctcttggcataattccaagctgctgtccgtcatctgatacaactcttaattccttaaagcggatttcctcgtttatgagggtttcctttacttctctgctaatggctttgtacctccttaaaaaaatcggcggatacaaaagtatccgccaaaacataacaaagttcagatattaaccgtgcagactgctgcctgcaggtgagaagcggattacttcttctttactacccgactatcttatcatctgatatatatgtctgtcaagaaaaatatatccgcgatttatatttatttgttagtaacgatattgtaagtatctcttgcaatcatcagttcctcattagttgggatcaggagaaccttaacctttgagtcttctgccgaaataaccatttccttgcctcttaccttgttctttacaaggtcaagcttgatgccaaggttgcccatttcgttgcagatgatatctctcatacccatatcgttttcaccaacgcctgctgtaaatacgatagcgtcaacgccgttcatctcagcaatgtatccgccgatgtagaacttaactctctgagcgaaaactttaagcgcaagcattgctctttcgttgccctcttctgctgcagcctcgatatctctgaagtcacttgatactcctgaaatacccagcatacctgatttcttgttgaggatttcgtttgcaacgccctgttcaagattttctttttctctgatgtaagttacgatagcagggtcgatgtcaccgcttcttgtgcccattacaagaccttcaagcggagtaagtcccattgatgtatctatgcacttgcctctcttgatagctgataccgatgcgccgtttcctaaatggcatgttataatcttgaggtcttctatattaacattgagcatctctgctgctctttctgatacatacttgtggcttgttccgtggaaaccgtatcttctgataccgtatttttcgtagtattcataaggtatagcgtagatgtatgactgaggcggcattgtctggtggaatgctgtatcaaatacaccgaccataggagttcccggcattaattcctggcatgctgcaatacccagaaggttcggcgggttgtgcagaggtgcaagttcaacacattcttcgagcgctttgattacatcgtcagtgataagtactgaatgtgcgaatttctctcctgcatgaacaacacgatgtcccactgctccgatttcgctcatatctttaactacgccgtgttcctcatccttgagcgcatctataacgtgacctatggcgtccttgtggtctttcataggcgcttctaatacaaacttgtccataccggtttttgtatgggaaatcactgatccctccatacctattctttcaacaagtcccttgcagataagttcttcgttggtcatatcaagaacctgatattttaatgatgaacttccgcagttgattactaaaactttcattatatcgttcctccaaattttatgtgtattaatcaaagaaaattatacacccgtatatgtggcaaaatcaagataagttaataatttaacaagcatctgaaataccggtttctgttgacacgaacagcctgcggtaataaaatagctttgtattgggattttaacaggcaggttttatatgctgataaaagcacttctttgtataataataggtattgttgccggcgccggcaccggtcttgcgggcatttccgcagcaatggtaatatcccctatactcattgcatatcttggcttccctgtatatgaggccataggtatcgctcttggcgtagatgttttttcatctgcgacatcatcagtcacatttataaaaagaaaaaacacaaatatcacgtcctgccgcagaattctcatctgcgctctggtattcactgccgcaggcagcgtgctttcatcatttatgcccgattccgttctgggacacggcattatattatgtactattgtaatgtctgtgaaatttctgttctttccggacgccaagcttccggatacaattacatttgaacgtcagacgcagatggttacggcgggaagctgcgccgtaggcgctatatgcggactctttggcgcaggcggaggtatgatgtttgtaatacttctcacctgtcttttaggctatgatatcaaaaccgcccttggcaccagccttataattatgacacttgtcgcacttcttggagctgtcgtgcattttaccgtggcagaaagcatcgactggacggtgtttgtcatatgtgcggtttccgccgctgcaggagcaaaggccgccgctctttttgccaattatgcttccgtaaagcttcttaacattataatgggtattgtttttttaattctgtgcgccagccttatagtcgcagaatatatcatataatcagaattctgaataaaaaaccgcctttccgggtaataataatacggatatggcggttaattgtcagactcttcaaactgtatactatacacagcaaaaatattatatgtatataacaaaattcttatccaaaccccttgattttcgatttgaaagtgatatattatattcatcaagtaattacatagattgtaattggttttttacaattgataaataaatataaaaggaggactttaaaaatgtcattaaatgcaaaagaatatgttgcaggcctagttgaaaaagcaagaaaagcgcaggcaattgctaacaactttactcaggaagatgtagatcttattacagctgctgttacttataatcttactaaacctgaaaaggctaagatgtatgcagaaatgctggttgaagaatcaggtatgggtattgcagaagataaagttggcaaaatctacggtaaagtatggggagcatacatccagatgaaggacaagaagtcagttggacttattgacgacaacaaggaaacaggtatgcagacttatgctaagccaatgggcgttgttgccggcatcatgcctgtaactaacggtgaagcaactcctatcgttaagtcaaacatggcacttaagacaagaaatgctataatcttagcacctcaccctaagtgcaagaaattaaacgttgttatcgttgacgaaatcagagctactcttaagaaattaggatatcctgaagatttagtacagacttgcgcacctgaatgggttaagctggaaacttcacaggaattaatgaagcagtgcgatttcatacttgcaacaggcggagaagcattagttgaaactgcttactcatcaggaactcctgctatcggcgttggcgtaggtaactgcgtatcaatcgtaacaggcaagactccaatggacaaggttgcagaaatgatcgtaacttcaaagaaatacgataacgctacttcatgctcaacagaaaacaacatcatcgtattcgaagactgctatgatgaatttgttaaagaaatggaagcacacggtgctgttctgttcaaagaaggatcagaagaaaagacaaagcttcagaagactatgtggccaaacactcctaacgaccacgtattaaacagagcaatcgttgcacagaatgctgaaactatcgctaaattagctgatatagaagttcctgcaggaacaaaagtattaatggctgaagaaaacggcgcaggacttgatcacccgttcgcaggcgaaaaactgtcacctgtatcaggcgttcagaaagctaaagaccttgacgatgcaatcgacaagatgatggcttgcttaaactaccagggtaaaggccacagctgcggtatccacactaatgacgacgaagacgttgctagagtagcatcagttgctcctgtaactaagtgcgtagtaaaccagcctcagtgcttaactaactcaggcggatggaactgcggattccctgtatcaatgacattaggctgcggtacttggggcggcaacagtgtatcacacaacgcaacttacaaagatcttcttaacttcacatacgtttcaagacagattcctaactggaaacctgaaaaggtagaagatttcatcgatgcagcagtaatcgctaaggttgatgcttaatcccggtttaaattaaacagtaaacattttttctagcacgggtgggaatcccccaccctgctaaatatttttattgaaaaggagaaatgaaatgtcagctattctagaaaaagatagaaaatataatattcactcatggagtgctcagggtgcgcttaacccgcttgtagta

SEQ ID NO: 4169 - DNA, 32759 bp, Unknown
  16S sequences of unknown bacteria
tctcctccgtcctcacgcattaactcggcggcaagtgaaaaatgctcgcctccgtcgtttgacacaagaagagatatgggagagcgcgctgtcgtatttacgggattgcacacgaggaacagtctgccgtcgggggattttacaaggtcgataccgctgttgttgttcggtatgtcggttggatacgcttcgcagaacttgaggtcagctttgtcggcgtcggagcggtatattactccgtttttcgacctcatgagagcgtgacaacctttgtcgtcttcccacagcgtcggctgaatcagcttggtttttataccatcgttcaaataatctccgcgaatccatgtaacgccgccgtcatgtgaaacgtcaatgaacgcacgccactcgctgtccgctgaatccgtctcgtgagatgctccggcgagaattattccgtcggaggtgataagcggtttatctttcaccggacctcttccgccgctctcgtctccgggtacaagctcagtcggggaagtccatgtgaatccgtcgtcatacgaaaatatagcgagcgttttccatgccggtattgtcgcgccttttttgtagcacagcgtgatttttccgccatgcctgaacaatacggggttccagcaagggatgtcgtccttttgcgataccataaccagagtcgaccatgttccgctcgttctgctccgtcttgagaggtatatttcaacgtcgtttgccttttcgtgttttccgccgaaccatgccgcgagtatgtccccgttttgtgccgtgcagattgttgacgcgtgacatgattttgttattcttccgtcaagcgggaaaatcagacttttttctgccaattccactgttttcacctcgtccgttcattctatatttcagatgataccagctactgcatcatttgtcaagcgtgtacggcgttattttgctttttctctatcctgtgccagttgatgaatccgtagaggtcgtttgcgaggaacatggcaaagcacactatacggtgacggctacagtgaaaagcggcatgagtatgtacttatatttacgaagcttattcaccgtgaactcggcgtggtttccgttacacggatgccttataaattaagatagtctacgaaagtcatgaagctgttttctccgttttgtcaagatgttttttatattgcaataatgaggaagaaaactgtgatattcggctataataaagcagtcactcagccacagaatgggaaaattttatcttttgtatatttatttacgcgcggttttgtggtataatgatttaataatacagatatcaagaccgaaaggcagactttatgtgcggttttattggttttacaggaataattgatcgccgtgaggatgttatccgtaaaatggcggaaagaataatccatcgcggtccgaactccggcggatttcactacagcggagaaaacgacaacgacagcgtaactctcggattcagacggctgtccattatcgacctctccgacggctctcagcccatgtacaacgaggacggaagcgttgttattgttttcaacggagaaatatacaacttcatggacctccgcgacgagcttatagcaaagggacatattttcaaaacccactgcgacactgaggtcataatccacggatacgaggaatggggcaagaaaatcgcagaaaagctcagaggcatgtttgcgttcgtaatctgggacaaaaagacaaatgtgctctacggtgcgcgcgacccgttcggaataaagccgttctactacacaaaagtaaagtcgggacttattttcggctcggagataaagagttttctcgagcatcccgattttaagcccgaagtcaacgaaaacgcgctcagaccttatctcacgttccagtattcttccctcgaggagacgttcttcaaaggcgtattcaagctcccgccggctcattatttcacatacagcggcggaaagatggaaaaaacgcgctatttcgattttgattttacgaggaaaacaagcctttcctacgatgaatgcgcggacatgatagacaagcgtgtacacgaatccgttgcggctcacagaatcagcgatgttaaggtaggatcattcctttccggcggcgtggactcatcgtacatcactgctgttcttatgccgaacgacacattctctgtaggattcaactatgagaagtttgacgaaacgagcgaggcgaaagagctttccgaacgtctcggggtgaagaattatctcagacacataaccgccgacgaatgttttgacgctttcccgaccatacagtaccacatggacgagccgcagtccaatccctcatccgttccgctttacttcctgtcacagcttgccgcggagcacgttaccgttgttctctccggcgaaggagctgacgaaatttacgcaggctacgaatggtacgacgaaactccgctcatgagaaagtacaagaagattccggcatttctcagacgcggcgccgcaggtatcgcaaaatctcttccttattttaaaggacatgatttcatcataaagtcaagcggcagacccgaggactacttcatcggacaggctctcgtcttccccgaaaaggaggcatactccatcctgcgcgacaaatacagaaaaggtccttccgctcacgaggtcacaaagccgatatacgacaaggtcaaggatttatcggagcttgaaaagaagcagtatctcgacctcaacctctggctgccgggcgacattctcctgaaagccgacaaaatgagcatggcgcactcgctcgaactccgcgttccgtatcttgacaagctcgttatgcaggaggctgaaactcttcccgattcgtacaaaatcgacggacacgacaccaaggctgtgctgcgaaccgccgcaaacaaaactctccccgacgaatgggctcacagaccgaagaaaggtttccctgttccgatacgcaactggctcagagaggacaagtattacgacatcgtgaaaaaatcgttcacctccgacgctgccgctgaatatttcgacggaaacgcgctcatgaagctgcttgacgaccacaagagcggcgcggcgaacaatcaaagaaagatttggactgcgtacacgttcctcacatggcacgaccggttcatcaaataaagttcaagataaatgttcattaaataaatcgagggattaattatgtctcagacaatcgtacctgttcttctcggagcagacttaaactgttacaacatagcgcgcgcgttccacatgaagtacggcgtaaaatcatatgcttttgcgagatacgcgatttccgctacaaaatattcaagaatcgtgcatttcacctgcgttcccgatatagacaccgacagcgtaatgcttgacactctccaccgtttcgcggacgcacatatcggcgacagaatggtactgttcggatgcaccgacgattatgtcgctatgataatccgcaaccgcgaggagctttcggactttgtgataccgtacccgccgaaggaaatgctcacgactgtatcaaaaaaggcggaattctatgagatgtgcgacaagttcggcattccgcaccccgacactgtcgttctcacagataagacaaccgccgacgcgctctcacccgaaaagctcggattctcatatcccataatcgttaagccatcgtcaagcgtcgactactggaagcactcgtttgacggaatgaaaaaggtctacactgcggattctcccgaaagagcggcggaaatcgtcaacgaaatttactcctccggctatcccgaaaagataattctacaggagttcattgccggcggagactcacagatgagagttttcacctgcttctcggacgaacacggaaaggtccgcgctatgtgtctcggtcacacgatgctcgaggaacacacgccgaagggactcggaaaccacgccgccattgtaacggagcctgtctcttccctccccattgcggacaagataaaggatatgcttgaagctctcggctacacgggattttcaaacttcgacataaagctgcgcgagggtacaaaggacgacttccgcgtatttgagataaacctgagacagggcagaagcaatttctacctcacgtcagccggacttaatgtggcttaccttgcgaacgaggtttatgaatccgacggaaacgactgcaacaaggtcgaaaacgttgtattctggcaccacattccgaagagcacggcttacaaatacaccgaggacaaggctcttgtcgaaaaggcgaaaaagctggcgagggaaggacgcgaatactcctccgtatggtacacgcccgacatgagattcaatccgctgagaactctgtgcgtgctcgaacagctgagacgtcagaaaggtaaattcaaaaaatattatccggtgaagaaataatgaaaaacaaagatcgcaagctgcttggtgtaatcggcgggctcggacctgcttcaagcgcgtacttttatgagcttgtcaccgaacacaccaaagccgaaaaagaccaggatcacatagacatgattctctcgagccgcgcgactactcccgacagaaccgactacattctcggtcgcagtgatgtaagtccacttcccgccatgatagaggacgcaaaatcacttgaagaatacggcgcgaccgctattgttatcccctgcaacaccgcgcactattttatagacgaagtaagaaaagccgtgagcgttcccatgccgagcattattgaggaaaccgtaaaatatatcaaagagcacggattcaagcgcgccgcaattctcgcaacagaaggaacgatacactccggtgcgtatcagcatgaattcttaaagcagggactcggatgcatggttcccgacgacagcggaaaagccaaactcatggagctgatctatggcaaagtgaaaaaaggcataattcccgagcccgatgagctttacgaagtcactgcgcctatgtttaatgccggatgcgactgcgctattctcggatgcactgagctatcccttatcggcaagaagatagaggacaagagatttgtcgactcgctgaccgttctcgcttattgttcaatcagacttatggaacacgaggttatttgaatgttcaaaccgcttaaagaactgctcgcgccgcttgaatacacctctgtcggcaaggttgacggggagtaccaaatagacgccgttgaatacgactcgcgaaaggtaacgccgtcctcgttcttcttctgcctgcccggtgcaaaagccgacggtcacgactatgcggggcgcgcttacgtatcgggatgccgtgtgttcgcggtagagagacagcttgatttgccggacgatgcggttcagattatagtaccgtcgacgagatacgccctgtctcttgtatctgcggcgttttactcgtttcccgcgaagaagctcacagtgataggcattacgggaaccaaaggcaagacgacgacctccattcttatcgaagaaatcatgtcttacgcaggcaaaaaatgcgcttacatcggctcaaacggagttaaaatgggcgcggagcattacgacaccgtgaatacgactcccgaaagccgcgagctgcacagattcttctcaatgatggttggcgcaggctttacgcatgtagtgatggaagtgtcgtctcaagctctcgacagatatcgtgtcagcggaatagagttcgacactgtcatttacacgaacctctcccccgaccacataagtcccgtagagcacgccacatttgaagaataccgcgaggctaagcacaagctgttcacggactacggagcgaaaaacatggtatacaactccgacgacgcaaattcgggatatatgtgctccggcgtttcatcctgggtcaacatgataagctacgccgtggagaaggaagccgactttagtgccgaggacattcgcccgtacagagacaaaacctcgctcggaatcgactttgacgttgtacacggcgggataaagacgggagtaaggctcagaactccgggaacattcagcgtatacaatgctctcgcggcaatcgcaacctgctcaatttacggagtcactgtaagagaagcgtcggactgcctgaaaaacgtatcaatccgcggaagaagcgagatagttgacgctctcgacggaatcacgttcatagtagactacgcgcacaacggactcagcctgacggatgaattaactgtgctgagaagctacgaaccaaagcgtcttatctgtctgttcgggtgcatcggcggaagaacctacggcagacgtcgtgagctcgcggaagctgcgggaaaacttgcggactttaccatagtcacctccgacaaccccgacaacgaagacccggacgagataatccgcgatgttctgacgtattttgacacgacaaagccatatgtcacgataacggaccgcgaggaagccatcagatttgccgtgaacattgcggatgaaggcgatattgttctgttcgcgggaaagggtcacgagacttatcagataatacacggcgaaaaagttccgttttccgagagaagcattatactaaacgaagccgcgaagataaaaggaaaggtcaaggtataactatgtcggaatacatcatggatatgcgaaaggtcgtcggacaccgctgtattctccaagtcggagcaagcgtgatactcgaggacgaacatggtcgtgtgcttctgcaaaagcgtgcggacaatcacctctggggttacgccggcggttctgtcgagcttgacgaaaaggtagaggatgcggcaaaacgtgagctttatgaagaaaccgggcttatagcaaactcactggagatgttcggcgtattctcaggcaaagagctgcattatatctatccgaacggcgacgaggtatcgaatattgacgtggtgtatgtctgccgcgactactgcggtgagctgaagcgtcaggaggatgaggtcgtagagttaaaattctttgactatgccaatctgccagaagaactgtccccgccgataaagcccgttcttctgaaacgacgtgactttatgctcggaaaatgaatatggaaaactcccttgtttgagttctttaatgattcaagaacccgacaagggagctttttcagtatcttgttgcggtatagtcgcggtctatcgttattacggggatgtattctgcgccaagcttttttgttatctcttcacggaggaggcgcactatctcgtcgtttgacagcggaacttcatcgctcaccgctatatcgaatataagattggaatgcgtcgcaccgaatactactctaaagtcgtgcattgacatgggggaggaatactctgacgagatgcagtcaataatttcgcacagctttaggtgaagcgcgttcactctgtcgtcgtggagggacacaggatccatgtgaacgacaagctgaattcccatctgctccttgaagtcgacttcgatgttgtctatcatatcgtggctttccatgacattacggtcagcgtctacctcaacatgaacggtaacgtagtagttattcacgccgtagctatggataacaaggtcgtgtatgcccaccacaccgtcatagctgttcagcttatctactatttgcttgacaagcgtaatgtccggcgcttttccgagcagtgtgtccgacgcttccttgataagctttattcccataacgaggatgtatattgctacagccgcgccgaaaattccgtccgttgctttgccgaggtacggtgtgagaatgattccgaggataacggcagaggtcgcgcagatatctcctatgctgtcggcggcggatgcgtacagtgtctcggaattaattttcttcgcggttctgcggtagaacaaagcaagcaaagccttcgccgcaacggaagtgagcattataactatcgagaaaatactgtactccgcgccgcttccgccctcgaatatcgactcggcagacgaacggaggagctctatgccaagcactgtcacgataacggagataaacagtccgcagatatattccattctcgcgtgaccgtacggatgctcatggtcagctggttttgccgagattatatatcccaccatcacaagtatggacgagcctgcgtctgtgaggttgttcacggcgtcggctatgattgatacgcttccggagaggattcccgcagtcagctttatcataaacagcagaatatttacgccgatacctattatgcctgcgttccgacctacttttgcacggtaatttgagtctgctgagtcgttcatagttttcaccttactttattgtcgtgataagctctgtggcgtagggcagtttttcaatccacgcgcagtattctctccattccggcagcttatggtttcttctggcgtaatagatatttacaaggttttcatagttcagcgtgcaggttctcatctggttataggaggacgggagcagctgtatcatatcgtgccagtacgccgtatcctttgtttcaaggtacttttcccttctatcttcaagaaccattatggtagcgtcaagtgaagacagagcgacgtcggacattcggtcatggctgaaatcgtcgcgtgagaactcctttgaatgtatcttatgcatggtgcttgtggagttggctacagttccgaccttgtatgtatcgtattccttccaccagtacagcggggctgtcacgtcaaccgtcacgaatatcatgcgcatgaattttctgtcgtcgcttccggcatggcacagcgttttcatgagcttcatatcgttttcgccgattacgtaattgccgttttcgtcatatccgctgtctatccttgcccatgaattcattgggtttctcatgccgcgtatggcgttttcaaaattcattaccgaccagttctctatctttatcatattcttccccttgctgtgatattacttgttttcgtccgctttttcggctttggcttcctttgcggcttttcttgcttcctctatctccgaaagctcgaatgtgtacttttttccgcagaacaggcaggctgtctcaaccggcttatcctctgctttcagctcttccatatccttgtcgctgagacttacaagcgcgcggagatacttttcacgtccgcagttgcacttgtactcaacgtcgaattcgtcaaacatctgatactctattccgtcgaacaggagcgcgattatctcgtccccgtccttgccgtcagctatcatttttgaaacggagtcgagcatattcacattggcttcgattctgtcgacatccgcgtcggtatatcccggcatgagctgaatgagatatccgcccgcggcaaagcacatattgtcctgattaactcttacgccgagcgcgcacactgtcggagtctgctcactgcttgcgaaatattccgtgatatcctcggcgatctctcccgaaactatgggagacattccgacatacggctcgctcatgcccatatcctttatgacatagagtgttccgccgcctactgctccgcccacatcgagcttgccaagcttattcggaggaagctcaacgttcatatcgtctgcataccctctcacgttgcccttgtagtcccctacacatactatagtgccgcacggaccgtcaccctttatctggagtgtcagggtgttgtccgagtcttttaagaggcacgacatgagagacgttgcggttagcgctcttccgagtaccgctgtcattgtttttgatgtatggtgtatctcgcatgagcggcgaactatatccgtactgtcgcagaaaattactctgataccgccgtctgccgagatagctcttttgattactgacattttttctaccttctctgaattaatatgtatttccttcttctacagctgtcttgagatatgagaagaacgttatcgggtcgagaagctctatatttttctcgggagctgttctcttcatttcgtcaagtatcttcacgtggtctgtaggagagacaagaatcgttctgaatatatggaattttttgttcgggtgggagttgtttatatagtccactgcctgatgagcggcttttaccgtgtcgatatgctcggctccgaggtcgcaggtgtgggtcatgaacggaactccgtttactaccaccgcaggctcgccgtagccgttgtacgcaactccgcctttcgcaaagcgtgacaggtcgtacatctggtttgaatcggttttatgcacgccgtttatcacaaatccgatgacggacaagtcaaactgctcgaaatatttgaggttatgctctacgtttgtctctactcctgaggggaggtcggagaagattctcggagtatacagaagccgcggattgttgtagccggctcccgagtctcccgcttcaaagtagtcgttttcggtatagttttcgtagatgaagtcgaacgcctgcggtattctgtcggaaaggttcggattgaagcaccacataagcggcagttttccgaggttttcgtccttataccaacgcgggatgaatcttgcagtccatgccgcagcgtcgtagtcgcccacgtagaacaggatataggtcttgtttttatcgtagccttccttcgggggattgggtctcctgttggtgtagtgctttttcagcggaaaatgtctgtacacgctcgcatcggcaagtccgcagtatccggcagcgtcggcatccttcacgcagttgtaagaggacagaatctcaccgagtctccattcggattcaacgccttcgtgatggttcttgccgccgatatcggtatatttgacgtgccacgggttgaatccgcagactgttgtaatttttttgccttcgtttttgtcgtactgcgctctgagaatacgcttcatcgttctgaggtccgttccgagaggctgtgttttgtcgtcgcacggagcttcatcgtcaaagcagaacaaatcgaacacaaacgcacggttcgctacggcatagtccatattcggaacaaacgcgttgcccatgtctccgtagtaccatctgtcgtcaacccagcttgcaccgtcgactgtgaagaacattatgctgtccgaggttttcttcatgtatttgttcagcgcccagatatacgcgtcgcatttacggcttcccgtcgtctcctcgtcggtttcccatatctttccctcagccgtgaattttcctgtaaggtcgagttttatctcagctccggttttgttcttgataaggtcaagcgcgaagctgttttctctcacgggaagatatccgtctactccgcaggctgttgtggcggcgttaattgtggacggaacttccgtgtcccacagagctattccgcattcacgaatggtatcgctaaacctgtcaagcacgtcctccatggtttcaagcggcgtcagctcttctccgtgcaggaattttccttccgacatcatatagtcgagccagaacttatcctgcggctcccagaagaggaacagcgtcggcttgtcgcggttgagtattccctgcaggcaggtggtgaatctgaaaaggtcgtagcgtatcactgagtcatcggcgtatttttcgagcgccttgttaatgtcgagtgtgtacatttaatcctccgtttctgtattgcggcatatttctatgaattttctgtcagtcgtcgacagctttttatttttgtgatatacgagcttgtattttctcgtaaattttatgttttctatatgtatttcgcgtatgctcccgcttttcagccgctcgactgccatacgataaggcacaacggctactccgagtccggcttctgcggcgtttatcagtgcggctgtgctcatgctctcccatgcgggttcaggcagaggacatgagacggaggtcagcgtgctttcaaatatttcccgtgtgccgcttcccttttctctgagcagaaagtcataggcgtatatttcttctttttttattgtgtctttcggaaagtctttagccgccacgagcgcaagtctgtcctccataaagtcctcgtagactaagttttggtcgtggacgattccttcgataagcgcaaagtcgagcttattctcaaacagcagtgcttcaagctcctcggaacggttgatttttactgttacttttgtgtcgggattttccgcggcgaattttttgacgtattccggcatgagcatcgctcctattgatatgcttgcgccgacacgaacgactcccgttttttcccatgaacgaatccgcttttccatgtcgtcgaaggtcagcgttatcgtgttcgcgtattcgaggaacatttttccggcttcgcttagataaagtctgcgggaaattctgtcgaacagctttattccatagtaattttcaagctccgacacggcgagactgacagcaggctgtgtcatattcagcttttccgccgcttttgttatactgcatccgcattcgcagacggttttgaatatcttcatgtgtctgactgtcatataagcgtctccttatcattttcattaaattatatcattttacaaattatatatcaaggagtataatatacaaagaatcaccgtaacgggaggaatatatgaccaaaacaaagctgttcctgcgctcgcttatcatttcggctactactgtcggcgggggatttgtgataatttccgtcgtccgcgcgctctatgtagaaaaattgaagctgctgacggaagaagagatgctcgagatgacttcccttgctcaaagctctccgggggcggtggcgataaacctctccgttgtgctcggctacaagctgtgcggaatatcgggagctgccatcgcggtgctggggacttttattccgcctcttgttataatgtcacttgtcgcggcggtttacggtatgctcggagaattcagaaatcttgaaattgtcgcaaacatcatgacgggaatgcagaccggtgtttcagctgtagtgcttgacgcggctctcggcatgaccgtgactgtattccgcgagaaaaacgttctgcgctgtgcggtattctttatcgctatggtattgcagctatgcttttcggtaagctccgtatacattatcctcggctcggtgtcagtcggtattgtgtcgttcgtaatttctgccgtaggagggaaaaatgctgtacattgagctgtttttaaactttatcataataggcgcgctcagcttcggcggcggttacggcacgctatcgctgattgaagagatagctatagacaaaatgggatggataactcacgagcagctttacgacgtcataacgatatcggaaataactcccggacctatcgcgctcaacgcagcctcttttacgggatacactgccggcggttttttcggctcgcttatagctaccgtaggatgtgcgcttccgtcatgcgttatcatggggattctcacctatgtttacacaaaatacagaaaaacagaggcagtttcggctgttatcggtactgtcaagcctgccgtgtgttcccttgtgttcgcggcgttctgcacggtatttcttccggtatgcttcgacgtaaagtccgtgacaatgctcggaggagcggagataaacgttgtgacactgctcatattcgtctgcgcgtttgttttatgcaggacaaggaaggtgtctccaattctgataatattcgcgtgcggtgctgtcggagctgtgcttctttgagttatatataactctgttacattaacgcctgtccgtttattatcagtctgaagctgagtccgagcttttcggcggctttacggcagaggagcattctttcaaggaaaatttcaaagaagtcagtcactgttgaaaacgacgtatcaattccgaggtcgagtatgacttcggttttttcttcgtttattttaagtgaagatgaaaagactgaatagttcactctgtcatgtatatcaaactttgacatttcgttatttctcacacggcttcttcttacgtccgatttatccgcgagaaacagtgccgcagagacgtcgtttacaggaattcccgtgccttcatcgtggtttcctatagcagttactatatccgcgatatccgccgcttccatgccgagcttatcgagtatacggaacgccatgaccgcgccgctttgtgaatgctcaaatctgttgacaagattaccgatatcatgcaggtacgcggctattttcacaagctccacttgatgttcgctgtatccgagaatttcaaggatatatcccgccgactgcgccactttggtaacatgggcgaaggaatgctccgtatagccgagcgctctcagggattcgtcagccttttgtatataggtattaatgctctcgttcttttttatttcattataggttatcattgtaaatcccctatgaattatataaacatttgttaaacaatcttgattatcgggaactgtttactttttccgtcgtcttataaacgcatttgaaagtattatatcataaattcggcttcgattcaatatttttgccgacacgtataattcttttacaaatgaaaataataagcatcggatgggtaatgaataaccgaatcgaaaggataacaaaatgaaaaaacttattataacagttcttatgctctctcttctgctcgcgtcctgctccgacaaaaacggaaacgaaacaggcagcgacacgactcccgacacaaacgaaacaacaactgaaaccgactccactctcggggacaacgacggcgacggcaatgttaaagagtcggatacagacaatacagaatccgacagcgacaacgcagactccggtgaaacgacctacaccgcagtgacaaaggttgaaaatgccaacgacgctataaactttatcggcgcgaatgtatattccctctgtcccgacgaaattcccatgttcacggattcgatatcgctcccgctgactgacaccgacaatattaagttcaacacaggtcttgatgacttatcgggcgtcaccgacatcatcatttccgaatcaggagtcggttcgttcccttattcttatattatggtcagaaccgacggctcaaacacggctgacattcagaaaaagctcggaagcggcgttgaccccaacaagtggatatgcgtttccgccgaaaaggtagcaagcgtaactctcgacaatgatgtggttctcataatgggctatgccgatcaggttgatgctatcatggacgcaacgctcaaggcggcagagggtgtttacgaaaacatcggctcggtcgttaacgttctcggctgataatggtcttctcgggaattccgtttttatatttcttcctgcccgtacttcttctcttttacttcatctctcccgataagataaaaaatccggtactgcttttgttctcgctgattttttacgcgtcgggagagccgaaaaacatcatagttatgctcgtgacagtgcttatcgcatactgtgcggcgctgtggttctcgaaaatatcaggaaaaggcaggaaggcggtttttgcggtatcggtaatactgtcgcttctgccgcttctgtatttcaagtattccgactttcttattataaatgtaaacacggtaacggggctttcaattccgaaaacaggcgcgattcttcccataggaatatcgttctacacgttccaagttgtaggatatctcgctgacgtataccggaatgactgcaaagccgcaaagaacccgcttgaccttgcactgtacatctcactgttcccgcagcttatcgcaggacctatcgtcagatacacggatgtaaacgacgctctcgcaagccgggtacacagtatagagctcacttaccgcggaataatgcgcttttcggtgggactgttcaaaaaggttcttatcgcaaacgtgctcggggagctttgcaattcgctcggtgtgtcgatgctcggcggatgggtgtacgcgctggcttcgtcgttgcagatttattatgacttctccggctactccgacatggcgatagggcttggtatggtgttcggtttctcttttcccgaaaacttcaactacccttacatttcgtcaagtgtggcggagttctggaggcggtggcatatttctctcggctcttggttcagagattatgtctacattcctctcggcggaaacagagtttcgtttgtcaagtggataagaaatattcttgtggtttggatgctcacgggattatggcacggcgcggaatggacctttgtgctgtggggactttattttgcggtatttcttgtgcttgagaagttgtgcaagggaatttttgcaaagctcccacaggcagtcaagcatatttacgtaattttagcggtgatgatcagctttgttctgttcgactccgcttcggtttcggattttgccgcgcgtatcgggacaatgtttgatttcactaacctctccgacacaagctcgctgtattatgtaaaaagctacgcagtcacgctaattgtcgcggtaatcggctctactccgcttataaagaatgccctctcgcgtacaaacgaaaaagtcaaggcagtgctctcccccatagtctgcgcttccgtgcttatcgtttctactgcgtacatcataggcggctcgtacaatccgttcctatatttcaggttttgacagaagatattatgaaggaattatttaaaaaaatcactgtaggcgtgttctgcctgataatcgtctccctcatggcggcgcatattttgcttcccgacagggacatttcgacaagcgaaaggcggcatttagcgtcacttccgtcgttctctgcgaattctctcatgtcggggacgtatatgcagaacatggaaaaatacctctccgaccagttcccgctccgtgagacctttcgtgccgttggctcaatctcggagctaagcttcggaaggcttgatgtgaacgacatttactcccataacggatatcttgccactctcgactatgagtatgacgagaacgccgtgaaaaagtccgctgacaagctaaactacgccgcagaaacattcggtgggaagtattacactgctctcattcccgcgaaggactactatataaacgacggcgtacatcccgtgcttgactatgacgcgctgagggaatcgttcaacgacagctccgacggggtgagcattgacatttccgaaaagctgagcctcggggactactacaagtccgacagccactggaggcaggagaagataaccgccatcgcacgggatattgtggaggaaatgggatacgccgcgccggagataagctataccgaaaacaggcttaacggcttcaaaggagtgtacgccggtcaatctgcggtatggcaaaagagcgaggacatcgtttacctcacgtgggaaggacatgacaagataaaggtgaaggcaataggcggggaatgcgacgcgctctacactgtcgaaaaagcaaaaacaagcgttgacatgtacgatgttttcctcggcggcgctgttccgctcatctttatcgagaacgaaaacgctgtaaatgacgctacactgtttgtcttccgcgactcatacggcagcagcatgacaccgcttctctcggcttatttcaagaatattatagtgatagatttcagatatgtcacccttgacaacgcagttaagctgtgcagcgaatattcacccgacgctactcttgcgatgctttcctgcggagttgtaaaaaacggcgagatgctcaagataaccgtaaaataagaaaatcccgatactttacttcaaaaaatagagtatcgggattgttttattcctgtgtgacctttccgcttccagtgagggatattttctctccgagatatttggggtcgggcttgattacggtgaagatgaagtcctttgttcgggcgatggactctcttatgtcgcgaatactctgtccgcggtacacaacttcgtcagccggaactccgacgcagtccatgccgaaagcctttgcaatgtatatcgcgcggtagatgtggtatttctgcgtaactactataatcttttccgcaccgaacacttcctttgcacggactacggagtcgtatgtacaaaatccggcgtggtcgagaaaaatgtcatcctccggcacaccatgctccacggcgaagtttttcatgcattcgacctcgttgtagtccaccctgccgtggtctccgctcatgagaagctttggtgcgccgccgttttcgtaaagctctatcgcggtgagcagtctgtcgcgcagcatcaagctcggagttccgtcctctcttactcccgcaccgagcacaagtatacagtcggcatcatagtttttcgcttcatctgccgtcacaatgctgtctttcgcagaggaatagacgacaacgttagccgcggcgaggaacaccattgacagcgcgaacactattatcaggattttaattattatccgtattattgtcttcatttatttgtctgacatactccttgacctgttttgcgctgagctttttcgcgcgctttctgctctttatcagctttattatgagaacgactgctataacgaaaagcgcggctataatgatatacgggagagaggtcaggaaccataccgcaaaatcaacggctccctctccgatatttacgaacgattcttccagtccgcttgctattctctcgccgaacgtcatgtcgctctccgccacaacctcgcgcacgacctcgtcaacgtcaatattcacggtgcagtaggagatgaggctgtcgtatttcctgagctgtgaattatatgagtcaagctgatagtttacatctgtgagccgcgactgtaagtctattacatccgagagagactccgcttttgccatcagcgccatgagcgaatctctttcggcttcaagcgcatttatgtggctctctatgtcgatatagctcatggtgacgtcgttctcgctctcgcttttgcgggtcagagtgccgaggtttcctgcgtccgacatgaacttttcgtagttttccgaggggattcgtgcagtcagatacgcgctgcggcttgaacgtgaggagtacatactgtttccgtagaactccgaggactcaatatatccgccatatgaagtcacacagcgcgacatggaatccataaagtcgtcataagcctgcgtctggtagctgaggctcgcggttttgattatctttcgctcggagagatcgttttctgcggcattttcgcttgagagtgtgtcataatcaatttcttcctccgaaaaaccgtttccgtaatagctcggagccgcggcggtttcatacatcacgtcttcactcgcgaaggtcatggatttattggaatttccggcggaggagcaggcggtcagcgatatcgtcatcaccaaagaaagaagtacggcaagtttttgtttcatgttgcgctcctttatatttgttgttgatttttagacgaagacatgatgcaatttgttccactaatttagttttattcttcaaaataatatctcttgcacaagcacaggtattgtttatttctatttcttgttatatattctactttttcactgttgacatttaatgctgtatgctgtataataatcgcatcatacattaatttttattataatcagttataatttattactatatcaggagggcagtatatgaaaagaatctataatttttccgcaggtccatccatgcttccgtatgaagtgcttgaaaaagccgcttcggagctaatagtttacggtgacagcggtatgtctgttatggaaatgagtcacagaagcgcagactttgagaagattatcgaaaagactgaggctgatttgcgttgtctaatgaatataccaaacaactacaaagttctctttctacagggcggagcttctacacagttctcatcagttccattgaaccttatgaagagcggaaaagcagactatatactatccggtcagttttcgactaaagcatataatgaaggcttaaaatacggtgactgtttggtttgcgcttcttcaaaggacaaaaacttctccgaaattcctcgcaccactcgtgaattatttcgtatagatgcggattatgtacacatctgcttcaataataccatatatggcacgaaatttgactacattcccgatgttggtaatattccgttagttgcagatatgtcctcttgcattctttccgaacctgttgacattacgaaatttggtgtaatatatgcaggtgctcagaaaaacatggcaccggcaggacttactgtagtaattgtgcgcgacgatctgcttggctgggtaaatcctatcactccctctatgcttaactggtctctcatggctgataacgattccatgtacaacactcctccatgctatgctatctatatggcgggacttgtatatgaatggttgctcagacttggcggacttgatgaaatgaaaaagttgaaccagatgaaggcggcacttttatatgattatcttgattcgcaggattactataccgctcccgtgaaaaagtcgtgccgttctatgatgaatgttacctttataaccggacaagatgagcttgataaaaaattcgctgctgaagcttcttctgttggattgaaaaacctgaaaggacatcgttctgtcggaggaatgagagcttccatctacaacgcaatgccgtatgatggggttgaagcactcgtaaaattcatggaagcgttcgccgcagataatccaaaataaccggaggtatttatgaaaaagataaaactaatgaataaaatagcgaaatgcggaactgacagattttcgtcttacaactatgaatataacgaaaatatattatcccccgatgctgttatggtacgctcggcagatatgcacaactatgatttcggcgatgagcttaaagctatagccagagcaggagcaggaacaaacaatatcccgcttgaagaatgcgcagaaaaaggcattgttgtatttaacacaccgggcgccaatgcaaatgccgtaaaggagcttgtaatatgcggaatgcttctttcttgccgtgacattatcggcggaataaactgggtgcatagctcgtgcggtgaagctgacataacaaagctaatcgagaaggaaaaatctcgtttcgcaggaacggagctttttggaaaaaccttgggtattatcggtcttggcgctatcggcgggtttctcgcaaatgccgccgtgtcgctcggaatgaacgttctcggatttgacccttatatatctgttgatgcggcttggaagatttccggtttggtaaaaaaagttgactcgcgagaggaaatatttaaaaactccgactttatttccttgcatactccgctcatcgcagacaacaatccaaaaataaacacaaagcacatgataaacaagaacagtattgccatgatgaaggacggcgcggtaatactgaactttgcgcgtgatgctcttgttaatgatgatgacatggaattagcattgaattccggtaaattacgcagatatgtaacagattttccaaacataaagactgctgacatgaacggcgttatagcaattccccacctcggtgcttctacagaagaaagtgaggaaaactgtgctgttatggctgccaatgagcttataaattatctagaattcggaaatatcaaaaacagtgtgaactaccccgatgtggagatgccgcgcagcgacggtcaaagactcgtgattctgcacaaaaacattccgaacatgatatcgcacatatcctcagctttttcgtcacgcaatattaacatagaaaatatgcttaatcgttctcgcggaaactatgcatgcactcttgtggatattttgacagatgtaaatgacagtattatatcatacatcaaaaaagttgacggaataatccgcgtactaaaaatcaaataacaagatatggaatccctctcaaaatcttattttatcttcctcgattcaaggtagtaccttttgctctcagcctctcccattgaaaaggtcttgcgcgggagtgttccgttcttcgagacgtagtcaaacagctccgatttatcaataccgtcaaacaggaatccgaccgagttttcctcctgcgcgagttttgtcagtgaatcctcaccgtgtatgtaatcgcacaccgttccgggattttcgctgacaaattcgtcaatgaagctctgtagagttccctgtgtcagcggatgaactgcggtattaaacaacagctcttcacgtgtgtctcccgcgactacggttattttctgcgtttttgacaaatcagacgacgtgattttgtgcagcttgttcatcagcttttccctgtcgcagtttttaacaagtctgtaaatcggctcgaacacaagggaatcgtcgtcgagtggcgtcaattcgcaaagcgcgtatctggcgggatgagtttccggcgcaccgtttgctttgagcttttcccagtgggattttgccgccgcgagagaatggtttccgtctccgaccgcgtacattactccgttttcatgtgcggcttcgtattcctcgatggattctgcaagtctttcaagcgcgtctccgacaacagaatatcccttgatgtgaccgccgccagacatgagctcgaaatcgtacagcttttctcccgatacttcccaagccttgtcgaagagcttcttatcgctcacgaggatgagtatatgcggcacctcaattttggaaaacgcacgtatctttccgcgggacgggattctctcgactatggtctcctctgtggctcttatcggggaggaagaatctcggctgtagtcgtacttttcaaggtcaagctttccgacgataccgcgccttgtgcttccgttcggaagagtgcgctcaacgtacatcatgccctctacaagcatcattttgttctcgtcaaactcatcggaatgcgctctgacggctgatatcatcccttcttccttgtctcctccgagatacacctctggcaggatatagtcaagcgttgacggtgcgtttcctataagctcgcggcatctcttccagtaatcctcttcggacgtgaactggtcgcaggcaatgacagcccatttattcattttatcgctatctcccgcaaacggaggaagcattatttcggcaggtgaaaagattgtatttctcatatgagtaagcctttctgtgaattttaaggctattatactacagtgggggagtgttgtcaacagctatttttattatgggttataatttaattcaatataccattcgcaaatgcatatgcatataatgtaaattagcggatatacaaaaacaatactgaggttaataaaaatggacaaagaaatctataatgtcaaagttgtaaaattcggcggaagctccctcgcggatgcggagcagtttaaaaaagtcggcagcatcataaagagcgacacatcccgacgttttgtagttccttccgctccgggaaaaagattctcgggagacacaaaagtgaccgatatgctctactcctgctacaacgctgcgcagaacgggggagattttgactctgtttttgctattgtgaaggacagatttgactcgattatcgcgggactggggcttagtcttgatttatccgcggaatacgagcacatcaaatgggcaattctgcatcacgccggacgggactatgccgcaagccgtggagaatatcttaacggaatgattttagcggagtacctaggatatgacttcatagatccggctgactatataaagttctgcgatgacggctcttttgacgctgagacaacgaacggtatcttatccgaggagatgaaaaagcacgagaacggcgttattcccggcttctacggctcacatccgaacggcacgatacgcactttctcacgcggcggcagcgacatcacaggctcaattgtagctcgcgcggtttacgctgatttatacgagaactggacggacgtaaacggtttccttatggctgacccgaggatagttccgggagctaagacaataaagtacatcacctaccgtgagctgagagagctttcatatatgggcgcgactgttctgcatgaggacgcgatattccccgtgagatttgccggaattcccgtgaacatacgaaacacaaacgacgtgagcgatcccggcacaatgatagtttcgcacaccgacagctacgactccgacgatattatcacgggcgttgcgggaaaaaagggattctgcgtaattacgatagaaaaggctctgatgaactccgagaaaggcttcggcagaaaggttcttgaagctattgaaaaagaaaatctttcgttcgagcatcttccctccggcattgacacgatgagcgttattctgaacaagtccgagatttcgggatgcaaggaaaggcttatcaaccacatttgccagatggtcgagcctgacacggtttccattgacgagggacttgcgcttattgcagtcgtgggtcgcggaatggttcgctcaaagggtacggcagttcgtgtgttccgtgcggtagccgacgcgggaataaacatccgcatgatagaccagggttcgtccgagcttaacattataatcggcattgacgagagcgattttgacgaggctctgcgcgcaatttacagggagtttgtaaaagaataagccgaatacagacttttctctatactcggcttaggattattatatttctattttgtatattttggacttaaactccgcgcttccgtcgtgctttttatagcttgagaacctgtcaaagtgcattccgagtttttccattactctctcactctgcgtgttttcttcggcgcattcggcttcaaaaacgtgcgcgtcgtatgtcttactgagatagtccatcacggcttttgcggcttcgcaggcgtatccctttccccagtcgtcgtatcttatcgaatatgctatcgaccacactccgccgtcagagaaagctccgatagtgccgactgcgtgaccgtcatcctttgcgcgcattatcattacatagcgagtgcgtgagttcggatcctgtctctcaagccacggaagcatatcctcgggctttttgcatggatttgagaggaggtatttgtaaaccctctcgtctccgctccatgagaaggcgtcaagataatccgacggcatttcgcggcgcagtatcattcgctccgtctcgatttcttcttcgtgcagtgttatccagtagcgctgttctgtatctccgtcttcctcaacttcacgctcaaacacaccgccgttatttataatggactttgccgagccgatgttgtccttgccgcaggtcatgagcaccttgttcatacccatctcacggcatttctcgagggcgaggtgaatcattgcggttgcatagccttttcttctctcgctcgggcggattccgtctcctatgtggcctcccgtatggcagagattgtcgttcagataatggcgaatgttcacggctccgacaaagatattcctgtccttgtcaaggcagaagtatgtggagtccggcactctttcatccgtagcttcctttacttcaaggttttcgaggtagaagtcaaagtccctgtagtcgttctttcttatcgcgtagggagagaaattctgctcgacgctgagccactcggacatcatgtcgtcaagctgttctttatactcccgcgatagttttacaagctctatattcattatttctccttgttaaagtgttgcaaaaatctcgcatcccttcttacgcagccatctgtacagcacgaacgtaactgcggcaaacacagcgagcgtgataagcatgaacaccgtaaatccgatgccgtagcccaccatcatgtaaacgccgcccggtatcaacgctgcgacaaagcctatgagaagggacagcattacggaagctccctgttttatcggggttatttcgttcgtccagttgaggtcgggcattttcaagccgaggaagaggtcaaacgccgccatgaatgccacaaacacaagattcattaccgtcgcgaggatgaattctacagcagtgtacctgagtgcgattcccgcgcagacacagcagaacagcgtcggtattcccgtaagtatgagctgaacggacagctttgctcggagaacctgccacggctttatcggaagagtctgtgcgagccaaagcgactttccctcaagcgaaaccgaggacgccgccatattgttcatcgaggacacaatacaaatagccgagcagaatatcatggcgattatacctgtgtccgtgccgaaaatctcgctcataaccggataaatctttccgcccataatgaaaagtgcaaatccacatatcacgagcatcagtgtaccgagtccgcagtttagcatatagttggggctggaggtgaatcttcccatttcctttgcgaaaagtgcggaggcaacgcttcctactttgattccgctttccttataggctttcttttcggttgagccggaggacgttgcgattttcacaaagctctttgagaggagaaaccatgtgagggcaaaagtcaaggcaacaaatgcggtgactatgattatggaaacgacgtctcccgtgccggatttgccgaaaatgtagagcggatatgccgcgcctttgattttttcactgtaggatacggcgttcgcgatgaagtcactgagaatcgactgcgccttgaagtagaagaagtagtagccgccgatgaacagaagtgaaatgagaactgtgataaagctcttattcttcagtttcaggctgacttttgctaccacccatccgagtatgcaagacaaggtcaggacaaacaccgaaatgagcaggacatacagaagcgacgagacgagtatgccgagagaaaacttagctttacacatatagactataattgtaggaatggatagcgtcgcggaatacataagtcccataaggtaaacgccgagcaaccgtgacagcattatagtatgtacgggtatcggcatggacaagagcaggtcgttatccttcgagaggtacagtccggaaaatgtgttgaacacgctgccgaacgctccgaggaacactgcaagcaagccgagaagtgcgaaatacatccagtcaagtccgagaggaacgaatgcactgcacaggttattcgcgaggacagtgaacaatacgccgaggattccgaccattatcgcgacgaacatgacgatatatccgacgatagctccctttgagcgcgccttatttttcttcgcgtcgtagaagtagctgcggaatatttcaaaaagctgcttttttaacagtaccttcagcattgctctccctccaattcaaggaatacatcctcaagcgaatcgtctcccttaacttcctccattgtacccgagcggatgagttttcctcctttaattatagctaccttatcgcacagcttttcagccacttcaagcacgtgtgtcgagaagaatatagctccgccttcgtcacatacttcacgcatcatttcctttaatatatgcgccgccttcgggtcaagtcctacaaacggttcgtccatgattatcagcttcggagaatgcagccacgccgctattatcgccagcttctgtttcatgccgtgcgaaaatgccgcgataggttgaccgaggtctttttttatttcaaaaatgtcagcgtatttgtttatcttatcttttctctcgtcaagtcccacgccgaaaatatccgcgatgaagttcagatattttatgcccgtcatataatcgtaaaggtcggggttgtcgggaatgtaagccgttatctttttgcattctatcggttctgttttcacgtctttgccgtttatcataatcgtaccggagtcgtagttcagtattccggctacggatttgagcgtagttgtttttcctgctccgttatgcccaataaaaccgtaaatttcgccgggtcttatatgcaggctgagatcgtcgacggcttttttatcaccgtattgtttggtaagatggtcaattttcagcattgtctttccctccgtatatcttgtttgtcattttttctctgaatttattgatacataacaccgttacgctccgaaaattatagcattcggcggatattttgtcaatgagacatcggtaaagactaaattaaaaatacattaaaacataattgttcggtaaaattcatgtttagttaaattttttcacgttttgaggttgacattttcacgtaaaatatgttaaaataacaacacagaatgatgagcttttcacatttcaaataatattaaaggagtatgagcaaagtgtataacgaaagacgagaacaaatccgcgctcttcttcaatcaaaaccgtttatttcaattaaagaacttgaagaattattcccggacgtatcgggcatgactctcagacgcgatatagaatactttgagagagagcacgaggcgataaaagtacgcggcggcgcgagaagtatgcgtttcattaccactcagacagacggaactatagcttccagaaaacaggaaaacgtacattcaaaggatacaattgctcagagagccgctagctttcttgaaaccggacgttcgattttcctcgattccggctcgacattacagcacatcatacagtacgtaccgaacgaaagattcacttttaccaccacagatcccgcagttgcgctggagctttgcaaggtcggacttcctctcgtaaacatcgtaggcggaagacttgaccacgacaatcagactatcaccggtcttcaggcgacgcgcttccttgcggatatcaacatcgacatagcgttcctctcaccctcaggcttgtcttcaagaagcggattcacagtcggaaactacagcgaatgcgagctgaaacgaatagtcgtagaaaaggcgcgccttgttgtaatgcttatggattcttcaaagatagacaagtccctcccctacaccttcgcgaacttctccgacattgacatactcataacaaacacttccctcccggacgacctcgcgaaaatggctgcggaaaagaatgtcaacgtcattgatgtgacatacgataattaatttcatttaaacatacatcactacacgaaaggaactgtacagcaacatggcaaacgtaatcagtatgccccgccagggtcaaagcgttgaatcgtgcataataacgacgtggcataagaaaaaaggcgaccatgtcgaagtcggcgatatccttttctcttacgaaacggataaaagcgcctttgatgaaccttctcaggcagcgggcactgttcttgccgtcctcgcggaagaaggagacatagtaccctgtcttgacgcggtctgcattataggagaagaaggcgaggacatttccgctcttctgaaaaccgatgacaaggctgaaaacactaacgtcaccgaaacaggcgcagaagctcccaaggcagaagccgaaagcacagcaaaggaagaggacacagaaagagtattcatctctcccagagcgcgtcaccttgcactcaaaaccggcgttgacatgacaaaggtcgttcccacaggacctcacggcagaatcatcgagagagacataaacaaggctctcgacgcgggatttgtttccacgactgccgctgtcgaagacttcctcgcgggaaaagtcactgtcgaagaagcgcacgaagaaaccgctgttgttgcagccgtatctcagccggaagctgctgttgtcgaaaccatcatcgacgacttcagagcttacgaagaagagcctctttcaaacatccgcaaggttatagcgcgcgctatgcattcttcactttccgaaatggcgcagctcacgctcaattcctcgttcgacgcgacaaatcttcttgcataccgcgcaaagctcaaggaaaacggcgaagctctggggctttcaaagattactataaacgatatggttctctttgccgtcgcgagaatactgccgaagtatcctgagattaacgccaacctcttaggagaaaccttccgcaagtacaagcacgcaaatgtcggtatggctgtcgacaccgagcgcggacttctcgttcccgttatattcggtgcggaaaagctctccctctccgacatctccgctcaggctaaggttctcgcaggaaaggctcgtgaaggaaagtgctctcccgatgaaatgtcaggcggcagcttcacggtgtcaaacctcggctcgatgggcgtagaatcgttcactcccgttatcaatcctccgcagaccgctattctcggagtttgctgcactacaaacagacttaaagctgacggcaaggtatatcccgcaatgggtctttccctaacgttcgaccacagagctgttgacggtgctcccgcggctaagttcctcaaagaactctgcacggctctcgaaaactttgatctgcttctcgcaaagtgagggttaaatggctgacaacagatttgatataattattataggcggcggtccgggcggttacaatgcggctgaaagagcggcacacggcggactgaaaaccgcgctttttgaagaacgtgctctcggcggcgtttgtctcaatgagggatgcattccgacaaagactttgctctactccgcgaagatactcgactatgccaaccacggcgaaaagtacggtgttacggttgaaggcgcaaagctcgaccacgcgaaagtcgtcgacagaaaggacagagttgtaaaaacgctcgtctccggagttgcggctaagatgaaaaacgccggagttaccgtaataaacggcacggctaaaatcaaagaaaaaactcccgcgggattcatagttgagtgcggcggtgagcaaaccttctcatatgcacaggctccgaggcggttattcctccgattcccggacttcgtgaagcttatgaagccggatttgcagtgactaaccgcgaaattctcgacatacgcactcttccgaagaaggttgtcgttatcggcggcggcgttatcggactggagatggcgtcatactttaattccgtcggctgcgaggtatcggtcatcgagatgcttgacaagatagccggacctacggaaaaggaaatctcctccatacttgagaaaaactacgcgaagaaaggcgttaagttcatactcggcgcgaaggttacttccgttgacaagagcggacacgtcgaatacgaaaaggacggcaaaaccgaacgtatcgaatgcgatctcgcgcttatctcaaccggcagacgcgcacgcacaaaggacataggtcttgaggaagtcggcgttcagctgaaccgcggcgctgtcgttaccgatgagacctgccgtacctccgttcccggaatttgggctgccggagacgtaaacggaaagataatgctcgctcacactgcctaccgtgagggtgaagttgcgataacaaacatcctcggcggacacgacagagttgactaccgcgctatcccctccgttatctacacaaatccggaagtcggaacagtcggcgaaactgtagagagcgcgaagaaagccggtattgacgcggaagaagtaacgctttcacttagatacagcggacgctacatagccgaaaacgaaggcggggacggtatcgtcaagatagtctacggacgcgagcaccacgaaatcctcggcgttcacatgataggctcgtacgcttccgaaatcatctacggagctgccgctatggttgcaaaggaacagcgcgtttccgacgtacaaaagatagtattcccccatcccaccgtttgcgaagttatacgcgaagcaatgttcacaatataaatctgatataaatttgaaatacgacaaaggagactcaagtcatgccgaaaagccaatatgtagatcccggtaaggtttttgaacccggatatattgaattcgaccccattcctctttgcagatacaacaagagccttgaagaagaaaagaaaaactactccaaagctgattttctccgtatttaccacgacatgagaaccatccgtgaattcgagacaatgctgaacgaaatcaaagtaaagtccgaatacaacggtgtaaagtacaacaaccccggtcccgcgcatctttcaatcggtcaggaagcttccgctgtaggtcaggcgtactgtctcgacatcaacgacttcacattcggctcacacagaagccacggtgaaatcctcgcgaagggtctttcctcaatcaacaagctcgacgaaaccgaactttacgatatcatgaaggaattcctcggcggaaacattctccgtgttgttgaaggaaagcagacaaagcagggcgacgttcgcgagcttgcaaaggacttccttctctacggcgcgcttgccgaaatcttcgctcgtacaacaggcttcaacaagggtctgggcggatccatgcacgcgttcttcattcccttcggtattttcccgaacaacgctatcgtaggcggagctgctcccattgctctcggcgcggcactttacaagagagctaaccacaagaagggtatcgttatagcaaactccggcgacggtgctctcggacgcggacctgtgcttgaatcactgaacttctcctctatggatcagattacaaagctctggggcatggacggcaagtactcgaacgaaggta

SEQ ID NO: 4170 - DNA, 4024 bp, Unknown
  16S sequences of unknown bacteria
cgtgggcgcgcgcgccttcgggcgtataggcgtcctttaaacgttcgtatatcctgcggctgcccgcgacgtaaattttatagccgcccaccacccataaaacggtctttatgagccgttccgcaacgcggtagttgagttcgtcgtccactccgtcccgaaaggcggtgtatcgatacacgtaattatagccgccgtttctctccgccacaagagcgatctccgccctcttttcgggcgaaaccgcgttcactttttcctcaaaggcttccagcgccttgatcatgggataaaaatctttgtccagcacaggctttctcatgccctcgcctccctcgtttttgtctttattatactactttttttgaagataacaatggaaaatgtttctctgtttttataaaatatttctcaaaagacagccgtgaaatattttacaaacgaaaagatctctgctataataaaggcatggaaaaacagggaaagacaaagcaattttatatgcacaaaatcgccaatctcctgaacgtgcagaaaatcgtgacgatacactatcaggaactcgacaagacgtacgcgtccgaggaggaaacgcacgatttttgggaactgatctacgcggacaaggaaaacgtttccatcgtcaaagaaggcgagcgggtgcctttgaagcagggggagatgatcttcatcaagccgaatcagcgccatttcgtcgaaagctgcggcaaagagccgaatatctttatcatctccttcgagtgccgttcggaaagcatgaaattttttttcgacaagaaatattcggtgcccgataactatcgctatctcttgcagaacatcatgtcggaagcgacggaaaccttcgtgattcccgatttcgatccgcatctcaaaaagctggaactgcgggagaatcccaatctcgggggggaacaggtcctcaaaaactcgctcgaattgctgctggtgtatatgctgcgcacggcgacggggcagagcgcgcctcaggaattttttatttccaaaatcagttcctcctccgatttacaggacgaaatcgtgcgcattctctcctcaaaactctacgacagtttcgagctggacgatctttgcgccgccctccattacggaaagacctacctttgcacattctttcgggaaaagacgggcatgagcatctatcagacctatctgaaactcaaaatcgacgaatcgaaaaaactcatccgacaaaaatattctttttcggagatcgcgggaaaattgtgtttcgattccctctcccatttcaattacgtctttaaaaaatacgtgggcatgacgccgggagaatacaagtcgagcatcaaatagtttctcccttcccctcaaaagcgcgccttttcgcgaacgcccgaaaagccgctcgtaggcgcctcccgatttcccaccgaaaaaacagagctctttgcttcaagccgcgggacaattcccaaacactcctgcgccgccgccctttgcagggggaggaaacgctgccattcgcccaatactccttagagcgggctattttcccggcttcccaatcttctttcctctttctcctttcggatttccttcgcatttgaatctcctctttttgatttcttcttatggaattttccgcgctcgattttattgtacccaaagaggaactatccttcaaaaatgacagtttcgcccttgttgtccccccgatttgacgcgggggatataccgttaaactcccgccgcttgcgcgggagttttattcatagaccgaaacagacggcgaaaaaacgcctgaatccttcaaaggcgtcccccgccgcccgctcgcccgaatcgtaataataggcgcccgttctttcgtccacggataaacggtccaggggaaatccctcctcgcgctttcgatgaggtacggacgcgagaaaaaaggattccccgcagagagagtcgtcctcacattcaaagcgcctgccgtcttttaaaaacagactgacggcatttttatatctcgcccgtaaaagccccctctctcccccgtatttctcggcgagcgacgcataatatctcgtcatctcttcgtcggagagcttttttccgaagggacggcgcacgtgtacgcccggttgcagagagggagaaaggtcttcaaaatacaatcccgaatcgcaggaaaagacgaaaacgcggtaaacacgaaaatacagactcgctttttcccgcgcgttttcgagcggggagcgcccgacctccgccgcctcgggcgggggaaaaggcatatcccgcaacgacaaaagctttatcggcaagggcgcgaggcactctctcatatattcgaatttcgcgggattgcccgttccgtataaaagctcctccatggtttcctcctttgcattctgcgcgccttttgtcttgcgcgcgttccttttcgcttcgcgcctattctttctccgcccgcgccctttgtcctctcgttcgccttccctgcgccccgccgctttccgcttcccctcggctcgttttttcccgactgcgccctttgtcctctcgtttgtatttttttctctccgtcctgtttttatctgtccccgaattggaatgtctttccaaaacccgtttaaacgcattctttgcgaggctgtctagccgaacggcgcgcggacgagtctttcctcgtcctacaattttgaagcgtttttagacgcgtttaaacgtttgttcggaattttatcgtcattattgccaaagagcgggaaaacggaaactgaaagagccttaaaagcgtttaaccgttcacgggcgtcaggatgtcgaaaacaaagggaaaactctgtgcggtcttgtcggcgaaattcatgtcgtatcccgttccgtcgcaatagaagaaaccttttttcagctcggcgcgcaaatagcacattccctcgtcgttctcgtcgttgtggcggaagtaccagggcgcgaacgcccgcacgagcttggctcggatgcccgcgttttccggctttaacggatgaccgacgctctttgcctccccgtaaaaacggaagcattgcgcgcagaagctcacggcggggttttccgcgatctgccgggctttggcggagttttcgtgcgtcactatgtaaaaggagccgtcgtcgtaaaagacgtccaccattctcacgtcgggcgcccccgcggccgccgccgccaaagcgaaagcgcaatcctttgcaaacagcttttccatgacctgtaagccttcttcgtaaacgttcatcctctatctcctcttttctttgcatccccggcgggcagagcgttctttatttttttgtctttctccccgtttacggacggagcttcgggcggtatctcgttccgtagcaaaggcgcgcacgcgccgtcatctctttgataaaatccgtctttgccgccgtatatccgtccctgttccgctcgaatttttctttcagttccctttttaagagggcgtacttcgccgcgacggagggattttcgcgcagataatcgcgaaaatacagttcgtcccaatcccccgcgcgccgcacgtgcagatgaaataccttttccgcaaatccgtcgggcgtatagcccttgttgaaggaaagcttccacggatcttccgactccgacatcaaggtccattcccctttcaaagcgcgcgccgctttttcggcgtccgcacggggcgtcaactccaataaaatatccaccgtcggcttggacaaaagcccctcgacggccgtgctgccgatatggctgacgcgaaagacatcgcctaccgttgcgagaatctttcgcgcttccttttcgtaccaaacgggatagagcggattatattctttgagaagaatcgggaacagcatccaaagctcctctaacgtcatttcgtcgagcgtctttttcatttcgtttttctcccctttcattatatcccttttccccgcaaagtcaagcgaaagaagggcgcgccgcgtttgcctttttcccgctctccttccacagaaga

SEQ ID NO: 4171 - DNA, 32759 bp, Unknown
  16S sequences of unknown bacteria
agcgtttttgactcttttttgaccgaatcagtaatttcggtcaacgtagatggctcctcaggtaggatttgaacttacaacttacatttcccgtcactttatagataatcactaccaatatccaaaattttattttcatcaagatgtaaggattttagccactcattcttttccttttgtagtttacgatagctttcactatcgggattgcaaaaagacatcaataggttatagtgtttcagtttgttccttactttatcattcggattgtcttcgtcggcacgaggctttttagaatcaatataaaaatataaataacttttccaactatacgcttttaacccttgctttaccgctcgtttgcagtatctgcgccaacaaagccgtaaagacgatttgtgtttacacatttgaaattcttcccatttaaaatcaatagcaaggaaaccttctccacgtctgctacgctccggaaataagatataatttatctcatcatcggaaagattcaataattcttccgttttgattttaaccatatttagccgctccacaaccttccaaacagtcattcgggaacaaccgcaaagggtagcaacctgcgtattattgttgccctttttgtgatattcgatgattaacctgtattttaccataataaaactccttttgcttgcccccttataggacatcagtacctattgctgcgtgtaaaaaagcgggaaccactcacctttttcagggcaaatttttgattaaaaactaaaaaagacaagaaaaatggcaaccacactttctcaagaatggttgccaaatttgcgttttattgtaaaatatagtgctttttagccgattttggctatttttgctttacctagggttgcggatattagcctgcgcaaaagctttcaaaagcgaccgataggtaacattactgtctgccatcgaaaatcgcccgtcttcggaatatatattatcgcccgactgtacgcaatattttttttgcgtttttcctgcgccgtttttccgtattttttctgaattttcgccaatcccgattgactgcaatataaccgtgttttataaaaacatcgccatataatgcggaatagtgagttttacgtcgcttgtaccgacgtttccgtcaacgattttatatgccgccgacggtttatatgcttctataaatctgttcagcgattttgttgcggtatttcccgctttcacttccactgggaccacttccccgtttttttctatcagaaattccagttcgttggaatcgtcgggcttgtaataataaagagcgtaaccgtttttcaccaacgtttcggcgataatattttcgtaaataccgcctttggcattcccttttattgtgttttcaagaatcgctcttttggtttcaaaaccgtacatagcgcacagcaaacccgtatcgttgatatacaatttgaactgatcttcatcggcgttcgccatcaacggcagatacggctcgtgaatattgtaacacggattaacgatattcgagtctttcagccattgaacgcttccgccgtattttttgcttgtctgccctttttccacggtggaatactgaaatttcgtgatctcctttgcgagttgcttcggaatagcgtcgtaacacttgcgcacctttattttttctgcgccctttgcgtgttttgaaatatcgaaacgatagttttcgagaattttttcctgcaaagcggcaacccgcgtaaaatcgtgatttatggcataatcggcaacgacttccggcataccgcccaccaccatatactcacggaacagcgtttcgtatttttcatttagcgcgaaaggtactttttcttttttatcaaaaagttctttcaggtaagaaattccgctttcgtacccttccgcccaaagaaattcctcgaaatcaagcgaatacatcgtaagaaacgtttcgtatccggtaggaacggattcgggttcttccgtgttttcgtcggcgtcttccccgtatgtcagacctaaaaggcttccggaagtaataacgtcgaatctcccgtcctccgcaagaaatttcaacgcggtacgcgcgcttccgcacgcctgaatttcgtctaaaaatatcagcgtatcgcctttgacgagatttacgccgtttatcatagccgtcattcttttataaacggattcggcgtccaacgttcccgcaaaaatctgttttaattcctgatttttgataaaattgatttcgacaaaacttttatactctttttttccgaactcgcggacaagataagttttcccgacctgtcttgcccctttcaccatcaagcagttattccgatgcgtatttttccactcgacaagtttctgatatgcttttctttttaacataacgtctctccgaaatcagattttattaccgatattatactccgtttttttgtatttgtcaaccaaaaaggaataaaatcggatattgtttttcagaaaaaaggaataaaatccgatatttgtttctgtgaaaaagaaataaaatcggaatatcgtaaacccgaaatctgtttttcaatctgaaagcattaaaaaacgccgccctccgcaaaagcaaaggacggcgtttttctgtccgctggtaaagttacataaacactcttaccgtcaggtcgtgccattgattttgcctgagcattccgtcccgttctttccggtaagatttcgcctctttataatctatcgtaaactcccacacgagctttttcatatcgtcggatttgtctgcaaggtcaaaattcatataccagttgaaacacgtttccgtaacgggaacaatcgtgccgacgaactgaccgattacgtctctgtcgatacgatggtcggtaaaatccatttttgccagcaaaaaatcttccacttttttcgccggatcttcagaatttccgttcggcaccattcccgcatccagcacacgccgtttactcagtaaatcaagtttttctttctctatctcgcttttgaattcgaaatacgattcccgtgttatttcgtcctccagccgcatacgggtaagttttttcaatttttcgtccagtccggcaagttgttccatcacccgatctttcaccgtttcggcttcgcgatattccataaacacgcctacctgatataacgacgacactttgttcagaatatctttcttgtttccccataaacccgaaaaaatgcgccttgccatcatttcaagtttccagtcgcagatttctttcaggtcgcagaacccggcatcgtccacacccgcctgttgccttgtggtttttgtgccgttattcaactgattatagcacttatatccgtaaatcaactcgccgtttctgttcttccgccacttgttcctgcgcatacgataaccgcaacggcatctgagttttttcgtccagacgtcgtcgcttgtatgaacgcctgtcagatgactcttttccccgttttccgtaagaattttattgcgacggacgcgctgttcccgtatctgacggcatctgtcccactgctcctcgcttataatcggctcgaaatcgccttttacatacagatatgtatcttcgtcgcggtttcttatgattttctggtcgaggaaattgtttctgcgcgatttcagatatgcgggataccccttataggtcgaattatgcaatatccgcgctatcttgcagttttcccagcgcaccagcccggaactgtccttgcgtttcaggcgtatcagttcgttacgtatctgcgacatccccttgcccgcagaatacatatcgtaaatcatacgcaccgtttccgcctgttcgggattgatgacataagttcctttcgctttatcgcggtcatatccgagaatatttccgtttccgaacaatacgcccttgtctcggcttattttctgtcccgcgcggacgcgttcggaaattttacggctctcttcctgcgccaaagtcgccataatcgtaagccgtagttcaccgtctccgtccatcgtccggatattgtcttccacaaaaaacacttccacgccgtagtttttcaactcacgcgtaacgacgagcgtatcaaccgtatttcttgcaaaacggcatacttcacgcgttacgatcaggtcgaatttcttttgtttcgcatcctgcaccatctgcagaaacgcaggtcttttcttcgcctgcgtgcccgtgatgccttcgtcgatatacttttttaaaatgtaccaattcgggtatatcgccgctatgtcgtcataccactgtatctgattttccagcgcggccaattgcgcttcatgttcggatgagtaaacgacagggagaatatgtaaccgttaaaagatttcggctacacgacttcctttcactttatacccgtgcgtgctttccgcaccgataaatttataaataattctgatttcctgtttgtgtgcgcttccgtcggaatacttctcgcctatataaatcctgtcgatgaaattattcagtatttcgggagtaagttcctcgatttccgtataaccgttgacaaccttcagaaactcccgaatattgctctcttcgtcgtttacaacgtctaacgcctttttcaactcaacgatttcgctctttaacgccgcttgttccgcctcgtattttttcgccaacaaatcaaagcgttcgtccgaaattttaccggttacgttatcttcgtacagatttgcgatgatatcgtcaagctggttgcaaggcatttttacgtttactgctgaataatagtgaagcgcggaagtatcgagcaaagcaaactcggcattcccgcctatttcgccaagtatttttatcgaaaaatctttatccgttcttaaagcgttatccgtcctgtcggttgcaagtctgccgccgtcgataaaaattttacaaggtcgtttcgcctgcttggatacgtcgttcgggatatatgcgcccacgatatcggtaagctcggaaagtaacaccgtcggcacgtctaccgcatttttaagcgcgtccacaaacttatacttttctttggcaagcaagcatttcgtcataaatgcggatgaataccacttgttgaaataagcggtttcgtccgacgtttcaaacaaaaatacagcgccgcttttgtttattataacttgcgttccgtcctcttttctgacttgtttttcttctccgacctcgggtatttcaacttcgacaacgcgttcttcggcttttagacctacttttgtcggattcgcttcgatataatctttaagtccgcttacgtctatcgtttttcctaaaaacctttcgatatcttcgtaaagaacggacgaatcgagagaggtataaggaagtgaataactcacgtcgaatttccgcgttacggggctataaaaaatatctttcgtctttactttttcttcgcctgtgggaatcgcgccttcacggaacatttttctgccttttgcggtaagcgaaacgtcttttactctgatttccgaaaagtatttcggattcataaaatgcgacggatcgtagtcgtaagagagtatttcggtaccgataaggtttgaaatttctttcccgaaaatatagtgcaaatctctcggaatgccgaatttaagaagcacgtcgcatattttgtcttccgaacccgcagtcttttcgattacgtcgagcagaatatatgcaacgcccgacgccttccttacctcgttatatcgcacgtttactttatagacaagtagcggaaacggaatagccgtagtgaattttaacaaacttttctcttccattttactctcctaaaatatctttagccgtaagtattcttccgcggaagtttatcgtgtcgataatttctctgtatacggagaagttgattttatcgcgactgtgatcgccttcgagatcgggaaggtcgattatgcccgcttccgataaaaactttttcgagccgacgataatcagaagttactcgattgtttatctccatgttcataagactcctctattgctacactcgtctctccgaatttcagctttacttccttccctctgcttatatccaggtacactttcccgtcttgttcccggtatatataattcccttccttagaaattcggtctatcatttctcggtttctgctcgtttccgtccaagcaaataccccgaatacaaataacagaacattgattatcgtcaggacgattgcaatctttttcccgtttctcccatacttcttgttccgttgttgcttcttttgatttaaatacatgatttgttgttcgctttcgctcaacactttcagaatatccgctacattgtcgggcgggcctgtatagtcgggtaatacaagcaattctttcacccgatattgtttcccgttctttctcagaatatctattgcgatatttttcgtaacagtccgaacccaagcattgggcgtacggattttatacgacttcatttgaaacagctttaaaaagaattgttgggctacgtcctgtccgtctacctctccgcggaactgacgattgatatagcgcacgattattggatagtaatactcatacagctcctttaccgcttcggggctgtatttatatctctccaataacctgttaaaccgtttttcttccattttcttttcccttttttctttttactacgtctaataagtaaatattttatttctaaaaatatttcgtgagcccaacacgccttacgaacaatcgccctaaaaataaagctatcattaaattgatagcgtgacgagctctacgaacatcttacctgcaaatttattataacatatttttattcgaaaagacagtttttcgaacatcgttttttgtaaaaatataggagatttttaggaattatgtcgaaactacttgaatcatctcaaacacgaatttctatggactttcagcataggcttatagaacttatttccgaccaagaatgtagtaattcggattttgcaaaattagtaggcgttagtaaagatgttatttctcgagctgttttatatggtatcatccccagcgttcggtcactgattaaaattgcggactttctaaatatttcattagaatttttacttgcagaaacagataatccctatttctataaagcagaacaaccgacaacttttcatattagacttgaacagttaaaagacgaaaataacacaaaatattctaaaatcgcacatcaaatgccgtttgcaaggaacttgtttcaagaatggttacggcgcaaaacattaccttctttggagaatttattgtctctttctgaatacttcaacgtttcaatcgattatctgcttggacgcacaaacgaccgacataactaaaaactatttggagataaacatggaaaaagaaaaaatagtagaaaactctgctccccgtatttcctctaaatttcaaactcggttattagaaatcattgacgacaaaaattataaacgaaccgaattagcctcccttattgggattagtaaagatacaatttcaaaagcgactttatatggtatcattccaaaagtaaaatctcttatcaaaatcgcaaacttcttaaatgtctcatttaattatttattggctgaaacagatgacgaatatttttatccttctgaaaatccaacgacatttcatattcgattaaaggaattaacggtagaaaaacaaacaaaattctcacaaattgcccataaaatgccattttccagaaatttatttcaagaatggttaagacgtggtaccttaccttctgtagataatttattatctctttcaaaatactttcaggtttcccccgattatcttcttggacgtactgacgataggtaaaaatggctatttctgaacaatttcagcaacgacttaaacattttattataattgacgattatagcgatatgactcgtagcaattcagttaaaatcatgtacgtctattatctcacctcttctaaagcgcttaattacggtattattcctaaatctttttctttaactcgatgatgaatatttctccaaaacaaaaaattcaatcaccttttttcgcactttgaagaattacgaggagatacttcctattatcagatagcccaatcctgtaatttcgataaaagtatgtgtactaaatggaaaaacatatcccttctcttgagagcttaagtctcctcgctcaatattttaatgtatctattacctatctactcggcagaactgataataagaactaattttaacctatattatatccctgttatgtagaaatcttttttctaaacattattaaaaagtatctatttggtaataatttataaaaggaactcaatatctatatgattaaaaaatttagttgtcataattttagaaatataaatgccaccgatttagaatttgaaagaatcaacgtattaattggtcccaataattctggaaaaagtaatttcatgaaagcgttaactttcttttccgatatgttaaaacagtcggataatggaaacttaaaatcggcttttctaaatgcaatctcccgtaacggttgggaacatatgctcaacaaaaaatccgataaaaaaactgctattgatttttcttgggtccttgatttaaaaaaagtccctgtcaaatataatttacgttttgaagtaggaaataccattgaggattgtaatatagttttggaagaattaaattctgccgataaatctacgttacactatgataaagtatttaattactttaggtgtcacgattcccaaataggtaaaggtttattttccaccgcaattcaaaagggacaaacaaacagacgtttatcctttaatcttgatcccaaagaaacattaattatgcagtttaaagatattttactggaaaatcgcaacctttacggaaatgaacttatccgtgtcaatatagcacaattattatacgatatacaaaagtactttgcgggatttaatgtgtatagtagcgctcaattctatacaaaaaaattacgcgagcccgtcgatattaaaaatattgacgagatattatccccggacgccacaaatttttctaatatctttaacaattataaatccaaagattttctttggaaaaatcgatttgaagcacgaatcaaagaacttattccagaattacaagctgcggataccgtcactttctatgataaacttatttttagattagcttactatgacgaacaatatgacttatcagatatttcggagggaaccatcaaaggcttaatcttaaatctgttaatcaatatgcccttgtcggaaaattgtcctttattggcaattgatgaaccggaatccaacttacaccccgcatggcaaaaagtaatcggaaattggatacaaacttccgatacttttgaccaatgttttattagtacacactctcctgactttttagatgcatttacagaaggcttcaaatacaaaaatgttgctgttttcgtttttgatagcggggcaaaagattctataaagaaaataacttataacgatattgcagatgaattaggtaattgggaattaggagatttatatagaacaaatgaccctgccttaggaggttggccgtggtagaaagaattgcttgttttcttacttgtggttacacagaggccggagccatgcagtcatttttgcataaaattaatgaccgttatgaatttaggcaatatcttcctaataaaacaataaagaaaaaaggtatgccgaaaaatatttctgacgcaataaatggactaaccggagaccgtttattagaggaaatatataaaatactcggaaaacacaaagctgaaataaataattgcaaggcaattattgttgaagatgatttagatggaagattttttaattggactgaagataaaataactcaatatacaactaatgttatctctaaaatacaaaccttattagggaataagttacctgtatttgttatatatgcttcacctgagattgagagttggtttatttctgactggaaaaatagtttcgagtatgtgtattccagcaacgattttatacacgatatagaaagaaacgctcgtttattttatacacatcatcttaaaacctatatttttcaaaatatcttgaagcaatatgcctcagatatagaaaattatggttattttgaaggaatctattacaaattgagcgaccagataaaagatgctatacagttcaatgtaaaagattacataattgaattgcctgtcggaaatgacaattataaaaatcaaattagtaattccaaaaatttatactattcaaaaagaatacatggtgataaaatgttaagaaacatttcccctgtaattgtagcaaataattgtaaaaaatattttaatcctctttattatttacttcataaattttaattctaaatagaaatttcgttttttaattaaagtatttattgtccgaaaaacaataggtattaaccatgaaaagccgcccgctcgaataattcgagcgggcggcttttcattaaattttattctatgggaaaggtttttatatttttcacgtcatgatattatatccccgtttctccctctattatttcttctcctaacacaatataattgcccaaagaaaatatcgaagcttctagattttcataactttatacatggttgttacaatcttctattataaatatactatactttttcaaataggttaaatgtgtattacacaattacaaacttttcctttagaaataatcggtaatatttctccatcattttttactccatttacaatcattttctgtaagccagagcgtctgatttctatcaaatatattgcacctctaaattttcttttaatctttacgttgtcccaacaggaaggcacattcggtcgtatacgcaatccgttataatcggcttgtataccgagcatatactctgtaaatgcacgatacatccaaccagcggtcccggtaatccaacacatcggagcaaaaccttttttatatggactatccggacctatgtacatatttgaaaaagcatatggctctacaccgttatcaggattttcaggattatcgtatcgaattttcaaatacgttttataagccatatccgcacgatttagtaagcaatcagccaccaacttaaacgcaacaccatgattataaacagaaccgttttcaatcagccccggaataaagtaggttgaacgtcccaattcttcaatccccttagtatatggaggcgtattttgtacatacccaaatttacattgtaaacgcttttccaccgtatccatcaattcatttccgagctcagccgttctgattcccgccaatatggcccaagtttgaggattgagatatatcttcccctcagcattttcgtctgcccctactttttcgccgctatccgcatagccataaatatagtgatctccgtcccaaccgtacttttctatagcggcttttaattctctgttctttttttcgtattctccaatgagcaattcttcttttccgatctcgccgagcagttctaaaaattcattcacggctttcacggtagcaattgaaagccatacgctttctcctttccctttcattccggcattattcatgctatcattccaatctcctccaccccacaaaacgagattatgtacaccgcgatttgtcaaaagaaaatccaaaccgcgtttaacatgacaaaatacattttcggaaagttcgctatcgagataaggaacggaaatccacaaaatctcaaaatcgcccgtttctttaatatattgcgttaccgtctccggaatccaaacaggcatatcgtaatatggatatttaaaatctggctcatacatgcggattgcatttcccgactcgtactgatgagaaagcgcgtgtaaaatttgtttttttgcaagagctggatccaaggaaacaaatgcgctaatatcttgcattacgtctcgaaaccccttgccataaacgcgcccccacgtttttcccaaagaaagctgacgttttgtccaaatattcgttagaatgtcaaaatatttatcaggcgtttcgcaaacaaacactttgttatactcgtcattacgatgtttcacggtttcgatttctaaatcgaaacgcttgtttttcaaatatttgtctgctacgtttttcgcttctgttttattacgttcgattccgcagataaaaataaactcttttgtttctcctgcggccaaatccaaatcaaattgcattgccgcacaataaaatccctcgaataccgtaccttccgaagataattgttcccgcatcaaaccgacagggtccttttcgtctccgtacgttccaaaaaagccctcatcgtttacgctaaagccttttaacggaaaattacattttgcaaacatcaaattataatcgtcaattttcttaaaatgatcatgctcgtatatgattcccccgaaatcatcgtcgaagtatccctttccatatgcccaatgttcggtaatgttcgcttcgatatcgcagtagtaatatccgtccagacgtctcgaacgaccgcttttattgaacagtcgaactcttaccaactcaacataatcattttccggtacggtaatcgtcatttccgtaagcaatccgtcatattcgcttataattgtttgataaccgagtcctacatgacactcgtaaacttcaaacggagtatcataaaaattacgattcggactgaaaaatttgcccgtttctaaatctttcaagtaaaaatatctcttagactttacaaacgtacgacgattggtgtcaatgcaggcaagtgcactgcctcgaccaagctgatcggtaaaacttacaactttttcactccataaataatttttcaaaggacgaataggtctcatatcggtaatgatatattcgttcccttcaaaatatcccatctttgtttttaagcatttttccgttgcaatcataataatataaatttccctccattccttctaaatttttcccgacgtaaacccatgcgacagtttttatcgatattacattttctgtaatccgtccaaaaaagacgtatcatttatccgtatccatacgtatctcgaaagtccgctgtccgcctgacgtgcgaatttccgagcaatctcaaagcggatttcttccgctcttccatgaaaacctccgccgttaatcatgtccggattataaattgaataacttttgccgtccgcatgaatctttgataaattggtcataaaaccgttatacgactttaataaatgctgcttatctcccgtcaacgcaaaatataaataatccgcttccgcgcgccagatagtccaagcatgtccggcgcaaattgcaggaccgtccgcatctccttcccactgcgtttcccaccacctaagcgaagagccatgcatctggcagataggtgttttaataacccagctttcgtgtatatcaagtatttcttttgccttttcaatatatttctgaacttttttaacatttttacagtaatacaaaagagccaacgccgtacaagaaatcgaaccgtcttccatttctgcctcagcttcaacggcaacgccgccttccgtaggaaaactcaaaccacgacagaataaatattccgccatttttgaagccgcttcaaaatatttttccgaacggattggatctttatccgccaaaaagttcgccatatcgacaagcggaatcatcggacaacaaaccgtcgtataatcttcccatacgccgttgttgcaccgctccaatcgcccatcttccttttgataattttctaaaaggctgtccgttgttttaatggcataatcaaaatatttttcatctccaaagtaacggtaagcgtctaacagtaatgtaataccgaaaaactcttcctgaattctattattgccatatatgttataagcaggaaattctttttgcggaaaagcaaaaatcgtaattccttcctttgcttttgtttcatcggtttcagttaccacatcaagaagttgtttgattttattctcatactctgtcacctcagccccgctcaaacaatttttaaaacggcttaaaaaccgtaacattgcaggagcccaacactgatgctcacaaaggttcccgtccgttacttcgacgtccttcatatcgaccgcattcatcgacattttatacagttcaataatatttttatatccgtaaaccgtactttccgcaccacgtttgcctttatatacaggtatgagcttcgtttcacctgccagcttaattttatagcgatcagaacagggcaacattgtttctgtattccccgtaatttctaaaaacccatcaacttttccgtaaaatttcaattcgatttcggagcctatacaaccaccgcccctgtcataatccataaaaggcactccgtaaaaagccgctaatttttgcaggcaatcgtcaaaatcgctgacaggtataatggcaaaagtcagaagatgttttcttctttgtgttttatacaccttgtcaaaattggaaagcagcttcaggttgataaaataatgtccgccaagatacggagaataatccattttccaaccatccgcgcccccttttatcgctactactatattattgccgttcggtttagtcaaatatgcataaataatctgaccgtcttgtgaagcatagggcgaattgaaaaggaactgtctccgccatcctcccccgtccttttttcccataaaattgaagggaagattaaccccgaattccgataaaatcggatttttagattccaattcaaataagagcccgatttcctcctctgtaacgctcaaagtcgtatcgatatcttcacaccgtaatgtcccgtagctttccgaaaactctccttttctgtcaataaagggcgtagacgaaggtttttccccttttgtaatgtcgtctgatatcaatgtgtagcaaacacttatattgccgccattcaatattttatcttcgggacaacgcgtgtcgataattgtttttgtctttccatcaaatttcaatttcatatataccactccttatatcggtaatttttacttttgcacaaattccatcacgtcctttctccgccgtttcagccagcttccctttgtaaaatccggaacggtttgaggcatacctcccattaaaatagaacgttccgacaaagctgtaatgcacatccatgaagcagcatcataaacgtctatcggcatgtcatctccatttaaagccgccttgaaaaaagctttaaacatgatataatccattccgccatgccctaacgctttttcttcttcggtaatatttttccaaatatccggaatatattccccataattttcggcattgttgaggtatttttcgatagccttgtgcggttcccaaaattcatgcgaatccattttttcatctaaaaaaatcatattcgcttcctgagcacacattcctttcgttcctcttacggtgaattctctcgaataatatttgggaagagttgtatccaatttcaatgaaatcgtttccccgtttgcacaggtaataatcgtatttacaatatctccctgggagaatctactatattttaaggacggatcgggatttttatcgctttttgcaaactcttccaagcccgccgcttttgacgcaacggaaaccaaagtctgcattttattacctcgatttatgtccagtatttttgctatcggccctaactcatgggtgggatagttttcacagtttctttttctataattatccaaccgataatgcctgtttacatacccgcccaagatttcatctctcaaatcgtggctatacgccccgtgacaatgtacaatttctccgagtttccctgctcgaaccaatgcagtagaaagtaattcaaatctgtcaaagcaacaattttccatcatcatgataggtgttttaaactcttcgtaagtcctgacaagttcccaacactcttccgtatcgtatgcgccgcccacttccattgccgtgatttttccggcgcgcatgctatcgattgccatacggatatgttcgttccaggaagaagccaccaaaaccgcctcgacagatgtgtccgtcaataattttttataatctgtataacaagcagggactttttgctgtttttcaagtatctgcgcttttgcccgctctactctgtcagagtaaatatcgcaaacagccgttacctccgcttctttacaggcaagaatcgtatccaataacgcacggccgcggcagccgagacctataacacccatacgtaattttttcatttctatttttcctttactatatgtactttatattttttgttataaatacccccaaacgaacaaatcttttgggggtatttataacataataggatataatcagatataatcttatgctttttctactttcgtttcaacgaagagattatcgaaattcgcccaagcctcttccgttcctgtacgggtaaaccctatgataaatttacgcacgtcgttcaaagaaacggcttcgttttcaaatgcgtctttggcgacgctgcaatcgatagtaatccgataccacccgtccgctccgtcaacctccgcgaccgaaatccctgcaggcaatccttccggattcgtaacggaaaatcttacttctttgcttttgtcgctatccgttttgtcgaaggacaaaatgatctctccggtagatgctccgccgaattttacgtcgaaagtcatcaccgcattagtaagatcgcagtttttccaatcgtttgcagaattcagatgaaccatcgcgttagtcccggaatattcgccttcgatagttattttttgcgaataaccgctgtccgtgctatgcacctccgtatccttcttccaggcgccgttcggctcgttatactgcaaatttgtatagtctttatcttcatttaccacaggttcttcgggcttgacgtcgggattctccgcttcggctttttcttttataaacaagttgtcaaaattaacccatgcttcttttgttttatccatacggataaaagtcaatttcaaattacgtacatcggcaaacgaaaaatcgtcgtcttcaaattcagccttaattacttcgcagtcaatcgtaatccgataccaatcttcagccacttccgtaaaattaatcccggccggcgtctgcacggggaaagttatttctttgcttacggcttcgtcagaggtatcaaaggaaattatcacgccttcttccgcctcaccgccaaactttacatcgaaagaaacaatcgatttttgcaaatccaaagaaccagaagcggaagctccaacgttaaagattgccgtacgggagagttcattctcctcaatggaaattttttgcgaataatcactctttacgctatgaacaagcgtatctttcgtaaaagcaccgctcggtccattcgtagataaattcgtcaaatctttttcttcggctttcgcgaacatatcgacaaacagattatctaaattagcccatgcttcttccgttcccgtgcgaagaatcgttataaaaaatttacgtacttccgttaaagaaacctcttcgttatcaaatgcatctttggcgatactgcaatcgatagtaattcgataccacccgtccgctccgtcaacctccgcgaccgaaatccctgcaggcaatccttccggattcgtaacggaaaatcttacttctttgcttttgtcgctatctgttttgtcgaaggacaaaatgatctctccagtagacgctcctccgaattttatgtcgaaagtcatcaccgcatcggtaagatcgcagtttttccagtcgtttgccgaattcaaatgaacttttgcgtcgatgctgggataatcgccttcgatagttattttttgcgaatagttactgcccgtactatgcacttccgtatctttcttccaaacaccgctcggctcgttatactgcaaatttgtataatcgtacgcttcgctttcctccggtttcgtagtatctaaccccgggaattgatctttcgtttcgtcattataagcaacgatatcgtaattatcaatatacgcggtaaagctgtacattttcgttccgtcttccggcgcatcggctgactgcactttcatataattaacgtcataatcgtcttcctgctttccgccgggcgcaaaatatccgtcctcgtcaaagaaaaagtttgccgtaatgccaagcgcgcgataagagaaatagatatgcgtccactgtttcggcgcagcctcttgaatcaattcttccttccagtctaaatcaagtcccgttgctgcataattgatacgagggcaaaatagaagagccgattctccgggattatatacccagaaggataccacggcattttcccatgccttttcgggatcttcctcttttgtaatcgaccaatgctcatccagcaaagtaccgtcgatcgaattgaagtttactcctttaggatgcgtattcgtccccgcataaaaaagctttacggaagaattagatccctcgcgcaaatatgccttatcatgatttagcgtcttctgcaattcgggatcgcaccaggtagccaaaattgcttcatctacggcatccgaacgatattccaccgtgacttcgacagacgccgtgctttgcattccgccttttgctgctactatttcggccgtaaattccgccactgtatccagcttaaaagacaatccattaaacggcacatcgaggaaatcgtttccgcttaaatatactccggacgccgtatatgaaacagagtcatcgtaatcggtgattaaatcttttagatcatacgtatcaccgacgtaaacgtaaatctccgtttccgaaagagtgagcgaaggtgccttatccgaatctttgccgcaactcgtaccgactacccccatcatgcaaatacaccctaatccaagggccgctttttgaaatacagttttcataaatttatcctccttaaccttttaatccgcccgccaccgtattttgcataatcactttttggaaacagcaataaataacgataatgggaatcattgacaataatatagcagaaaaatacaacggagcgccttttaccgaactattggatacctgcgcttccgtttcaatcagataaagccctaccgaaagcgtcggataggaaggcagatacaaataaggcgtcatataatcattccatgtaccgataaagttaatgatagcaatggaaacaattgcaggcaacgcctgcggcaacataatgcgtaaaagaacctgaagatgatttgccccgtcaataaacgccgcctcggcatagccccaggaaaccgattgaaaatagctgtacagcgttataaaagcaaagccgaagccgccgccccacataagccaaatcaaagcgggattatctaccatacccaaatcggcagccaatttatatgtcgcaggcatattaccaactaacggaatgacctgaataaaaatggcgattgaataaaatattttcgaaccgcgaaatctatatttagaacaggcataagcggtacaaatacttgaaataattcccactcccgtcgctatgatcgtgacccacaagctattgccgatcatccctaccagcgaagttttgcgaacctgtaactcaaaaacatgtatataattttgccatccccaatttttgggaagagaaaattgattatcataaaattcgcttaacgtttttcctgaattaataagcgcccatacgaacggatagattaacgacgcggcataaaacaaaaatatcaccgacgaaacagtcaaaagtatacgttcctgcaaagaccactgtctccatcgggccacaagccctttaaaaggaaatttacgagtttttttcataatatccctcctttaatattctacggcgtcgcttactttatccagaagccttttaacgatcaatacaagcggggtacctatcagcgtaaaaattaagcctaccgcagcaggataattgagattatccgtcccgtttgccgccgccatagtgtatcgcgtaatataccaccctatcgtcgaagtgccgtattcgccctccgtcatcaacattaccggcatatacatgttaaacattcctgccatacctaaaataaataccgtcgaaatcgtaggccataccaaaggacacacaatgcgaacaaattctgtccccataccgcacccatcaatttttgccgcttcaaaaatttccgaaggaacgcgcgccaacgcgcccgatatcaggacaagattaattcctataccggaccaaagcatttcaaccataattgttgcatacgccgtcttttcagacccgaaaagcccgttgttggccacctcctcggagagaggaatgtgaagcttctccaaaagcgctattacgggaccaggaccgttaggcgtcactcctaccaaatagcggaacaacatacatataactaccgtactgataatggaaggcaaaaaaaagataatcctgtacaccgaatgtccgtaacactttttgaaaagaagatacgaaaacaatacgataataggaagattgattccgttacaaaccacaaaataaatcaaagtattgacaatactttccttcaaatgcggttgggtcgtaaactctctccaaaaacgttcaaaatttgcaaacgtcaacgctccgtcggaaggcgactgaaagccgagtagtattgaatcgaaattgacatatacccaaaatacagcaaactgtataacaggaaaagccatcagacaacagacaaataaaatgctttttctttccctattccaaaaagccttgttttttcttgtctttaattctgtttgttccataatattatatccttacgaaattccggcaacatttaagaggaaagtccaattatcgcccgaaacagattttaaattattttcatatatattatccgcagcatatgtcccagccgacaagcctttcactaaagttacccaagagttaatgtaaggaatagacgtaatacccgccgccgcacgaatctcggaaagctgatttgcttcgcaaatttgcgtcgaattttcgctatgcgtcaaaacatcaagcgattcttgataagcgtttatttcttctccttcgggttcggtataatcgtacggaagattgccatgcgccttttcacggtaaattccctgaaaatcgttgctcgctataaaacgcaggaacagttttgctgcttctttcgaatctgaatggtaaggaatatagctgacatgctgataccctaaatcgtaatatataccgcgagcagcacggatttcctcaacctgagctccgtcaagcgtcacggaataagcggaacggacagcggaaataatctcttcgtcagttttattctcatcgacaccttttattacctcactcaaaattttgtcgcaggtatccggattgctgtgtaatttcaacttctctcccaattgagacatgaccggcactcgcataatacgaatatcgggaagatatttctcataagaaggatcgttacacatttcattatacatccagtcccccgaagtacaaaaagccgcctttcctttcagcagaaggtcctgcgcgcccaaattatcgactgtggtaagcgttcccggcgcagcataaccgctatcacagaaagtttcaagattttcaaaagcgtaaagccagcctttattatcataaaccttccagccttctttaatggtatctccgctctcgggctttaaacgataaaaatcataataatcatcctctccagcatactgagcaaaccacgtttccgtcacatactgccaatatcccgccgcattgtttcctccccaggcaacaggataaacattatcagccttgccctctgagagaattttgtcaaaagccacttttaattcgtttgttgtacgaggtacttccccgccgagatatgaatcgacaacttttttattatatacaaagccggaagacgcactcgtccattgatataaaaagcgcgttcccttccatttatcgacttttccgttgtacgcaagaaaataatctgcggaatctgatattttactttcaatagattctgtctctacttgtttattgaaacctatcgcaccggattcataaacatcggacagatcttccaaaagagtataatccgacgtacgaagaatctgcgccgaagcatctacaagttccaatatcgcggcacttcccgacgcaaaatataaatcgatattattctttttgtaatctttcgtttgcgagacgacttcctccgtcgtaatcgttcccgcactttcctcaatttttgcagaataaccttcatctgcatacattttgttaaattcatcgacagcagcgtttaaccattcgtctccaaagcccgctttccaagcgcgaatttgcacgacggattcaccgcccggccgaactcctttttgacatccgacagcggacaatgcaaatgccgccgtcagtaatgcagccccaacaatttttaatttcatgtttcacctcaactatttaatttatctaaaatcgccattgcggcaacttcatcgttatacaaattttccagtaaatctaaaagctcaccgcggacggagctgaatacaaaaacgtccgtataagatattacccccttatatatacgggaataaaatttcgataaaattttatctgtattataatttttattatgtttttcgtttatttcttctatttttcgctcagtcatccaaagatattcatagtcttcatttccttcgcggatagactccaagcgcaacgtggaaatcggcgtttccagtccgtaatacgagcctggatataccagctgtccgtctccgttacagccttcccacgaaaggggatctacccatacgtttctgtccgtcgtcgttttgtcaaaattatatttacgataatagcaaatattccaaaacagcgttgcgctcaccccgagatcatattgcatccagcgcatcgtgcgggaagaaatcaaattatcgtcgatatgataactcggatacggattttggggattaatacaagtgtaccaccaaaagtcctctccgctttccctttcggttgaatttcgtctctcctcaatcagctctttcatccccgattggttaaaatgatcgactgtgggacaccacgtctgaacacctcccactgtatccgaaccgatataggtttcatcatattttgtcgttacaatatgaggaatatgaataaagctgtcgtacaaatcgggataatctttcagtcggtctttaagtgcctgtttcgctttggtaatttgtaaatcgcaatcacgaacctttcctgccgtatccgcagtaggttcgtctattaacgaatcgagataataatacgcttttttgaataaatcgatactttcatttcccgcttcacgcaattggatatttttatcgatcatggcgcctaaaagttgaacggcataatcataatcaaatgtactcccgcctattacgtcgggattgcttgtttttactgatctataaggaagccaatagcccgtcaccatgttattttccgcgtacggcacaactgcttcggcaaaagagacgggatctgacggataatacggaatcctcattcccgtaacacgtttattggtaataaaccaataatatatttcctgaatattagaggacatctcctcactcatattcgtctcgccgaacggaatattgtcgtaccaaatcgcaaatgcgctgcgagcatgtacttcctcgggaattgtcaaatctcttacggtaacggttacgggaacatcgactttttcatcgtcaagcgtaagtttcgccgttcccgtatatgtgccggcctccgcatccctcggaatattcagattcacccaaatcccctgatgttcccccgccgtcactttattatcacggcgggctttatatctgtccataggaaccaatgcgtccggataccacccggcatacatgttagcggtagtcggattacttgtcgtaggggtagtcacttcaatgtaacgttccgccaacacttcaaattgttttgctgataatgtcgcgccggattctgtttttacatcgtttacagccaagtcgaaagacgcaatattttccgaagcagtaaacattaattgggcgccttccgtttctcctcgtatcgcatcaaaacgcaattccgccggagtttcgcttaaaagcccgccctcagattggtcctgttcggcaataggcaaatctttcataatcttaaccgaattaggagcgctccatacagtagcattcgatacagtaatacgcccgccctcatcaacaggcgaatcggttccacaacccgccgaaaaagctattgtgaaaccagccaaaaggatacttattatccttttcatattttgtcctccttacagccatatttagcaaacttagtttatcgtatctgtattatatcataccttttttcatttgtcaatacccaaaattaaaaaaatcaaaatttttttgcctctatttaatcggcttattaaatcattttttacatatcaatataataaaaagatgagaccatataaaaatgttcccatctttttacttatcatcttcattttaattagaaatccgtgaaattatactatcacaaagcaattttttcatgcccgtaaaacaattatccgtgtattcagaaattactatttctctcttaaatccttttggataacggttaaagtattcttttatcctattcaaatatatttccccaaaagcacggacacctcccataatcactacccgatcacaacctaaaacatttgtaatcgcgtcaagttgtttagctaaaacctctgctgaatttagtacacattcctttacatattcattttttgaaaaagcctcaatcagcccttttgccgtcggttcctctaaatacggcaacgttttctctattaaagagccgaaagcacaatgcatatgcaaattatctccatcttcagtaatattattaccgatttcccctgcgattccatgagttcctaagacaaatttactgttattgacgataacgctggataatcctgccccgatattaacatagtaaatcgtagtattattgctgaaatctccgtgttcaagctctcccataacctcaaattgcgtatcgttatgtacatagacaggagcttcaaatttttctataaacattttagagatattatgtattccggaacgatcaaatctggaagaataaataaaatcacccgttttattatcaatttgccccggaacagccacaactaccccgcgaacagggagaggatattcgtttacaacgattacttgtaaaatacgagaactcgcccgttcaacttcttcccgactgataaccgtcgacaaaaccaatttttcccgatatattttattaaaagaaaaatcggttacaacaaaccagttttcatcatgagaaaaattaataaaaacgaaacacccatatttatcgttaattttatatcgtatatgttgcccgccgcgcgaacgtaaaatctcttctttatcagaatgcactacccaatcattttctataagctgatttatatttttcttcactgccgtttcactaataccgattctttgtgcaatttcgttacaagataattcgtttttaaaaagcaatccggcaattactttcatattatgtttacgtatattttcagttctatatccttggatcatatttaataagccccattttcttttatattataaccaaatttttcccacttgtcaacaatcgtttcgataaaaaacgatttatttttttattgaaaaacatcaaacaaatgattttaacctcccctttaaactgttgacaacaagcaaaaaaaatattataatctattcaacaaataaagtttatcgaattttatataaggatttcactatgaataaggtcacaattctcaacgataatatctcacaagaggctatcgaggaattctttgtattcattcctcattgtaaacaatatgttatccgtgccgaaaaaggaaattctttttctgtatgcaccaaaaacaaaaacgcacaaatcatctatacctctacctcggaattttttcgcgcactctccctcctgcctttagacggcggcgatatctgtatccgggaacgtaaaaatataaaacgcgcttcgttaatgcttgattgctcgcgcggcggcgtgattaacgacagcaattttcgacatctcgtcaaattgcttgtctcactggggtataattctttacaattatacaccgaggatacttatgaagtaaagggtgaaccttattttggacatctgcgcggacgaatcagtatagctgattggaaaaaaatggataactatgcggcttctttcggaatagaattgattccctgcatccaagttttggcccacctggataatttatttatttgggacgaatatgaacaaatcagagataccgaaaacattcttctaatcgatgatgaacgtacatataaattaattgataatatgtttgcctctattgcagaagcatttcgttcccgttgtattaatctcggctatgacgaggcgcattttgtaggcttagggaaatattatgaaaaacatggggcggttaatcgagtagaactaatcttgcgccacctgaaacgtgtactcgatatcgcttcgtcatacggttttcaatgtactatttggtcggatatgtttttcaggctcgcttacaatgattattatccttcccctgacgctccattactcggcgaagatataaaaagtttaattccggaaaatattaccctcgcatattgggactattatcatacagatgaagccatatatgatgatatgtatcgtcgacatttagatttgaatcgaccgatttctttctgtgcgggggcatggcgttggttgggcttcgccccaatgaataaatatggactcaaacgtcttattcccggcatacattccactttaaaccataagattgaagacgttatgcttacagtttggggcgacgatggaaacgaatgcagcatatattcagctcttcctcaaatcgttgcattcggtgaactttgcaggaattccgaagctactgaatcagatttcgatcgccggttaacaattctctgtggagtttcgttctccgattttatgctgttggatttgcccaatatttatagaaacgaacaagtcgatacactttcaaatcccgcaaaatatcttttctataacgatcctatgtatggattatgcgactatcacacttccgaaaaatattgccaatggtttcgggattgcgccgaaaaattaaatacgtctgctgccttattaagtaattatggatatatcttcaaaacagaaatttctttgtgtcaatatcttgccttaaaggctaatatgggaaacgaattgcgttccctttataagtcaaacgataggaaggcacttgcagaatatgcaaataatcatatttcccaggcgcttgaagccttcgatcgttttgaatcaaattatcgcgagcaatggcgaaaagaatggaaaagcttcggattagacaacctacaattacgtttcggcggccaaagattacgtttagttgaaactcagcgtcgaatcctcgaatatgctaccgggaaagttccttctctggaagaattagaagagcccatattaccttatcgttatccaggcgaaaaagaattactctataaacacaactatcattatcttgcaaccccatctttcagagtcaaaatttaacaatactttctgaaaacactattgaatttcagactctataagtctaaatttaatagtgttttctttttgtatttcttacgatgctctattcaaacagctcagataatattttgtcatatttataaaaaattattccattggactgtcttctcgtagaaccgacgacagagactaataaacccgcccgcttgaatcacttgaacggccagattttattaaattttattcgacgggaaaaactttgatcttttttcacgtctgatttatgcgcctaccttctctgtatcaacgtaaatatagaactttttcgtcatgatattgtatcccagtttccccctctatttatttctcctattattttagcatatcataacgttcttctttttatcaatgaaattaaggaacaactatcatcttttatatacaaaacaagcccgttaagcgatagaaaaagaaataggtcaattccgtctctaatctccataccatttttttatacatacgttaccgcagcttgtgctttcactcttaattcgacagttcaaaacctgttttttctaaaaaatacaaattcgcagtcataaaattctatcgtttatccattttctaaaaatatttgtttttgccccttaaacagcaaaaaaccatgaaaaacacactgtttttcatggttttttatcttgcagccttttcgtctgcaatcatggctgactgccttgggatattttcgaactttccaattcttcaagagaaacggcctcttctttttcctttccgttatagatgattttcagatgatcgtcgtagagaaagacgctgttcacaaacgtgtcgatcagtttccggcggccttccaacttcccgatgtctatctttcggaaattgcatagcgccattttgaactcgtccttcgtaaaaacgggcgtttttttcttctcttcctctatcgtttccgcaagcgtctttttccgttgttctatctccgtcaaccgcgcaatcaacgtatccgatgccgctcccttctgaattgccgttacaatgttttcgatctctcgctctttctcttttaattgttcttccagatgcggtaaaatcgtgctttcctcatattgcagggtgtagagtaactgcgcaagacgttctatcgtttcgtcctcttgtaatagttcctttgtcttatagaccacaaagttttcaatcttttctttttctaccttctccttctcacagaggtgtttgcgcgctcgattgcagatataatagcgatatgtcttccctgttcggctcgttcccgaatatgccgtcatcattgccccgcaatttccgcaaaaaaggtgtgtggttagcaaataatcatcgttttcgctatgtgcggcaggggcgatagagtgcttctttatattgtcctgtaccttttcaaagagttcttcggtaattatcgcgggtattccgtgttcaagcacgattcccgaatgtttgtattctccgatatatatacggttagacagtaaatataaaacgctgttataagcgatttccttgccgttcggacggcgtatttgtttctcttccaggtattgataaatttcctttgccgtatatccgtccccacacatttgaaacaacgtataaacgagcggtgccgttgtttcgtctatttccagcttatgatctactactttatagccaagcggaaccgctccgccgttccaccttcctttgagggcgttctccttaaagcctctcttgacgttttgagccagattcgcagagtaatattccgccatcgcctcgatcatcgcttccaaaataattccttcgggaccgtttgaaatattctcttttaccgacacaacctgaacgccgttttttcggaggttgtaacgatagaacgcgctgtcataccgattccgcgcaaaacgatccagcttccacacaagcacaatgtcaaacaaccttttgctgctgtcattcaccattcgcaaaaaatcggggcgatcgtccgttttggccgaaaaagcacgatctatgtattgtccgacgatttctatatcgttgtattctgcgtattccatgcactcgcgtatctgaccttcaatgctttcctctctttggttatccgaactataccgggcatatattgccgctttcatttcgtttgctcctttattctttatcttttactctcctgcaataattccaataacgcttttttcagttttgcattagcaggagatttcgggtcaaaacacatttcgattacctcttctatctctttttcgtttttcataaatttcggctgataggtatagagctttccctgtggattattcgtacgtccgaatatataatccagcgatacatcgaaaaagtccgcatattgcattaaaatatgatatggcggaaagttcaacccgttttcataacggaatatagagggctggtctacttctccaaacttttcggctaatttcgcctgcgacaaatgtattccctcacgcaatatttttaatctttctcctactatttttttgtccatactttatccacctttaattattctatttatattatataataaattcgcatgtttgtcaatattaaccagacatcttattaagataaattagtttaaatttttctataaaccaaaatagcctgaacactcttttcataataaagaagttcaagctattttggtgagcataatcggatgaaattacctttctccattcacgttctatcccttttcccgtaaggatttcagaccatagtacatatttagtctaaaattaatttttcaaaaaataataatctaaatttatatacgcatcaatttatccaccgaaagagtctctttgttgttcccttaattagaataagcaaataattttacttcaattaaaattctatttcctgaatattatttcttgatatactacaatgggtatcaatctacataaatattttttatgcctatattaatccccggtgtatatttaccatctccgccatatcccatctgcggatccgtatcatcttctttttttattacatataacgaccaaatccctacattatctggattataatcatcaactgtaatatctaaaaatagaaaacggtattctcgtacattcgttacaacatcgcaagataaatccatactcttttttctatcgccattttctatttcatccgaaacgccaggaccgccccaatcatcgtacgataaaacttcgccttgataataatcaaatagacgcataacttggctctcaaaatttttcgcttgagttattgcagtttttgaaaacattccctgcaatgtatttctatctttatcttgtattgcttctaataggctttccattcgttcgtttgctatttttcgatctctatccataacattgcctcccattgaacacgcactaaaaaaaattaacgcagaaaatattattgactcacatattcttttcataaagtcatccctattttataaatgaataagtacaaattaatgatttattggtaggtttccagcctctctttctattagaattcataaaactattgtacattcccatactattaaacttaaccgtataggtagctgttaaatccgaggcctttttatttaaatattttggattaaatccagttatccaccaagttctttcgctccaatctattatttcttttcctccatacttcaattttaatgtcatatccatcgccaattttttatctacgagccaatgcggatttcctccatagtaaattcctaattcagctcccgcacctaaattaatataatcgcctttccatgcccataacatatatgatttagctgcatacgagaatggaaattttttgcttttcatacttgtagcgaggtcaaacataaaatcatagaaatcgttatatccaaaatattgctgccaaccattaaaattagcatgatagatgccatctactttcttcatatccaagaaaacagctcctatcgccgcggtatttattcctatttttacagcaattgtattcaccacatgcaatactgtactaacaactttctttaccgttttccaaagttttttccaaaaatatccacatacttcgcagcgattaatagcatcattaccacaatacgaaaaaacattatagctataatctccattattataccctattactttatccgcattaataaacctacaagtttccggatcataatagcggctttgcaaatagtaaagttcgctctccgtatcatagtagtatgacctgtatcggatagggtttttattcccgatatgcgttacgtcgcccgatatatcacgcccatttccgtcaaggagtttttctatctttccccacgcgttatatacatatcttaccacaggtttcccgtccctgtcaagtattcggattacgtctccctgcaagttctttacatacagatatacacttccgttatgcttcaatccgcatacttctccgttattgtcgtacacatattccaacacatcgacttcgttaccgttttctatcgtttccaataacacgttcgtcccgtttaagtaatagctgtgtactactccgtttactgtctttttcgtccggattccgtttgcgttatactcgaacgacaaactgctcccgctcttgctcatccctttgagttgtctgcctttctcccattcaagcgtatatccgtgatacatattcggatttccaccgacataggtcatagtatccccataccccgaataatacgtcagacaatctttccactcgctttcgtatcgatacctctttttttctccgacgtcctcgggcattcctaac

SEQ ID NO: 4172 - DNA, 2077 bp, Unknown
  16S sequences of unknown bacteria
agccagagaggcgatccgcaaatgccgttcgctcaccgataagccattcggcgtcaatgtcatgatgatgaatccgtatacgaaggagctcatggagatgatcgctgaggaaaaggtggcgctcgtgacgacgggcgcaggcaatccgggcgtctacatgaagatgctcaaggagagcggcgcacgcgtgttcccggtcgtgcccagcgtagccatggcgatccgcatggagcgcagcggcgcagacggcctgatcgtggaaggcggagaggccggcggtcatgtcggagaacagacgaccatggcgctgttgccgcaggtcgtggacgccgtaagcatcccggtcgtcgctgccggcggcatcgcagccgcggctttgcggccgcgctgtgcttaggcgccatcggcgtgcaggtgggcacttgcctgctggtatccgaggaatgcccgatccacgagaattataagaacgcggtcatcaaggcgaaagataccgacacggtcgtgaccggaaggagcctgaattctccggtgcggatcttgaagaacccgatgagccgtcagtatatcaagctggaggccgaggctgccagccgcgatgagctcgaaaagctgacgctgggcggactgcgccgagcggtgtttgagggcgacatgaagaccggttccgtgatgatgggacagatcgccggactgtgcaaggagatccgtccgctgaaggacatcctggacagcctggtcagcgatatcccatctgtgctcgcacatgcagaacaggcactggaggaaagcagatgatgaaaccggccgacctgaacggccgtatcttggaagtgcccatcattcagggcggaatgggggtaggagtctccctttcctcgcttgccgggcatgtgatgaaagaagggggcatgggcgtcatcagcgctgcccatccagggtatgcccgacaggatttccgtcaggacagcatccatgccaacggtgaagcgctgaaggaggcgtgcgccaaggccagagcgatcagcggaggacgcggcttgctcggcgtgaacatcatggtggcttccacggattatgacacatatgtaaaggcgagcgtggaagctggcgcagacgcgatcatttcgggtgcggggctgccgctgcatctgccttcattggtggaaggcagcgacatcctgcttgcgccgatcatctccagcgccaaggcagccaagctcgtgctgcgttactgggattcccactatggacgcacgccggacttcatcgtcatcgaaggcagcgaggccggcggccacctcggattttgcaaagaagacctggaggcaggcacatgccagccgctggaggagatcctcacagaggtgaagcaggtatgtgtgccttatgtggaaaaatatggaagggacatcccgctgtttcctgccggcggcatctatgatggcgccgatatcgcccgcatgatgaagctgggcgctgccggcgtgcagatggccacacgcttcatcgccacagatgaatgtgacgcgagcgatgcgttcaagcaggcggtgatcaactgccgcaaggaagacatcacgctggtcaaaagcccggcaggcttgccgggaagggcgttgaacaaccggttcgcccaaaaggtgcagggacagatgatctcgatgagcaattgcctgcactgcatgaagccatgtgatccgaagcatacgccatactgcatcagcgaggcgctgatccgcgcggtcagcaaagatgcggaggatggcatcgtcttcgtcggcgccaatgcctggcgggtggatcgcatgatgcatgtcagcgaactgatgaaggaactgatcacgggcacagaggaagccctgaaggagaactgagatgaagatcggatttttatttgccggccagggatcacagcatcccggcatgggaaaagatttctatgaacaatatgatgcggcgcgccgtctgtacgacagcatcgatatcgatattccggtaaaggagctttgcttcaacggcacgcaggaacagctcaacgatacggctgtcgctcagccgtgcatcctggcgacat

SEQ ID NO: 4173 - DNA, 6136 bp, Unknown
  16S sequences of unknown bacteria
gtatcccctgtgacagcgtgctgatcttccccaatgacaaagtgtcgctgatgcctgagtgccactacatggcgttcaagctgatcttcgaggtgcctaccggccggatcctcggcgcgcaggccatcggcagaggagagagtgacaaacgcatcaacgtcatcgccgccatgatcaccatgcatgcgtcgctggaagacctcaaggagctggagctgtgttatgcgccgcagtattcgaccgccaaggatgtcgtgaatcaggcagcgctggtcgcgctgaacgtgctttacggcgaagtgcgtcaggtgcatgtccaggacgtgcgcgcattggcggaaagcggcgcgtgcatcatcgatgtccgcgaaccaggagaatatgcgcgcgggcatctgcgttcggcaaagaacatcccgctttctcagctgcgggagcggatggcggagatcccttctgatcggccggtctatctgcactgccgttcttcccagcgcagctattacgcgctgcgctgcctgcaaggcaatggataccgcaatgtcttcaacatcagcggctccttcctgggcatttgcctgtatgagcatttccgtgaccagcacgagggaaggacgccgatcgtcaccgcctattgttttgactgagcaggtcccgtcggatgacggggctttttcagtgccctttttctcgctgacgtagaagagaggcgaggaggtgaagagatggatgtcaatgtggtgatcgaggcgcgcaagggcgaccgggaggcgttcggccggctgatggcggagatccgcccggcattgatggcccaggcctgcgccatcctgaaggatgagttcgtcgcggatgaatgcgtgagcgagacgatgatgcgcatctttgaaaagctgccgcagctgcgcagcgccggcagcttccccgtgtgggcgcgcaggatctgcgccaatgtctgctgcagcgaataccgccgtgtccgccgcgatctttccttgcagagcgtgcaggagccttccgtatccgatcattatcagctgacagagctctatctgcgccgcctttctgcgcaggatgcgttcatcgtctatcagaaggcggtggagaacgtcagcttcaccgcgctgggaaaggcgctttcgctttctcccaatacggtcaagagcaggttttaccgcgcgctgcgtcagctgaggaaagagtttgacgcagactggacttcaccggaaggaaaaaacttcaaaaaaatatcacaaagaaaaggagatgatacggtataataaaaaatatataaggcaggtgatcgcgcaatggctaagattctggtagtggacgacgaagtgaatatccgcaggatgatccggaaattcgccgagtttgagggatatgaggtgtttgaggccgtggatggcatggatgcggtggagaagtgtgaaagcatgaactacgactgcatcatcatggatatcatgatgccgaatctggacggattcagcgccgtcaagaagatccatgaattcagcgatacgccggtgatcatgctgtcggcgcgcggggaggaatatgaccgcatccatggctttgaggtcggcgtggacgactatgtggtcaagcccttctcctgcagggagctgatgatgcgcgtggccgcgatcctgaagcgttatcagggcgggggcaagagcaagcgcaggatgtatgaatacaaggatctcaaggtggatctcagcgcccgcaaggtgttcatccacaacaaggaagtggaaatgtcgccgaaagaatatactctgctgttttacatgatcgaaaatgaagggatcgcgctgaccagggaacagttgatccgagacgtatggggctatgatttttacggggatgaccgcacgctggatacgcacatcaagctgcttcgcaagagcctgcaggaatacagctcgatgatcgtcacgctgcgcggcgtgggctaccgctttgagaaaaaagattaacagcctgaaaatacagcagaaagtactgatctatcttatcggcttcatctttgtcatcttatgcatcttttatctggcgcagggggtgtttctgaaggacttctacatgttcatcaaggaacgaagcgtgcagagggccacagaccagatcacggaggtgctcagccgcggctataattttgacaagatccaggatatcgccaactcgcatggcttctgcgtgtatacttacggcatgggcaatggcagcgagccatatccgatcgccgccgtcagcggggactatcaggcttgtccgagccagccactgatgctggaccgcaatgaagagctttatctgaaggcactctcgtccaagaacgggcaggcctccatcatcgtcaatgataaggatggcaacaacacggaggtccgcgatatgaccagcgcctctgtcatcaattccgcggatggccaccagtatatcgtcttcgtcaatacgcggctttctccggtgcagtcgacggtgtccacgctgcagacgcagttcatcatcatcgccgtcgtgatcatcgccatggcgatcgcgctggcgtattatctgtccaaccggatcgccaggccgatcctgacgaccaacgatcaggcgcgtcagctggcgctgggcaattatgacgtgcatttcgacaaccatgagtatgtggagatccacgagctcaatgagacgctgaattatgcggcccgagagctgaagaaggtggaagggctgcgcaatgagctgatcgccaacatgagccacgacctgcgcacgccgctgacgatgatcagcggatacggcgagatgatgcgggacatccccggcgagaacaacgccgagaacgtgcaggtgatcatcgacgaggccaaccggctgaccacgctggtcaacgagatcctcgatgtcagcaagctgcaggccggcgtgcagtccctggaagtttctgtctttgatatttctgcacaggtcagcgagatctgcgagcgtctgcgccatctgttgaagcatgagttcaagatccgcctggaacagccgggcgcggtgatggtggaaggagacagcgtcaagatgacgcaggtgatctataatctgatcaccaatgcggtcaactacagcacgcggcgcagggagatcgtcgtgcatcaggaagtgaaagacggcgtataccgctttgccgtgcaggatttcggcgccggcataccggaagatatgatcccgtatgtgtgggaccgctactaccgcggcagccagagccatgtgcgcgccaaggtcggctccggcatcggcctgagcatcgtcaagggcatcctgcagcttcaccaggcgaaattcggcgtgaaaagcaagctaggagaaggcagcaccttctggttcgaactgaagacggcaagcgcgccgcagacgaaaaaatgaaggatgggtcagccgtgatccgtccttttttcacgccgaaaaaacggcagctgtcaagcgagatgaccgaaaccggctttcagataatgtaagtcattttcagcgtgacaggcgtgcaaactgttgtataatgtttgaagtgtcgatataagatagccggtcaaagtagtccgtcgggatgacgcatgaaggagatctgcataatatcttgatgagtgaacggatatgggcggaccaaggtgaggcgtctcatgttttttcgcacgaccaaagagtaaagggggtatcttcatgattacaaaaatcagaaaaagagacggtagagagatctactttgctcctgagaaaattacccgcgctatttttctggccgcttccaaggtggcagaggatgaaggacaggtggcaaactatgccactgcagaacagctgacggatcaggtggtcaactatctgaaccggcattaccaggatggcattcccacggtggaagaaatccaggacgctgtggtcaagatcctgatcgaatgcggacatgccaagacgagcgaggcgtatatcctgtatcgcgccgagcgttcacgcatccgcaacatgaagacgcgtctcatgcagtccatcagagagatcaccttctctgacagcaaggatgccgatgtcaagcgtgaaaacgccaacatcgacggcaatacggccatgggaacgatgctgcagtacggaagcgcggtatcgcgtgagttctgcaaggccaacctgatgacgccgaaatttgccaagctgcatgatgacggagatattcacatccatgacatggacttcatgaacatgggcacgctgacgtgctgccagatcccgctggacaagctgtttgaaggcggattctccacagggcacggacatctgcgcgagccgcagagcatcaccagctatgccgcattggccgcgatcgccattcagagcaatcagaatgatcagcatggcggacagagcatcccggctttcgattattatctcgcggaaggggtcgccaagacattccgccgcgcatataccgacaacgtgaacaaggcgctcgaagtgctgatctcactggacgaagacatcaaggcagatatggagcaggtggaaaaggagtgcggggagcgcccgacgctgcgcatgagcgaaaagttcctcgccgccatggaccgcatgctcgccgagaaacacggactggatgcgcagcagatcgatctggtgaatgcgtttgcctacaaggaagcgcagaaggagaccgaaaagctgacgtatcaggcgatggaaggctttgtccacaacctgaatacgatgcattcccgcgccggcgcgcaggttccgttctccagcatcaacttcggcacggatacttcggcggaaggccgcatggtcagcgagaagctgatgctggcgcaggaggccggactgggcaatggtgagacgccgatcttcccgatcctcatcttcaaggtcaaagagggcgtgaactatgatccagacgatcccaactatgatctgttcaagctggcatgccgcgtcagcgcgaagcgcctgttcccgaactttgagttcctggacgcgccgttcaacctgcagtactatgtgccgggccgtccggagaccgaggtggcgacgatgggctgccgcacccgcgtcatgggcaatgtgaacggaccagagatcaccccgggccgcggaaacaactccttcacctccatcaacctgccgcgcatcggcatcaagcacggcaaggtgatgctgggcgaaccggatatcgacggcttctatgccgagctcgatgagaagatcgacatcgtcatcgagcagctgttagagcgtctggccatccaggccggcaagaaggtcaagaacttcccgttcctgatgggacagggcgtatggctcggctctgacgagctggagtgggaagatacgctggaggaaatggtcaagcagggaacgctcaccatgggcttcatcggcctggcagaatgcctgaaggcgctgatcggcgagcatcatggagaaagcgaatatgcacagcagctcggactggagatcatcggccatttgcgccagcggatggatgaggccacagagaagtatcatctgaatttctcactgatcgccacgccggcggaaggcctgtctggacgattcacgaagatcgacaagaagatcttcggcgagctggagggaatcacggaccgtgagtactatacgaactcattccatatcccggtgtattatcacatccgcgcatttgacaagatccgcctggaggcgccgtatcatgcgctgaccaacggcgggcacatctcctatgtggaggtggacggcgatccgaccaacaacctggaagcctttgaagccgtggtgcgctgcatgaaggaaaacaatatcggctacggcagcatcaaccaccccgtggaccgcgaccccgtctgcggctacagcggcatcatcggggacacctgccccaagtgcggacgccatgaggacgagggccccctgggcttcgaacgcatccgccgcatcacgggatatctggtgggcacgcttgaccgctttaacgacgccaagcgggcggaggagagagaccgcgtcaagcacggcctgtaagaaaagcggcgctgcaaagcctgcaggaaaagccgtcggcgaaagcggcgcctgtgcctgctgtggcagggaaaaggggacg

SEQ ID NO: 4174 - DNA, 3897 bp, Unknown
  16S sequences of unknown bacteria
ccgcctgtggcctcgcgctgccggatgatgtctttgcccaatatcgccagattaaccgccgccaatggcagcggctggacgcaggggagatcacgcgcgatgacgtcctctacggcaggtttcgcctgctctttgccgccctcggctggcagaccgacccggtggcggtcgaaacccgctatcggggctttctcgcccaggcccacttccccgtccccggcgcactggaagcactggcggcgttccaccaaacatacgccctttatatcgcctccaatggtctggcccagacccaatacgaccggctggatgccgccgggatgacgccctatctccaaggcatcttcctctccgaagccgccggggcccccaagccagagccggcgtttttcgattactgctttgcccatatgcccggcgcccgccgggaagagacactcctcatcggtgataacctccgcactgatatccgcggcggccagcgagcaggcctgcgcacctgctggtttaacgcccgccgccgtccggaagacccggcgatccagccgaactggaccgtctattcctgggctgaagtcctagccctactataagaaacacgcctgtgccgcagcacaggcgtgttttcataagtatataagtttacattttcgcctttttcgccttcggcttgcgcaaatagcagctgtagaacagcgccgcgacggcgcagccgccgaggaggttgcccagggtcaccggcagcagattgcctgccaggtaccggccccaggtcaggtgcgggaaggccaccgccagatccgcatatactggctttgcaaacaggcccagcatacaatacatcatatccgcaatggagtggttgaacccgcagacgacgaagaacatcaccggcccccacgcaccgaggatccggctgacgccatcctgccccgccaggctcaacagcactccgaccgtcacaaggatattgcacaggacgcccatcatcaaagcgttggcaaagggcatcgtcatcttcccctgggccacctgcatggtgtactgggccagcttctcctgcccggcgttgagccagccgaaccgggcgcagacaaacgccagcagcatcgtgccaacgaaattgcccaccaggacgatggcccaattgcgcagcatcccggaaaggcgggccttgccgtccagtacgctcataaagatgagtgtattgcccgtcagcagctccgcgccggtcatgacgaccatgcccagcccgaaggcaaagagcagccccgagatgacccggatgacagacggattttccagcgcaaagcacgccatattcgtcaccgccgctggaaagccgatgagcagcccggctaagattgccagaaggaacagcttccccgccggggccgtcgcttttgcagcgcccgccttggcataattggcggaaaagtccgccggtgcaaagacttgcatggcgctcgcccccttgttattgcagcgtccgcgccgccgcctcaacgacatgcccgatgaggacagatgtcgtcaccgcgccgaccccgccgggcaccggcgtaacggcctcaacgatgggctcgacagcggcaaagtccgcatcccccgcgatgccgcccttgccgtccttcttcgtcgggtcccagttgatggaaacgtcgatgacgatctgccccggccggacatagtccgccgtcaggctgttcaagacgcccgccgaggtgacgaggatatccgcctgccgggcaatggaagcggtgtccaccgtcttcgtgtggcagatggtgacggtcgcgttgcgctgcatcagcatcatcgccgccgggcggcccacgacgaggctgcgtccgatgacgacggccgtcttgcccttgcagtcaatgccgtagtaatcgagaatttccatgcacgcctggggcgtacacggggcaaagcccagctgcttgcccataaagaccccggcgttgctcaggtccgtcatgcagtcaatgtccttctccgggcgcagatgattgcagatctcgctctgcacgtccttcaaatgcttcggcagcggccggaatagcagcacgccgtggatggatgcgtcggcattcagcgcctcgatttgggcgatgagtgcctccttcgtcacatcctccggcagcaggaaccgctcgacctcgacgccgatgagcgccgcccgggacatggcccccttttcataggagaggtccgagggattctcgccgcagcggatgatccccagcttcggcgtgacgcccttttccttgagctctgccaccttagcctggagcttttcgttcatcgccgctgttacttccttgcccaatagctgttttgccatcgttagaaccttctttctgccccactcctgcgaggctcttgtctgttatgcctccgggaaaaagctcttttgcaccgcatcatagatgctgtcggccttctggccatactcccggagcattgcaaagcattgcgcgttcagttcctccgccttggcgcggtcgcgcagcgtttttgtgttgataaagacattcagcgacgccgcctgcagcgccgccttgcagcaaaccgcgccgcacccggcatctgaaacagccaggcgggagcccttctccgcaaagacggcaatggcgtcgatggcctggcagcagaggcgcatgatccgcatcgggacggcgcaggccgccaccgtcgcctgctctaaaatctccggccgcgtcgggtcgtccttcgggatgccgtaggcattggccaggggcaaaaagcccgcctcatccgcggcgacctggtccagcagctgcgcctccagggcctggcactggtccatcagcgcctgaagctccgcctcgacggcggcatattttttcttgccgaccgtcaggctgccgaccatattgcccagcgccgtgccgacagcaccgaccagcgccgccgcgccgccgcctcccggggccggttcgctggacgccacccgcgcgacaaaatcgcggcaggactccagcgttttatcttgcagtttctccataggggtaacgctccttcttctctcgcgccccggcgcagccgcgccgggccagggattgcatctattctagcaggaaacccagcatcagaacaggccggaaatcttgccgttctcgtccacgtcgatgcgctcggccgccgggaccttcggcaggccgggcatcgtcataatatcgcccgtcagcgcaaccaggaagcccgcacccgccgagaccttgatattgcggacggtgatggtgaagccctccggcgcgcctagtttcgttgggtcgtccgtcagggagtactgggtcttggccatgcagatgggcagcttgtcaaagcccagggcgttcatctggcgaatttgcttctgggcgttggccgtgaaggcgacgtccttgccgccgtaaattttcgtgacgatggccttgatcttctcctcaatgctgaggtccaggtcataggcaaaggtgaaatcgttcggcgcgtcgcacaggcggatgacctccttggccagctcgatgccgccgtcgccccccttgccccagacctctgaaagcgccacattgacgcccagagcttggcacttgctgcgaatcagcgccagctccgcctccgtatcctgcgggaagcggttgatggccacgacgcaaggaagatgatagacattcgcgatattggaaacatgcttgagcaggttcgggaggcccttttccagcgcctccagattctccttgcccgtctccgtcttcgggacgccgccgttgtacttcagtgcccgggccgtcgcgacgatgacgacgcaatccggcttcagccccgccatgcggcatttgatatccaggaatttctccgcgcccaggtccgcgccgaagcccgcct

SEQ ID NO: 4175 - DNA, 3331 bp, Unknown
  16S sequences of unknown bacteria
gtttttcccgactttctcataaggcaaattatcagaataatttggtcttagggataatccctaacgagcggtatttatggtatctatccataaatacacactcgttatgctgatatcgtttttggatgtatatccataaatggtctgctcacttagactaaacaatcggtctttgctgggaaaaaatgacagtacgtttagagattggtcgtcaattttctctaatcaatactgacattttcttttgtgtttttagcgatagattacttgatccaagacgatttcactcgattcttggtgttgtccatcagctttacccacatcactggatcatctactttaagtttttcatctactttttcttaagtcttgtagtaaataatcttgtgattatttttgagatagttcttatatcttcttccaaagaagccaatttgataatcgttttggttgcttagtcttagtgctggaatattgtaatcattaattctttcatactcggttgtcatagttttgtttcctcctgtcatcactatactcggtatatcttttttcaatcgagggtgcaaatgacagcgtgacaaaaagaaaagaccaccttagtgatcttctatgtttagactaactcttatcgcaaatccaccagggaagaaataagtgttcgtcagataatcatgtggtggagcttagggggctcgaacccctgacctctacgctgccagcgtagcgctctcccaactgagctaaaaccccgagtgctttcccagtatatcatagcaggaaagcgatttcaatgtgttttgcgtgaaacaaagcggcatatatgatgaaagagacgaagcgcgctccgtctctttatgcccattattcttcctcttcgtcaaactgtgaattatacagctgcgtatagaagccgtctgccttcatgagctcatcatgactgccggcctcgatgatgtcgccgtctttcatgaccaggatcagatccgcgtcacggatagtggacagacgatgcgcgatcacgaagctggtgcggttttccatcagcttctgcatgcccttctggatcagcacctccgtacgggtatcaacgctggatgttgcctcatccaagatcaagatcttaggatctgccaggaaggcgcgggcgatggtgagcagctgcttctgtccctgcgagatattgctgctttcttcattgatcaccgtctgatagccatggtcgagcgtacggatgaaatgatccacatacgctgcgtcagcggccttgatgacctcctcatccgtcgcatccgggcggccatagcgcaagttttccatcactgttccgccaaacagccaggcatcctgcagcaccatgccaaacagcgaacgcaagtcactgcggcgcatctgcgtagtagggatgccgtcaatgtagatcgttccgctgttcagctcatagaaacgcatgagcagcttgatgatggtcgtcttgccggcgccggtcggtccgacgatggcgatcttgcgccccggcttgatatacatggagaaatcatggatgatgatcttatccgggcgataaccgaaatgcacattttcaaacgtgacctggccctgaatatccgtatgtccgtccgcatcgtagatctccaccgggttttcacactccggcacctcttcctcttcttccaggaaggcgaagacacgctctgcggcagcggccgtagactgcaggatgttcatgttctgcgcgatcatggagatcggctggttgaagctgcgcacatacgtgatgaacgactggatatcaccgacggtgatcgacccattcatcgccagatagccgcccaggatggccacgctgacatagcccagattgccgacaaatgtgctgatcggctgcatcagtccgctgaggaactgtgacttccaggctgaatcatacagctggtcattgagtttttcaaactctgccacgctcttctcttccccattgaatgccttcatgatcatatgcgcgccatacatctcttcgatgtggccgttcacctcgcccagagagctctgctgcgcggcgaagtatttctgcgaatgcttgactaccgtggtcaccaggatcagcgaaagcggcacgacgacgagcgcgagcagcgtcatcgtgaagctgatgctcagcatcatcaccagatagccgatgatctgcacgaagctgctgatgagctgtcccagcgactggttcatcgtctgctggatcatatcgacatcgttagagaagcgggagagcacctcgccgtgtgactggctgtcaaaatagctgaacgggagaagatcgaccttgtgcgccatttccgcacgaagctgataagcgaccttctgcgccacgccggccatcatccagctctggatgaacccgcacagcgtagagatgagatacaggccgatcagctgcagcaggatggtctcgatcttgccgaaatcgatgccgccggtcccagagatcttcgccatgaatccgttggtcagctccgtcgtcgcattgcccaggatcttcggtccgatgaccatgagcgccacggagacgatcgaaaacaggaaggcgatgatgatgttgatccggtaagaacccagatagcggatcagcttggccatggtgcccttgaagtcttttgctttttctgccggccctctgcctttgccatggcccatggggccgcggcgcatgccggatgaatgattactgctcatgaccaagttcctcctttgacagctgactgaacgcgatctcgcggtatacatcacaggaatccatcagttcctcatgggtgccgatgccgacgatcgcgccctgatccagcacgacgatgcggtccgcatgcatgatgctggagatgcgctgtgccacgagcagcaccgtgcacttcgtctgctcgcacagctcgcccagcgcctttcgcaggctggcatccgtcttgaaatccaaggcggagaacgtatcatcaaagatgaagatctccggcttcttcaccagcgcgcgggcaatggacagacgctgccgctgaccgccggagacattcgttccgccctgtgcgatctctgtctggaagccctttggcttgccctcgatgaattccatcgcctgtgccgtctgggcagcctcgcgaaggtcttcttcactggcatcttctttcgcataacgcaggttgctttcaatggtgccgttgaacagatagcccttttgcggcacatatccgatgcgctcgcgcagatcatgctgtgcgacattgcgcacatccacgccgtccacgaggatctctccctcgctgacgtcgaagaagcgcggcaccag

SEQ ID NO: 4176 - DNA, 20556 bp, Unknown
  16S sequences of unknown bacteria
tatttttctttagtagccagtccaccacgaatatgacgctccgatttgttaatgtccaacacttttctggcttgttttgcaagtcccggattgatatacaacagccgctcagctacatctttatgaactgtagatttgctgataccaaatttttttgccgtctgccgcaccgtcgcattgtggtctatgatgtaatttgcaattgagactgcccgttcttcaatatactctttcatgggaaaaccccttaagaacgttttttacatcatattaccggctatctctatttatgccatcactctttttggaaagtcattttcgccaaattgtccgtccagaaaaaacatttgtatttttcggagaattcatgtatactatgaacatctgcgctgcgcagaactaacgaaagaaagaagacgtgttatgaaaaaagtatttgaaacatggaacagcatcagtctggtaaagagaatcgtagccggtctggtcatcggagctattctggggcttgccgttccttctgcaactggtatcgcaatccttggaaatgtatttgttggtgccttaaaggcaatcgctccgctccttgtatttttcctggtcatcagttccctgtgttactctggaaaaagtcacggaggtgtcatcaagaccgttatcatcatgtatatgttcagcacattcctggctgctgtgattgctgtcgtatccagcttcatgttcccggttacactgacattggcagaggcttcctctgatctgtctgcacctcagggaatcgccgaagtattaagcacactgcttggaaatatcgttgccaaccccatcgactcccttgtaaatgcaaactacatcggtgttctgttctgggctgttctgatcggtattggtatgcgtgcagcaggcgagaccagcaagaatatgctgaacgatgtatcctctgcgctgtccaaggtagttacatggatcatcagctttgctccgttcggtatccttggtctggtgttcaataccgtgtccaccaatggtctttccatcttcaccgaatacggaaagctgctggcagttctggttggctccatgctgtttatctactttgtgacaaacccgatccttgtattctggtgtattcgcaaaaacccgtatccactgatcttcaaatgtctgaagaagagcgcaatcactgccttcttcaccagaagctctgctgcaaatattccgatcaatatggaagcttgcgaggaaatgggacttgataaagatacctattctgttactattccacttggtgcaaccatcaacatggacggtgcagctatcaccatcaccgttatggcacttgcaaccgctcacacactgggaatcgccgtggatatcccaagtgctctgatcttaagtgtgctggcaactctgtccgcatgcggtgcatccggtgtagccggtggatctctgcttctgatccccatggcatgctccctgttcggtattccgaatgatgtagctatgcaggtagttggtgttggatttatcattggagtgattcaggactctgtagaaactgcactgaactcttcttccgacctgctgttatcggcttccgcagaattcagacagtggagaaaagaaggcaaagaaattaaattctaagaaattaaacatataaaatagctgcaggtgtcgaataaaagctcgtatgacttggagcgcagtttatttcgacacctgcagctatttttatatgtactctttcttcgtaaacacgatgtattccccattataattaccccaccaggtgctgggatattctccggtcacatagatggtacaaaataacatctctgctgcattcagtctggagcagatggagaacagaatctcgttcgcctggaacaatacctgcccttccttatgttccatctgatgaacatattctcgttcctgataggcaagaacactgtcgatctgttctcttgcctcctgtggaagcgtaaaatagtagaaatccacatatacatttttacagccgcaggcttcccacaattctgtaaacttatccacagcctgatactcgttcatacgaacgatctggttatcatactgttgcataccttctgtgattttttcaaaataaatggctcctgagtccttcagttcttcaattgtcattcacatatctccgttatcttttgttttcgcgtcattcgctctgtcgtaatatctttatatcgataaatactcaacgtcagtcccagtaaaatataagaagtaatgatggttcctccgccagatccggcgaacagcggaagaacaatacttgtcggtggaagcaatcccagattgacagcaacagtcattgcaaactggagcataaatacaatgccgcagccgtatccaatgatcattcccagctgattcttctggctggatgagatacggaacatttttaagatcagcactgccagcaatatcaccaccactgctactataaaccatccatatgcgcaggcaagtgcaaccagcagataactgctgccaaaagacggaagcacgttctgtgcactctgcagaagttctgtattgccgccaatcagatggctgcccgccaacgtcttagacacctgcaacgtaatataactggtctgtgatcccgttaaaaatccttccattctttcctgctgataaggagcaagtagctgtcctctcgtaaggatcataatcagtaccagtggcagtgctccgatgcagattgccagaccggtcagcgtccgcttcttattgacctgataccagtctctgcttactgccactatggtcagcaccagcattcccagacacataagcatggtgaaaacaaatcttgcatagataagtcccgcatacgtaggaagcaatacccacaacagcagtttccagatacatccatatccctgtccacggtaatgataaagtacagccccgaacaatggaacatacaaccactgcaatgccatggttggaatctgcataccacccagatacaggcagtaggttgctccatttaccgtcaatccaaactgtgttgccagcagcatcaatgccactacgattcccgccgccagtgttccaaaccggtcaagaatactgtaatccagccggcagacaaacagcatgacagcataaccagctactgtaaaaacaagctgtcgcatgccataccagctcatattctgaatatcttcgttatagtcaaatggtgcgaacatatagaggatcacactgaaaataccaatcacacccactaagaggagtgcgctccactccatatgaggtctgtggacccgatcaagggaaacacctgtctccactggatcccccatttccagcactgctttttccatagcctcgtctgcagacataccttctgattcataggcttctgcctgatcttccagatgtgcctgaagttctgcccgcactgctttgtgtactttctgacaccggatctgatctgtgacctgagataaatactcattcatcttcatgctcacacctccagtgccagtacgttactgactgcttttgaatattccttccattcagatttcttctgttccagatgctttttgccttcgcctgtgatctgataatatttccgtacctttcccagtacctcctgctcataggacgtgacaaactgcttttcttccagtccgtgaagcagcggatagagtgttcccgccttcagttcaaatacattttccgaacgctttttcagcgtgtcgatcatctcataaccgtacatatccttctctgtcagcagacgaaggatcatcattcccatacttcctgatactaaagatctgtcgatcgccatgtagataacctccttgtacatatatagtttatctatatatagattaactatatattatatcggttatctatatatgtcaatacttaaataagatttccagacaagtgttacctatgattccaccgttgtctgttccgcttcctttgcaggaatcctcggctgaagattttcattatctgcacagaaatatccgtcaaccaggctcacaatatgttccatcacttttttcgccagttcataatcgtccggtctgatagtcactgcaaacaccgtgtggatttgctgttcctgaagccatgcatcactttcctcatcacccagagttccttccagatcctcaaaatccaccgaacccgcttctggaagttccacttccagcacctctgcttcctcccagtattctacgttccacggagaatctttcagaagctcatagatctgacgaagctttatctcaccctcgaacagatacagccactctgccggcactttgggtccctgcttcttcacaggtgtcttttttacggaaggcttcttttgctgcggtttctttttctttccttttatcatatgataatcctttcctgtccttactgagcatcttttgtatcaatattaccgggagcttcttctgtttccttgcaaagccgataagaatgccgtggttctacagtcaccttaatatcgcagtctgaacagtgcgctccattgaccatcaattcataggaagccgtcatctcgatcttctcttcttccacacccagacagactcccttcgtatgtacaccgaccagaaaacttccatacggaatgttgtaagcactctctgtcacttccccttcctcaaagaccagctctgcggacactggtcctcgttttctgacctccagcttctcatttcgcaatttcagcatatttctgatcggagtcttgtgcccttccagcaattcatcaaagaagagataatgcactccgtttttctcgtagtattcaccaatgtgtacggtctctaccgtatcttcgccactgtctcccagctgcagcccggacaatgtaaccataacctcttttgtcataagccacctccttttcgtccattgtagcctgtttacagaagggattcaagtattctttgcaaaccagaggttcaccttcaccggcagtcgatccgggttgggacgttcataaagcagggtccaccaggataatttttctgactgatcaggtgcaccaagacccatattctgctctaatacctccggtgcagtctcttgccccacatgctctgtccactcatcaagccatacatttcccgagactcccagcaccatgaccagcaataagatcccaattcttgttctcatcttagcaactcctcttctccgtttttctttactgatcagagtattgccagcggatcgtgtccttataccgatggtcttctgttaccagcggcaattcacagaactgttgattataccaggcattcaaaagctcatgaaccggcgttccttcctccggcttttcctcatccattgcttcctcacaggccgttccttccgtcacatacagaaggattcctctggaaaactgttcatccagctgcagttcttccagaattgtccccagctgctctgattgcagcatactttctgccatatatagatattgcaaatgattcagattcagttttttctgatgataatctccgtaaatatccatggcttcatggatcgaatctgcttttgttgtgaagatccgatcattatcatcctcagtgccactttcctgttccagttctaacttctctgcgctatcgccttcgccctctgcaacggcgaaaacaaatgaaatctcctgcccttcatcgattgccagactttccacaaggctctgcgtctccaattgttgttgtccgcaggcagtacaccaagtgatgactgtggtcactccctccaacaacaaaactatcttcataccagatctcacagtcccagatacatggggacgttgtcccatctgaccctttgtctgctgattttcccactgcttccacgtctgccacaacaacaccagtacctgcgccgggatcagtatcattcgtaccagccagtctccccattccataatagaaggtatcagtgccaacagataggatcccaatagaagcaccgccagtcccacattcttccatttatttcgtgtgccgcctcccagtggcgcaaataacgtgctgcatgcaaggaacagccccagaacccatgccaggacaaataccgtatccatccgtccgatcacatttccaggaaaatgcgccagcgtcatggcagacgcaaaaggatataaaagccccatttgccccgatgcaccatagattccacaggtgagaaatccacacagcagaatgatcacaccacctgccagagtgcagaccacacctgttcttgtccatgttgcagaggtccgcacatttaccgatggcttcagataccataacccctgcaccacagccagccaacagaacagtctatatccgtctgtcaactgctgtccgctccatgaccattgcatctcctgcagccgctccacttttacagctcccagcaatagaaaaggcagcaataccagaaatgccacgcaaaagggaaacagaatctcgctgactcgcattctgcattccagtcctttatagagattgtaaaacaagaacagataaaaccatccaagaatcaccgccaggtgagtctctgtcagcaaaaagtgctgaatgagaatcccagtcatgcgggagatcatcgttcccacgatccagaaatagattcgcccaggtaatcgaagccaggagttctccgccggagcttccacccatatactccacagtacaaagactgtcaataacaaaattgccagagatccagcggtcacagatcctttattttcataaaggggcaccagcaaaattcccatattcaagagcagcaaccattgattccgctttaattgccgcacagagatcttctcattttctgaaaacatatcagtccctctttctcagcttgatccgttctccccgtctggcaaagatgggacgtcgcacacaatatttcagcggaaaacggaacaaagagtccttcttgtcctcatatccgttcacatccgctgccacataaggcatcagatatggaattccaaagctattcagatgagacagatggatcaacacccatagccccgacaatgccacaccgtacagtccaagccatgctcccataaaaatacatccatactttaatatccgaaacgcagaagcaaattcttcattgggaatggcaaatgaacaaagagcagtaaatgccaccacgatcaccacaatggggctcaccagactggcatccactgccgcctgtccgatgatcaatcctcccacaataccaatggtattccccataggtcccggcagccgtattcctgcctccttcaaaagttcaaaggaaatctccatcagcagaatttctcccaaggcagggaacggcactccctgccttgcctctgccatggagagcacgagtttcgtaggaagaagactggtatgccaggtagctactgccacatagactgccggaaatatcatagacaggatcgctgcaaagaatcgaagggttcgcgcgtaggatgccacctgaaaccgattataccagtcatcacttgtctgaaaaaagctgttgtaatccgagggtaagatcaacacctgaggggaatgatctgtcaccagcacgattcgaccctcaagaaccgctgccgctgcccgatccggtcgttctgtggtctgaaactgcggaaacggtgataaccagtgtttctctgagagctgctcaagcataccgctgtccaggatcccatcaatttcataccgctgcaactgctgcttcatagtagtcaacagcccctgatagatcagatcttccatataaaccagtgctgtcatagtatgcgatcgcacgcccactgtctgttcttccactttcatccgggagtcccgaagccgctttcggatcagtgccacattgatcttctcactttccgtaaaagcttcctgcgaaccacggatcaccttttcattttccgctttctttactccaagtcctggatatcctttgctggaaatcttataacagttcgtatctccatctaaaaataacaacccatttcccgccagaagagcagcctttccttcttcataagatttcagcggctgtacatccgacagcccgatcacatgctcctccagcatcagattgctgaccgccacctccacatagaccagcaatccttcctgcctgccctgacccagatagacctgtcgatgtagaatatcatcacatttttcaaaggtctgatctacccatgcttcattgtccgccagctgcggagatatctcgcccatgcataacatcctttcctcatactcacgtttcccgcataaaaaaggatgagcttatgctcatcctttctgcatggaactatcatatccctctcttattcattttatacgcctatctcttcacattatacggtgtagtcaggcagatctgttttgccagcttcgccgcacgcaccgctttcatggcctgctttgcagccaccggagaatcaaagattccaaagaccgtcggaccgctcccgctcatcatagaaccaatggctccgttgtccatcatcgtcctcttgatctcattgatcaccggataagccggaatcgtaacggtctccagcacatttcccatacgggaacataagagccccaaatctttctggcgcatagcctcgatcatgctgtccacatccggatgctgctccggcttcagatcattggcatgcagattctcatacacaaattttgtggacacgctgatgcctggcttcgcaataaggatcgtgcattttggcatgggcggcagcacactcagtttttccccaatcccttctgccagtgctgttcctctctgaatacagtaaggcacatcggctcccagcctgacgccacgctccatcagcgcctgcatggaaagtcccagaccatacatttgattgattccccacagcactgctgcgccgtcagagctgccacctgccataccggccgctacaggaatacgtttcttcagttgaatggacactccatcctgaatctgaaactcatccatcagaagctttgccgctttgtagaccagattattctcattggtgggcagataataaagattggtttttacctgaatccccggcgtcttcgttttacggatctccagatcatcatgaagcccgatggtctgcatgatcatcttcacttcatgatagccatcctctcttctgcgcagcacatccagcccaagattgatctttgccagcgcttttaactgtatcttatccatattgttttctccctgtttctttcagaatatgctctgcttctattctaatagattcaggagctggatacaatcatttttcacagttctttcagttctgttttccagtgatctctttgaccagcaaaagcttgcttcctgctttcaggttatcatccttcagctcattgagtttcctcactgattcacaggcgcagccatgatttttcgcaatatcccacagcgtttcctccggctgcaccacatggatcaccattccgggaaggcctcgcacccgttccatatcaaggggctgttcctccagatgctccaccacctgcagcgtctccgttctggtgaacatgacctgcacctgcagcactgccttcatctccagctctctggcatccagcatggctacgagcagctgatcctgacataagaagatctgccagtctgccgcctgctccccattctgtatctctacggtatgctcaaatggaaatgtctgctgcacacaagtcacaggctgtgcatcatcctctgtggcacagagcacccagacttccacatttccctggagcaacaatcctttttcagttttttccgcatattcctcatgaatctgcataccacttgtcagaacctggaggatcggagcatcattttccgaaagcctgatccgtcctgataatcttgttcttgaatctgcgatctgcactactgacgtccacgcacaagcctgtatcaccgggaggatctcacgggacagactgtatgcatccgccagcacttcgcaggtcagatcttcaaaataccgcatgcacagatccaacaccacatccacacgtacattccttggttccccgtcaaaatctgactgaagttccaattcggccttcgacaatgtaatctccgtttttcctgtcagatcagcccggcattcctcacagacgacttcatttcggaatggaatcccctgttctatccactgcagtcgtttttcctcgtcctcactttcgtatagaaagaagaccagcagttccccctttacaataaactttccttcctccggcctcacttctgtgccctgtacccggacctctttccaaaggatccgatggatattcggcctccccggcggaagattcaggtcctcacggatccgaatggtatcctttttatgtatgacttcctgctgcaatttctgcggacaggttcgtacatacagatcttcttctgcttccggtatctccaccagcggtacaggctgttccttcatggcttccacggacaaagtcagaatcgtcttcatatttgccttgcgggaatgaatcgccgatgcatggaggtcttcctgactccaacggaaatccacctgatctccttcctccagatcatttaaaaacacgacctcgtccactggaatactgccttctaatagctccggcatatgtccggcaccttctccgatgtacaggattcgataatggaagatgcctctgactttcaccttcccggcctcacctttgatctcatccgggcagaattctccctgtcggtgaacgatccggaaaatgtcaggcttctgatccggcacattcaaatcctcctccagcgtcacctgactgacggcatgacccttctgcttgcttaatgtcacatatttccgttccagctccatgatttcactcctttattcaaacacgaccgatttatccagatattccagcttcaacacaatataaggacacgttaccgccgcagtggtcgtctctccttttccaggccccagcagttccgtatccacacagattgcattgtccgtcagatacagatcctctaccgcaatactgtatccgctggtgtcctgctctccgtaacctacacagatatagagatacccgtcatcttcataagttaccttgaacggcatactctttttttcctccagcacatccctcagttcttctggcactttttccagatccatcacagtaaaatccagatctttcagcctctcactttcctgtgtctgcattccacagccagacagcagaaatgtaagtatcaacagacaacaccattttctcatatcctgcatttctcctcgccatttattctatctatatgaagaaaaaaagcatttcagaccatggttattccttgtattcctccgggcggtaacgtataataagaagaaaatcgtaacaacgtgaaagacgaggaaattattatgcattttaaagttgcagcagaagataagactaaccaccgttatagcggtgttcttgtacatcccacctctttcccgtctccatacggtatcggtgatatgggtcggggggcacatgaatttattgattttcttgctatggccggacagcatctgtggcaggtgcttccgcttggaccgtctggcaacggcaattctccctaccagagctattctgtctttgcaggacagacacttctgatcagcccggagctcctgatcgagaaaaagctgctcacagaggcagatgttcatcccattccggagttcaatgctgatcgggtagactatgacaaagtaactacatataagacttccctgttcaaaaaagcctataagcatttccgtcacactgcagacaagaatcttctggaggaatatgattcttttcagtcaaacaatcaatactggctggatgactattgtctctatatggcaggcaaagattatcacaatggtctgccctggtacgagtgggaggacagtctcttagatccgactccgaaggaacgggcgtcttggatgaagctgctggcttccgaaattgattattatcgtttcattcagtttgcatttttcagccagtggtatgagttgaaagattatgcaaacaagaaaggaatcgccatcatcggtgatattcctatctttaccgcacctgacagtgcagatgtatgggcaaacaaagaattgtttaaactggattccaaaggatatcctctggaagttgccggagttccgccagattatttcagtgctaccggacagctctggggcaacccgctctatgactggcctctggaagttgccggagttccgccagattatttcagtgctaccggccagctctggggcaacccgctctatgactgggatgccatgaaagatgatggttatcgctggtggatcgagcgtgtacgcaaccagctggatcaggtcgattatatccgtattgaccatttccgtggattcgaggcatactgggcagttccggccggtgagaagaccgccatgaatggtaaatggaaaaaaggtccgggtgaggcactgtttgaagcgatccagaaagcactgggtgaagagcttccgatcttcgcagaagatctgggtatcattacaccagaagtggaaaagctccgcgatactcttggttttccaggcatgaagatcctgcagttcgggtttgatggaaccggcgagagtacctttctgccgcatcagctgagcacccgtaactgtatctgttacaccggaactcacgacaacgacactacctgcggctggtatgagcataccaatgagcagaacaaggacaaagtgcgccgttatatgaacacggatgcttccagtgtgagctgggattttatccgcacatgtctgggaaccattgcaaaatatgctattttccctgtgcaggacctgttgaagcttggcagtgagcatcgcatgaatacacctggcacagcaaccggcaactgggaattccgttatcgttccgggcttctggatgaaggaatggcaaaaggtctgaaacagatgactgagttgtttggccgctggggataaatcacttatttgaataaaggagttattttatgatacgttttatactggtagtgctgatcgtcctgctctacctgatcgtaggtatcccgatcctgctgatcgaatggctcatcgggaaaataaatccccgtgccagagacatcagctcccttcgcatggttcagggtattttcaaatttattttgtgggtaacaggtgcgaagatcgattatattggtcatgaaaatgtcccaaaggatcaggctgttctctatgtaggcaaccacaacagttattttgatattctgctgacctattctcagtgcccggatctgaccggctatgtagcaaaggcagagatgctcaaatatccgctgctccgcgactggatgaaacggctgtactgtctgtttctggaccgcagtgacatgcgtgccggtatgcagatgatcctgactggcatagactatatcaaaaagggaatctccatctgtattttcccggaaggaaccagaagcaaagatggcaagatgcttccattcaaagaaggaagtatgaaaatggcaaccaagaccggctgtccgatcatccctatcgccatttccaactctgcacagatctgggaagctcattttccaaagatgaaaccagcacatgtggtggtagaatacggtgcccccatatatccgaaggagctttccaaagaagaacagaaatttatcggtgcttatacccagcagaagattcaggagatgctggacagtcaccagatctaaaatctaagtaatgaggagttttttatgaaaattgtagtactagcaggcggcatcagcacagagcgtgatgtgtccttgagcagtggtagtgagatctacaaagcgctgaagcgaaaagggcatcaggtcatcctggttgatctgtttctcggactgcccggtgtccatggacatcttgaagaactgtttgattccgagatagactgggcggcctccatccgcggtgtttcggaaaaagcccccgacctgtacgaagtcaaggccagacgtcccggataccgcagcatcttaggtccaaatgtactggagctttgcagtctctgcgatattgtattcctcggccttcatggagaaggcggcgaggacggccggatccaggcactgttcgatctgtatggcatccgctacaccggaaccgggcatgccagcagtgctctctgcatggataagagcattaccaaagaaatgttccggtgctaccatgtccctacacctgcaggcatcacggtccgcagtgaagaagagctgatactgccggaagactttacgtatccgtgcatggtcaagacctgctgtggtggttcttctgtgggcgtgtaccgcgtggaaaacgaagatgaacttcatgttgcactgaaagaggcctttacctatgaagatcatgtcattattgaaaaatgcattataggcagggaattttccatcgctgtagtggaaggaaaagcacttcctgttattgagatcgcacctctgaccggattttatgattataaaaataaatatcaggcaggcagtaccattgagacctgtccagcggatcttccttcagaagtcaccaaacggatgcagcagcatgcagaagaagcctgcgctgccgtctccatccagagctatgcccgggtggattttatgcttgataccgtcaccatggaagactatgcactggaagtcaacacgcttcccggcatgacccctaccagtctgatgcctcaggaagcacaggctcttggcctttcctttgatgacctttgtgaatggatcctcgcagtttctcttaaaaaatacaagtaggtgaagaacatgagacattttacagtaagacaatttgccaaagcctgccaggcacagtattttggacctgaagaggttcttgagcaggagatccacggtgttgtgatcgacaaccgccagattgaagaaggatatctcttcgcagctgttgcaggtgagcgggtagatgggcatacctttattccatctgcctttgaaaaaggagccatctgtgcactgagtgagcagaagctggaaaatccttccggcccttatcttctggtagaaaatactctgcaggcattaaaagatgcagctgaggcctatcggaaaacactgacgctcccggtcgttgccatcaccggaagtgtaggaaagaccagtaccaaagagatgatttcttccatcttgagccagaaatattcagttctgaagactcctggaaatctgaataatgaaatcggtcttccgctgaccgtatttcaaatcgacaccagtcacgaagtggctgtacttgagcttggcatgaaccattttggtgaaatgcatcgtctgagcaagattgcccgtccggattactgcgtctttactaacatccgtgatgtccatctggaattcttaggaaccagagacggtgttttcaaagcaaaatctgagcttcttgactttgctgccccggatgtaaagatctttatcaatggtgatgatgacaagctgatcgccttaaaagaccgggctgtaacctttggccttcattcggacgatcagatctgggccgatcagattgaaaatctgggtctggatggtgtacgatgctgcatccataccccatccggcgacatcactccggtgattccacttcctggcaatcatatggtctacaacgcatgtgccggaaccagcgtaggactggcactgggactgaccctggaagagatttcccatggaatcgaagcattaaaagccattgcaggccgcggacatgtgattcacgcttcacactatacgctgctggatgactgctacaatgcaggtcctgattccatgaaaggtgctcttgatacacttaattatgctctgacacgaaaagtcgctgttctgggtgatatgggcgagcttggcaccaattccgaagcacttcatgcttccgttggtactcatatggcggatcttcacattgatcttctggtaaccatcggagtcaagagccgtgcgatccatgaagcagcaaagcaggctgccccacagacagaatgcattcattatgaaaccaaggccgattttctggcagctgctccacagattctcaaagagcaggatgctatccttctgaaagcatccaacgcccagaaattcaaagaactggtctctgctcttcaggaaatgtaagcacaaactatgagaaacacgcttcgcgagtttctcaagttatcgcggcagtcgccaaggtctcgtgcaagcacggactttggctcgttgctcgcgtaaaaagcgctcttcccgttcccgtatttatcgggagtgggaagaacgcttttcttttgcagtcatatctgtctagccgcagaccatttcctgcctgttttcgatataatcgataataaaatgttccatttcttccttagacttacccagtgcaaatgccatctcactgtacagagcctcttctgccatcttcatatatcgttcatccacagaagcaattctctttccctgacgcagtctgtcctgtctgcgcagaaacagtgttttaatcaatgcaacccagttgcggcagtccccggaataaagtgtctgcttataaatatcttctcgcatcttgttgttaaccacttcgatcaatgcaatcctcggaatttcatttaacaactgttctgcttctgctctggtgatcgtgcgccttgcgcgtccatctttttctctgtccacagggtaatagatacggctttctttcttattcaacggcgccagcacataatataattttcctttatccacccctgaaaggttcagatgtgtgatatcctcgacctcacagattccgttgtgtccgtaaacaatgtattctcctttctcaaacatttcttcgttcctcctttcgacaataaaccagtttttgtgctgttcatgcggtgccgccaaatccgccaatataggtttattataccaattatttcataaattagtaatttctttttcttgaatctgaaaatttcggtaattttcataaatacacaacttatatttttgtgtaatatgacatttgtcaacccggatgagattggtaattttttcacaatatataggttccatattccggacaaatcggttataataggaacgtaacaggaatttaaccggaacaggaggatttttatatgagtaccgtaaaaattacaacaactaattttgaacaggaagtactgcagtcacagattcccgtacttctggatttctgggcagactggtgcggtccttgtcgcatggcagctccgatcattgatgaaatcgcagccgagaccgcaggaaaagtaaaagttggaaaagtcaatgtagacaccgatattgaactggctcagcgttatcgcatcgccagcattccgacttttctggttttcaaaaatggagaactggctgaaaaggccatcggacttcagtccaaagaggatctgatgaatctgctgaaatagaatcaaaatttctaaataaagagggcactgtaccgccaaatggtacagtgccccatttattatttatctactgttttatagtcattcaggcatcgcttcaatccatcagaaacatcactgaactccactgaactccacgccgtattttctcgccttctcacaattcatccataaattatgccttgggagtgcatcttgcagttgtacatctttcccaagtaactgcaaaaactgttctgtgatctcatacatggagcgagttgtctcacttccgaaattgtaagcgcctcccggcaatgtcatcacatgatccatgttttcaactacttccttcagatatgtgactccgcgaaactgtctggaactgaaggaaacctgttgactggcatgcagcacattcagaaaataattaggcttcggcgaaacatagtcatacatccattctgcccgcagcataactgcggaaggaaccagttccagcacacgctcctccatctccagcttatgctctgcatagatatttcccggttttaccacttcttctatgtacggtccctcttccttgcaggcactgtacacctgatccgaactgaaacagatcagctttctgtccttacatgcagcagccagatacaacggtatctgcacatttgcaaaatacgagctttgcggatctttctgacaagtcccgatatcagagattgctgccgtatggataaccacatctgcttcgctttcttccactattttcttgaccatgtcctgcgttgcattccgaagagatggtgcagcgattgcatctgtgtacgatgccttaagtttatgtcctacgaatcctgttgttcctgtaatcaatatcctcatttatatccctttcccagaattattgttttatttcagaatccccgtataattatgcaaaatatcgtccggctgcatggcatccgataccatagaaatttccagtttatagacaacatcttcatcgcagacatttccatctaccggcatgtacctgtcaaaatatacatttttctttttctcggttgtgataattaaactcacatattcatccgttgtcaccaatttataatagacggtttcacccggaaatgattcttttgctctgtttaccatgtctgcaaaattataatattctgactgatcccccaacggctccatctcaccatcgattgccggctgaagttcctctagaacctttaccgttctctcttcatttttcttgttatccacggccgtctgcacactgacaatcaacgttattgcaagaattatagcccccatgatcaggatactgatgccgacagtgatcgcaatagtctgtctcttctgctttcgttcctcaaccgtcagatgagtagccgcaaactgacgtgcaaattcataagggttttcatttccataagaaataaatgcatccactgtatcgcaatctggatacctttgatacactttataatctgagcagaatttttccattctgtaataaaaaggcgtaaaccatcccgtataaatacgtctccttatgaaaaaaatagcaaatcccaccacaatgatccccagataacctgttatcataaatgcatcataaatatattcgatgtgagatgcctttttctccggaagcaccgttaacagacgatatacattactctcttcatcccttgaccagtatgtattcaacctgtccccatatgtataacccgtcggatcaataccgagatccgtcagatcatagatgatatgctcccctttattgggatccttaaccgacgcactcatgccatcttcctgaacaactgctgtaactgttctctttcccatcaatcgataaccggtcacactctcaaaaggatcatatctcccgactccaaagatccagatgcaggagaaaataaagtacaataccacaaatcgaatcagactgctccagacattatacttcagagacttctcaagcttctctttttcctgcgctggtatacctggcactgtaatataccatgatgcaattttttcccgttttaattccttttcctctacctgccgcatgtgaaatacggcattggctgctgttccaatgttcataaactgctcttctctcttattaaaattcatctatgccagattaatttctccgctgatactcttaatattttttatccgttacttttaaaaatagcctgcttttattttagtttggacaaaaggcacacagtctccacatggcacgacaggtccggattgatgtcggtcatctggaacctgtcccatctaatatggcatgtaccaaaatatctccgtttgtttgcggaaaaagttcaactttttccaaagaacaggtcaacggctatttttaggcccaactgatggcctggtttccatgcactcgaccttattatgctggaaaattgggattaaaacagaaaagcaattctactatttcttcgcattttcttccaattccagcatatacttatcaaagtcggacataaacagcctgtcctgaataacacgatatttttcaaattcagtctcagctttcgccttggcaatctctgctgtgatcttgcctgcatcccaaagaacctctctgtcatctgccatcaggaacagatccagacgctttgcccagtcctccattgtcatcggaatatgacgttccgcacgatcctctgccaaatccagataagcagatacaatacgctccagtgaacgcatttcctgcttactcaaataattcttcgcaacgctcacatcactttttacgatcttaccttccggcgctgctgcccaagtggttaatcccatatgtggtttctctgcatctgcacgctcgtaaattaactccgttgctgtatgtccatgaaccgcataatgcatcttgttttggacctttgcaaaaaactgctttgttgtttttgctgttcgatcataa

SEQ ID NO: 4177 - DNA, 3771 bp, Unknown
  16S sequences of unknown bacteria
ttaaggttatttttgcgacaaaagcccctatattttagccttttatcgcaaaaattctattaattcagagtatcctatacatccacatacaaaacatcccaaatttgttcaaaaaataaccttgccttttgcgcgattttgtattattatatatcataggcattactgcagccgaaaaaagacgcggtatgcctttattttgaatacaagaatggaaatataatgcatattgatcttaaaaatatcgtaacatcgctcacactcggcatagacgtcggctcgactaccgcaaagctggctctgctccgcgcgggagatgtcatctgcgaaacctacgaaagacacttctcatgcatccgcgagactgtcgtgaaaatgctcgagagcgtgagagggcttgcgggaaacgaaaagctcaccgccgcagtttcgggttctgccggaatgggacttgcagagggcgcggagataccgttcgtgcaggaggtgtgggcgacgggcgaggtcgtaaaaaatgccgctcccgacactaatcttgtaatagagctgggcggagaggacgcgaaaataatattcttcgacggcgctatcgacgagagaatgaacggaacctgcgccggcggtacgggagccttcattgaccagatggcgacgctgctcgacgtgacccccgatgagcttgacgagctgtcgcttaagcataacaaaatctaccccatagcgtcccgctgcggcgttttcgcaaagtccgacgttcagccgcttctcaatcagggagcagcaaaggaggacgtagccgcgtctatttatcaggcggtagtgaaccagaccattgccggacttgcgcagggcagaaagatagagggcaaggtaatgttcctcggcggacctctgtactataacaagggactgcgcgagagatttgtcgaaaccttaaagctcacgccggagaatgcgattttccccgaatacgcaagaaacgccgtgtcgattggcgcagcgatttacgcctccaccctcggaaaaaccaacacatacaccatagacgagctgatttccctcatcaaaaacgcgaagatcgccgcaacctcaacccgtctcccaccgctgtttaaggacgaggctgactaccgcgaatttgccgaaagacacgcgaaggctgacgtggacgtatcaaacctcgagggctacagcggacgggcgtacctcggaatcgactgcggaagcactaccacaaagctcgcgctgataggcgaagactcgcagatactctatacatactacgactccaaccgcggcaaccccgtagaaatagtacgcgccgagcttgcggagatatacaaggagtgcggcgacagagttcacatatgcggctccgctgtcacaggctacggggaagagcttattcaggcggctttcggcgtggacgacggcattgtagaaaccgtagcgcactataccgccgcgaagttctttaagccggacgtggacttcatccttgacataggcgggcaggacataaagtgcttcaagataaaaaacggcgcgatagataaaataatgctaaacgaagcttgctcgtccggatgcggctcgttcatcgaaaccttcgcgagaggaatgcacatggaagccgaggaattctcgaagaaagcactgttcgccgaacatcccgtgaacctcggaagccgatgcaccgttttcatgaactcgcaggtcaagcagtcgcagaaggacggagcaaccgttgcggatatctcagccggactttcggtaagcgtagtaaagaacgccatttataaggtaatccgcgcgcactcccccgatgagcttggcaggaatatcgtggttcagggcggcaccttcctcaacgacgctgtgctgagagcatttgagcgcgaaatcggcgaaaacgtcaccagacccgcgattgcaggacttatgggagcatacggcgcggctttgtgggcaaaggagagggcgaagaagcgcgactatatctcgtctgttatctcccggagcgacctcggggtattcaagcatacctcaaaaaccgcaaactgcaagggatgcacgaataactgcctgctcaccgtgaacttcttccccggaaaaaacggcgaggtgcgcaaatatatctccggcaataagtgcgataagggcgcgggtaagataagccatgaagagggcgtgccgaacctttacgaatacaagcggaactacctcctctccctttgtcacgagaaaatagagggcggaagccgacgcggtgtcataggaatgccgctcaccctcggaatgtacgagcttctccccatgtggacggcagtgttctcgtctctcggctttgaggtggtgtcctcgggaatgtcgtctaaggcgatttacgaaaaaggacagttcaccatcccctcggataccgcctgctaccccgcgaagataatgcacggacatatagaaaagctgtgcgagatgggctgcgatacgatattctaccccagactgacgtggaacctcgacgagaagttctataatatgccgagcggagataaccactataactgccccgtcgtcgcgtactacagcgagctgctccgcggaaatatggacgtgctgaaagaaagacgcttcctctacccgtacctctccgtgaataacgaaaaggagcttgccgacggactttataaggagctgaagcagtattaccccgatatcaaaaaatcggaagtaaaagcggcggcaagggcaggctttgaagctctcgataaatataccgctctcgtccgtgcggaaggcgaaaaagccataaaatacgcaagggacaacgaaaagcccatcatgattttagcgggaagaccgtaccactgcgacgcggagataagccacggcatagataagctcgcgctctccctcggattcgtagtagtctcggaggattcggtggcacaccttgccaaaactccggaagtacacgtcctgaatcagtggacatatcattccagactgtatcgcgcggcatcattcgcggcagaaaaccccgatgttcagctcgtccagcttgtctccttcggctgcggagtcgacgcgataaccacggacgaagtgagacgaatcctcgagctgaagggcaaatactatacgcaaatcaaaatagacgaaatagccaacctcggcgcggtaaaaataagactccgcagccttaaagccgtgatataaaccgtttgttcttcaaggaagaaagagcgaagccattttcttttccttagacgactttattcctgcgtgagacttgatttgaagcaattgcacagtatttcaaccttggcttaaagctaaagttcagctgcaatggctggataggacacggtatacgtcagctgtagacggagcttgaacctcgtgcttttatgcttgaaccaaaagggaagtctgccgcgagggcgcggagcagtagagaatcatgctgtcgcacctgcgcggttagataaacgaaatcgtaaatcagttggcgcagccttcctgaaacttaggaattcagtcaacctgtggttcggtaagccgtagcttagttaagacatgaagctaaacgaaatcacaagttcgctttccgtcagcggaaaaacaagcgacaatccgcggttagcctactccaattcagttataatttggtattctcgactatgcgcggtggagtataaccgatttcaacaaaactacccgcgtctacctctcccgcgcgaacattctaatgccactactaaggcttatgcg

SEQ ID NO: 4178 - DNA, 1739 bp, Unknown
  16S sequences of unknown bacteria
gatgaggcgtttttcttccgggtcatcaagggagccttcctgctgcggcgaaaaaccctgtccaattccctgtccgctgccctgccggggagggacaagaccgccattgccgacgccatcgccgcctgcctgctgcactgcatcttccacggcttcacgaaggcgctcgccttctgcatggccggtaacatccagcacatctaccacacccgcgacctgaacaagatcaagggcgtcgtcgagatcgctcccgtcacggcagcgctcaccatcatcgccctgctcgcgctcgccgccttcccgccgttcgccctgttcatctccgagttcctcaccttcgtggccggcgttcagtccggtcccatctgggtggtcgtgctcgtggccatcggcctcaccggcgtgtacttcgcccttaccggcatcgcgctcaagtccatcttcggcaaggcgcccgagggcatgaagcgccacgaggtgcccgccctcatgatcatccccgagatcgccctcgcgatcgtggtcatgtggttcggtatcgccaccccggtcgccatcacgagcggcgtcgaggatgcaacgtccgtcgttttgaaccagagcgtcgaagagctccacgaggctcctctctaccgcatggtgttcagttcccagaccaagacaagcgaggtgaattagcaccatggcagaacctgaaaagaaggactacgctcgtcgttgcgaaagccacgtcgaggccctgcgcgccgcagtgccgggcgctatcgagaaggttgagtggcagtgcgaggaccagctgacgatcaccgtcaagcaggacaagctgcccgaggccgtccactacctgtactacgagcgctacggctggattcccgtgattgtcggcaacgacgagcgctccctgtgcggccgttacgccgtgtactacgtcatctccatggagggggaggaccccggctgggttaccgtgcgtgccgaggtcgaccccgccaagatgacgttcccgtccgtgacgccgttcgttcccgcctgcgtgtggggcgagcgcgagctgcgcgatatgttcggcctgatccccgagggcctgcccgatcgtcgtcgcctggtgctgcccgacgattggcccagtgggctgtacccgctgcgcaaggactccatggactaccgcttccgtcccgctcccgcgagcgacatggaaaactacgagttcttggctgacaccaagggcaaagagaccacacttgtccccatgggcccgctgcacattacctccgacgagcccggccacttccgcctgttcgtcgagggcgagacgatcgtcgacgccgactaccgtctgttctacgtgcaccgcggcatggagaaggtcgccgagacgcgcctgaactatgacgccgtgacgttcctcgccgaccgtatctgcggcatttgcggctgcgcccactcggtggcctacgccgaggccgtcgagcgcgcccagggcattcatgtcccgccgcgcgcccagtacatccgtgccatcatgctcgaggtcgagcgtctgcactcgcatctgctcaacattggcctggcgtcgcactacacgggcttcgactccggcttccagcagttcttccgcgtccgcgagaagtccatggacctggccgagaagctttccggtcaccgcaagacctacggcctcaacgtgatcggcggtgtgcgtcgcgacattttggccgagcagaagctttctacgctca

SEQ ID NO: 4179 - DNA, 2917 bp, Unknown
  16S sequences of unknown bacteria
tcgatgttgtggaacttgccctcatggcagaacgcgtgaatgcgggtcggcatgccgaaaatccactgccagagatcgagctggtgcgggcactggttcatgaggacgccgccgccctcgccgtcccaggtagctctccattcgccggagtcgtagtaggactgggtgcggtaccagtcggtgatgatccagacgcatctgatgaggtttccgagctctccgccctgaaccatctcgcgcatcttctgatacatcgggttggtgcgctggttgaacatcataccgaacgccttgccggacttcttcgccgcctccatcatctcctcgacctgcttcgtgtagacgccggcgggcttctcggagatgacgttcacgccgtagttaaagcagtcgatggcgatcggcggatggaagtagtgcggggtcgcgatctcgacagcgtcgacgagccccgacttcagcatatcgatgtggttgtcaaaaagagccactccgggatatttctcctttgccgcctcgagcttcttcgggtttatatcacagatggcggtgagctcggcgttcttcaccttgcctccggcgagggtggcgcagtgaccggagcccatattgccgaagccgattatgccgtatctgactttttccataattcaaaattcctttctgcgcggaattacaccgcgttcattcaacaccaatattatacaccacccgagcgtatttttcaagatgtttttcaacatttcttgtaaagaaaatatagttttctgcccagcggctccggcgcgcgtgtttgtctattctatatattgacaaaaagcgaattttgtgatataatgtattattgtaaataaaccccggggctgttttccgccggaaaccggctgtccggagaaaggactgaaattcaattgaaaaaaatagattgccatacccacataatctcaaaggaagtccgcgacgagtatttcgcgaagactgacaattacgccatcgtgatgcagttcccggacagcataatgaagaacccggagtgcgtggagactgtccggagtgatccgcgcctctttctctgtccggcggtcgacatgaaggctcccgcggacagtcaggtaaaagctctccgcgccatgatcgcggatccggagaacaagatcgtcggactcaagatatacacgagctatcagcgcggcgccgccgacgacgagaagctcttcccgatttacgatttctgcgccgaagagcgcctctcggtgaccttccacaccgggatatgctcgctcgtcctgccgtcggatcaggacctcgagggctccggagcgaaccatatcgcgaaggcggcggaaaagttcccgaccgtcaacttcatcgccgcccacatggacgacccgtactatgagaggtgcactgagataatggcgacgcacgacaatgtctggtccgacttctgcggaatatatgagaccggcgcgaaggagtgcgaggacatcgacggcacaatcgggatattcagaaaggcgatagccgcgaatcccggctgcatccgccgcatgatgtacggaacagatttctgcccgccgataaacctttcgcagatcgaagagtacgactattccatcgaaaagctcttcgacagtgaggatttcgacgatatctacttcgggaacgcgattcgcgctttcccgaggcttgcggattacataaaactataaaggagaatcaatgaaaaagagtttttcagagcacgcgcggaattttctgcgctcattcaccccataccagataatttaccttgtttcggtcttcaccctgacggcggtgttcgtcatattcttccctgacctgatgctcgacgacgtgtcgagtaccttcgtcgtcgtttgttcggtcatcgcggtgctggcgaacccggtctgcgagctgctgatctcgaaacagtcgagactcaattttctcgtcgacatattcttcatcgagctgccggagttcgtcatctgtgtggcgctcgggtggtactcgatcgcgataatcacgctcgtcttctggatcccgatagacattgtgagctacctcaaatggaagcacaacccggacgaggagcacgaggagatgacggtcgtcaagcgcctgaagccgtggcaggacattcttgtcgtcctcgctatagcggcgttcacgctgattgtcggtacgcttatacagtacatccccggcgccgcggattcctacctcgacgccatctccgcggcgtgcggcatggctaacggcatactgcttctctgccgctataccgagcagtggtacgcgtggttcgctacgcttgtcatgtatacgatactttacacggtgtccggcagctacataatgctgatcaccgtcgcggcaatgttcgtgaacacctgctacggattcacgaagtgggtcatctacacgaagaagcatcccgaggcaatcgctaaaaactaagaaaacactgattcaaggttgttttggcaataaaaagcccataaatccaagactttttattgccaaaacccgatttattcagtgtgttcctaacaaaagaccgccagcctgaaatatggctgacggtttttgttatcagagcgcggatttgtcgattttcagactttgcctttcaaaataaaatagtagacgcaagtctgatgtttcagacttgacttaatgaaatcgtgtttcaataagtcaggttgagttgttattattatggcggtgcatataattatacctccgtcgctccatattgtatcttgtccggcagaacgctggtgatacgcgtcattcgcgaaaaaaagagaagatacgagagactcatatcttctcttgtctttctgtggcagggatagttggactcgaaccaacgaaatgcaggagtcaaagtcctgtgccttaccgc

SEQ ID NO: 4180 - DNA, 32759 bp, Unknown
  16S sequences of unknown bacteria
cttgaaaagtgctattccaaatcccgcactttctcggtcaaatatattgtatcaggaggaaacgttggaaagcctgttgggcgaacaggcgcaggacgtcgatcttgccgaagtcgtgggggaaggcgtcccgctcgccctgtccgtcgaaataacgacgggcgacgcaatcgcttcgtttaccgacgccgacgcaaaggcgtccgtcaaccgcgtcctggagggaaacgtcgattccctcgtcgatcagctcgtccctgcgctgaacggaatcgcggaaaaatttgttcgcacggcggccaagagcggcgtaaaagacgcggtgacggagcaggtaaaaaattttctcaagcaaaacgatcccgacgtcacggacgagcgcgtcgcggcgcttttggagaaagcgggctttaccgacgcatacatagccgaacagacggacaaaattttcgacgcggtgtatgaggacggcgccaccgttgacagcgtaagccaaaaagcggccgatacggtggaagaagtgttcaaaaagctcgaggaaagcggagaaagcgaatttgcgggcgccgccctctccgaagaaaacaaagcagagatcaaaaccaccttttccgacgccttaaccgcggtcgcgggcgaggacggaacgctcgacgcagaaaatctcgtcagcaatcttctccttcagtttttgcgcgtttccgaatcggaaaaagacgcctcccgttccgcggggacgcttttgtcggcaaaggcagccgcttcggaggattccgcagccgcggaggacgccgcggcggagcttaaagccgagataaagagcgcgctcatggaaaaaatctccgacgatacggcggacaaaatcgtgctcgctctccgcatcgcgtgcggcgtgctctgtttcgtctgctttacttgggcgtggctcattttgaagatactcgtcaagctgttttcccgaaaccccgcaatcaagctcaagcttcccatctggctgggatggctcccctttcttctgttggtactgctgcccttaggcgccgtaaggctgatcgggtcgggggcaatcggcggggaagcattttccgccctgcgggcctttctttccgactcaagcctttccttttcctcttcgggttgggtcgcctttgccgcggccgtcgctttaatcgtcatttccataccttacggcatattgaggcgcaggctcgcacgcggaaaaagagaacgcgacgacgaatgatttttgcaggcatatattagggcgacggatgctcgttgcgacatatgcgggtaagccgatcattttccgcacaaggatcgtttcttaaataacggccgtttcccacacagcgcacctttcccactcagcaatagttccaaataacaataatttcccattcagcgcaacggcgcggcccttttaggccgcgccgctatctttataagcaaataaattttttcagcaataaaattccgatttcgtatcccgcgcaaagagttttgccagcagactttcgcaccgcgtgcggcagtcctcgccctccttcgcttccccgtaacagaggtcatagacggcgcaggtgatcggcagatcgacgccgtacttttccccaagctttttcatagccgcggcggtaggcacgccctcggccagcttttcaaattttttatccttcaccagcatttcgccgtacatgcggttgtgcgaatattcgctgaacagcgtggcctcgtaatcgccgagatgcgcaaggccgtaagcggacaattcgtttccgcccatcgccttgatcaggcgcgccacctcgcgcgcgccgcgcgacatcagcgaccccttgagggacgcatagccgcagccgtccagcacgcccgcgacgatccccatcacgtttttggccgccgcgccgatctccgtgccgatgagatcttcgccgtaataaaagcggataagctcgctcttgaaattgtccgccagccgctttttcagcgtttccgacgcggaatcgatcaccatacagttgggtatcccctgcgtaaaggcctgaatgtgcccggggccgacccatacggcgatatgctcgggcgaaatccccgccccgacgagcacctgagaaagcctgtctcccgtggcgacctctatgcccttcatacacagcacgaaatcctttcccgaaacgtcgtaggcgaggatacgctccacaaacccgcgaagcccctgcgaagaaatagagataacgatgatctcggcgcgggtaacggcctcctcgaggtcgcaggtcaggcggatacgcttgtccagcgtgacgtattcgtttttgcccgtcgtgcgcagcacttcgtacgaatagtctccctccggcccccacgagcagacgtcgtaccccttgttgcacagataccacgcgataaacgaaccccatcttccgcagcccaatacggatattttcatcttttttccctcctttttcaaagcgcgttgcgctcgacaaacgcccgcgtcagcgtaacgtcgtctgtatattctatctccgaccccacgggtatgccgtgcgccagcctcgtcacggtcacgccgagcggcttgatcagccgcgcaagatacatggcggtggcgtctcccgacacgtcgggattagtcgccacgatcacttcctttacctccccttccccaatccgcgccaaaagctccttgatgcggatatcgttggggccgacgccctccatgggatcgatgacgccgtggagaacgtgataaacgcccttaaactcgtgcagcttttcgatcgccgccacgtccttgggttcctttacgacgcagataatgcctttatcccgcgtgcggcacacctcgcacacgtcctcttccgtaaaattgccgcacactttgcagtatctcaccttccgcttgacgtttacaatcgcgtcggcgaaagcccgcgcgtccgattcgctcatgttgatgatccgatacgcataccgctgcgccgtcttttttcccaccccgggcagcttcgaaaactcgttgatcaaccgcccgatgggctcgataaaaatgtccatccgttaaatcatgcctccgagggaacccatatttccgtatttccccattttttcttcatagaccttatccgccttcgagtagccgtcgttgatggccgccataatgaggtcctccagcatttccacgtccgtcggatcgacgaagctctcgtccagctcgatgccgttgatgatctttttcgcgttcatatacaccaccacggcctcgcccgccgccgagccgacgatttcccaatcgtccagcatctccgcggtcttttccatctcctcctgcatcttctgcgcctggcgcatcagattctgcatattgccaccgttgcctttgaatgcggccatatttttttcgtcctccgttttgtcttattttaagaacggcgcgccgttcatttgatatcgattttcacgtcgggaaacttttccttcaattcgcttaagctcctgttgaactcgtcccctttcttacccctgagacgcacctcgaagtctgcgatcccgatcgcctcgagcgcctgtttgatcagcgaataatggtcctccttggtcagcgagcggtaaatggtttcgctctccgtatagagcacgaaagccgacccctcgtaggcgctgtcgagatccatgcagatggtaaacagaacgccgttcctccccaccttccgaagcgcccgcaaaaagcttccgaaggtcgctttggcgtccccgggcacggccgaagcgcgtaccgtgggcttttcgggcgcggaaacaggggcttttgcgggcgtcgccgcacgcgcggggactacggggtcttcacggggcgtttccgcggcccggcgcggagaacggacggtcggggctttacgctccgacgtatctttaagctcaaacgcggagtcgaaatagacgtttccgcccgtcgcctcctcgtcgggagggggaacctcgtcgaacgcgggcggctcgtaatcatcatacgcctccgcttctctttttgtgctttcgctcgggtgcgccgcaggcttttcagccttcgtcgtctcacccctgacccgctcttccgcgatttccgcccctgcgacgtccttctcggccgcaccgtccgcagccgaagccttcggcgcggaaaacgcgccctcgtccaacctccgctccagctcgttcacgcgggcgatcaacgaatctatgttgtaatccgcctgaggcaggctcgccttcatgacggccgtctcgaagacgatacgcggggaaacggaatatctcagagcgttttcggtatcggcaaaaatctccgtcacgcggagcagacgatgcccgtccgcggcttcagcggtttccgccagctgagaaaaggtatcggcgggcagggcgagtatcttttccgcgtcgcggcaggttttggccaccgcgcaggcgttgagaaagttcatcacgtctttcaaaagcacgcccacgcttttgccctcggccaaaatttcctccgtccgttccagcgcctcgccgctttccccgttcagcatcgccgcgcacagcgcgcgcatctgcgaaaaatccgcgctgccgagcaccgccgtcaccgcctcgtaggtaagccttcccgcgctgtacgacacgcaggtatccgccacggacagcatatccctgacgctccccgcgcccgcccgcgcgatggccgccacagcctcgtcgtcgtagggcttgccgattttatcgaggatcgccttcagccgcagttcgaggtcggcttgcggaataagcttgaaatcaaaccgcatacagcgcgagagaatggtcgcggggattttctgcgcctcggtcgtcgccagaataaagacggcgtgcgcgggcggctcctccaaagtcttgagcagggcgttaaacgcccccgtggaaagcatgtgcacctcgtccacgatatacaccttgtatttgcccgcgacgggcggatactgaaccttttcccgcagatcgcgcatctcgtccacgccgttgttggaggcggcgtcgatctcggagatatcgaggttggacgggtctgccagcgcgcggcaggcggcgcattttccgcagggcgagccgttgacggggctttcgcagttgatggcggcggcgaagattttcgccacgctcgtcttgcccgtaccccgcggtccgcaaaaaagataggcgtggccgatacggcccgtctcgatctgatttttcaaaatcgtaacgatgtgttcctgccgcaccacgtcgtccagcgccgcgggacgaaacatgcggtacaatgccagatatgccatactctctcctctccctcgtaagcttttaaatcgtccaatcccccgacggccttattgcacggcgtttttatccgcccgacggcccgtataacgtcctttctattctcccaaacacccacgcgcggcgtcatttcaatacggccagcagcttttttttgctcctctgaatggcgttgtcgatgctttttccgtccttgcccgtcgcctcgcagatctccgcgcaactcaacccgtccatatacatcaccgtcgcgcggaactcaaaatcggacagtaccttgctcatcttctgcaaaaattcccgtctgtcctcgttgcggatcatttcctcctcggggctggaaacgggcagagaccattccgactgaaacagcgaaacgtaattgttgagcggcacgttcttttttctcgccgacgcctttaccgcgtcgatgatccgccgcgaaacgcagagataggcaaaatttttgaagcttaagcctccttctttttcgggacggtaatcgacgatggcgtgatacagccccaccatgccctcctgaataaggtcctccgtctctccgccgatgaggaaaaatccccgcgcgcggccgcggacggcgccggcgtacctgaccagcagttcttccgtcgcctgcttgtccccgctctgcgcggctttcaccaaaatttcgtcgctctcatattcggccgatgaatccaaggcccgtccgctttccgccccttcgagcggcgtcccgcctttttcgcccccgaccgacgttccgcgcgcctttttttctccgcttcccgccgcgtattccgcagcttcgccgctcccgtattcggacgccctttcaaacgcccccccgtgcccgttcttcatttactttttcagcctctttctcacgacctcgtacgccgcgattcccagcgcaaccgaagcgttgagggaatttacctgcccctgcaaaggaatggacagcaccttgtcgcacttttgctttgtcagccgcctcacgcccgaatcctcgccgcccacgaccaaagcgacgttgcccgaaaagtcctccgcgtagatttcctcgccgcccgcttccagggcatatacccaatacccgttttttttcagcgtctcgacggcgtttccgaggttaggcaccttggccaccttgacgtgctccgccgcgcccgccgaaatgcggaccacgctttccgtcacgacggcgcttcccgctttcggaatcaccacgccgtccgcgcccgcgcactccgccacgcgcaggatactgccgaggttatgtacgtcctctatgccgtcgcacaggacgataaagcctcccgccgcgctctttttcgccgcgataatgtcctccagctcgaaatattcataatcggtcgtataggcgatcacgccctgatgcctgcgggtttcgctttccttgtccagcaccgcgcggtcggcaaactgcacgcggatattccgtttcctcgcctccgcgaaaatgacggacagggagccttgcgcccccttttccattaaaatcttatcgatgtttttgtccgttttcaaaagctccgctacggcgtttcttccttctgttttcatttacggcttatatccttcgctcacggcgttgattttgtaagaggcctctccgtccaaggcgagaagctccgagatcctctgcacgtcgcccgacagatacaaaaagcccagcaccgcttcaaatcccgtggaacggttgtattccgccaccgaggcgtttttgctcttcgtagcctttttggcgttgcggccgcggcggaacacttcggtctcctcctcgttaaacacgggcagcagcttttccagaaacgcgctctgcccgtgggcggacaccactttcgacgcggcgcgttgaaaatcggccgccctgccgccccccgcaagcaccagtttctttctcacgtacagcgaatacaccgcgtcgccgacaaacgccagcaccacgggattgatcagtttggcttcctctctcggcaaactgccgaccgtttccgacacgctcttcctccgcgcttgcatatttttgcttttatgatagcataactttcgttatgtttgaataagtcgcggaaatgccgataaatacttcgtgcttacgcatttccgcttttattataacatcgcttacgcaatgtttgaataaggcgcggaaatgcctgtaaatacttcgtgcttacgcatttccgcttttattatagcataaacaagcgcaaaatacaagcgattgcgggcgatttcgcacgacttttacgttttgcgttttcgcgttctctaggtcatgcgcccgacaccgaggcgagatattccgcaagccccgcgtagatcgcctcggccaccttccgctgatagtcctccgtcactaaaagagcctcgtccgcgcggttggaaaggaagccgcattccgcaatcacggaggtgtattcggtgcatttcagcatataataatctcccgaagcggcgacgcgcggcttgacgccttgctcggcgtagaggttattgaagctgtgctgaatcccctccgcaagctttttgccgctttcgctgtcctttttataaaacacctgtccgccgcgcgaggtgcgggtgggataaaaattttggtgcacggaaatcatcgcgataggctttgcctcctcgatgatctctttgcgcttttgcatgtcgcgttttttgaagccctttgtcgccgtaccgtaaagccccgcctccgtctttcgggtaagcgccacgtcgaaccccgcctcctcgagaatggttttaagcttcatcgtgacagacagattgaggtcgctttccttcactcccgtttcgcggcccacgacgccgccgtcgattccgccatgtcccgcgtcaaggacgatgcacatcggccgcgtaacggcaaatacgggcacggagagagcgtttacgcacataacccacgccgtgacgaatacgcagcccacggcgataaataataagacagcctttttcatacggttattatatgactttttcgcgccttctatgaaacaagcgctgcgaaagggcaaaaaatcctttcgcagcagcaaaaccgtaaaaatttcctttgccgtttccccgttattaatccgtaaaaacttttcaaccgattgaatccgcggaagtccttgacaaaaacggaaaatagggataaaatagaactatattgtcatcataagctttcaaaaatccatagaaagagtgaggaaaccgttatgaaaaagtcgaaaatccttatccttttgtcgttggcggcgatcgcggcggggtgcgcgctcgcctttgcaggctgtaagcccgactccgaccacggtctcagtcacactccttcccgatggataacggataccgaggccacctgcacggaggcgggaagcaagcacagggaatgcaccgtctgcggcgaactcctcgagcaaaaagtcgtttctccgaaaggacataattttgtcggaaacgtctgttcggtctgcggcgtaaccgcaagcgaagggctcgcctacaagttatcctccgacggctgcggatattcggttgtcgggataggctcctgcacggataaagacgtggttatcccctcttcccatcaaaatttgcccgtaacggaaatcggcaaagatgcgttcagccactgcggcataataagcgttgccctgcccgccggcgtcacctctatcggtttttgtgcgttctctgcctgcttcagtctgacaagcatttctattcccgaaggcttgatttccatcgacggcgctgcttttgcaggctgtagcggtctgacgagcgtttcccttcccgacggcttgacttctatcggccaatcaactttctacgagtgcaaaggcttgacaagcctttcccttcccgaaagcttggtttctatcggcggctctgctttcagcggctgcaacagtctgacaagtatttctattcccgagggcgtaacatctctcggtcaatcaactttctacgactgcaaaagcctgacgagcgtttcccttcccgaaggcttgatttccatcggcgattgggtttttcatggctgtgacaatttagcaaacatttcctttccggacagcttgacttctatcggacagggggctttcgaatactgcttcagtctgacgagcctttctcttcccgacggcttgacttctatcggttatggtgcgttttcaggctgtggccgcctgacaagtatttctattcccgacggcgtaacttctctcgactgcacttttaatggttgctctagtctgacggatatttccattcccgacagtgtgacatctatcggtccccatgctttcagtcgttgcaaaaaattgaagaatatctctattcccgacagtgtgacctctatcggtttttgtgcgttctctgcctgcttcagtctgacaagcatttctattcccgacagcataacctctatcgactcctttgctttcagcgactgcacaagtttgacgagcattaccctttccgacaacgtaacctttatcggccaccattctttttcatcctgcacaagcctgacaagtattatccttcccgacaaagtcgtcgctatcatctttgaagctttccgcggatgtagcggtctgacgagcattatccttcccgaaagcttggtttctatcggcgatcgggctttcgatggctgttccgccctgacaagcgtatattataaaggcacaaaagcggaatgggacgaaatttctatcggttcaacaaacgaggctttacaaagcgcgacgatatattattacagcgaaactaagccgccgctcaacggcgacggcacggcttacgacggaaattattggcgctatgccgccgacggagtaacgcccgttatctggaaaaagcagaccgccgcttaatctctttcgcgggctattttcccggcacgccgtccaacagctttttatcgttcaaaacggacatctgttccgccttgggcttttccgatttttccgatttttccgatttttcggatttttcggatttttcggatttttccgttttaccccgttcggcagcgttaaagggcgtcccttcggaggctttggccgcgggcttttcggaaattgtctgcgtcgaagccgccgttattgcgggcgtcgccggcgcgggcgaggaaacgagcgaagccacggtgagcggttcggcaaaattgacggcaaaggacagattttccgcctccttcatgagctccgcatagatttcctctgcgtgggaggtaccgatccgttccgcgcccgcggtgatcagggtcttataatcggccgccgtctccacgcccgtcacctccagcatacagctgtcgtgcaggtcgcgtttcagcctgccgcagtcagggaaaaattctacggtgagaaattttgcgccgcagtccgccgccatttttcccagccgcagaatctccgcataagtcagcgttttgtccgccgcgaccttgacgacggccttccgcgcggcacggcagacgcgcttgatttcgcgtttcgtatcccccgtccgcccgctctttatggccgaataacaaaggatcagcgtaatttctttcgcgccgctcctgacggcaagcttggcctcgtagcccttggccttgacgagggtttcccccgtgccgcccacgaggcaatcgataaatacgccgctcgttcccagcaaatttttcatcgcgggcacgtgaacgggattgacgcggaccgccgcggatttaacccgtttcgcgctgtccgcgatttttttgagatcgccgatccccatatcccgctccgccgcataaagttccgacttggcgagctccgccgcaacctccgcgatacgcttctggcgtttgaattcgcaatattcctccgcttcgttcggagagagcactatgcccgatttcgttttgttttcgctttccatgcctaaagtatgcggcaaaaaacggaaatatattccaaaaacaggcattttatgacagtacgcggaaggtataatgaaagcatgaaaaattgtcttctcagcgcggctgcaagcggcgcattttggttaatacttctgttcgtcgtcagttttcttgccgtccataccgtacggctggccaaaatcggctggaattatcaaaaacgtcacgtcacccctcccgaaaagtcgtctgcggagaaacgcggctcggagcccgcgcgccgcgacccgcccgcgaaggagacctccgaagcgcccgcggcggaaaagcctcccgaacccgtctattatatcgtggagcgcaaaaaacgccgtcctcgggaaacctattccccgccgaaagaaatcaaattcaaataagcaacccccgcctttgccgtcaacggcaaaggcggggaattacgaaattgtttcttttgccgcgtttgtctgtcgcttccgtcctctatccgtccgcacacaaacctcgctatattttcgggaggccgcaaaatgcgcgttacttttcctcgggcgcggcctcctcgtacttttcgagattgccgccgtcctcccacagccgttcgaggtgataaaagagcctcgtctcgtcgttgaagatatgcacgataacgtcgccgtagtcgatcacggcccaacgcccgtcgtggacgccctccgtacgggtcggctgaacggcgtacgccttttcgatttcctcctcgacgtgttctcccagcgcgcggatctgcgtggagctggagccgctggccagcacgaaatagtcgcaaagcacggttttgtcgcgcacgtaaatggtcacgatatccctcccccgcctgtccgcgagcgccttgcaggccgccaaagccaattccttactgctgatttcagacattgtttgtcctcctttcggttttatttcggatttccttttcgataaattcataggccttccgcgtcagcggatacgcctctttgccctcgtccgcgagatagttcagcatatgggacaatgccagatataagcactcgtcgaggctgtccttgtctttccaaaacgcggcgcgaagctcctccgccccctcgaaatcgcgcccgctctcgagcatatcggcaagaaaaataagctttcccagcaaggacatgttttctctgccgctggtatgataacggatcgcgtcgaggatttccccgtcgcttatcccgaaagcatgctccgcgacgtaagcgcccgcgtattggtggacaacggcggcaggcacgcccgacggaggcgtaaagccctcgagacgaggcgaatcggacgggagatttttcgcgcagtcgtgaaagagcgcggccgtaagcgcccgtttttcgtctatcttcaggcccgccgcccgctccgccgccaaaaccgccacgcggacgctgtgggcgcggcgggagggcttttcgaggtcaagcgcctctttcgcatggggaattttatataacccgttatccgcaacgtatgccgcgacccgcttccctgcaaacgaggaaatatcctcccccgccgccgccagcgccctgatcctcgtcgaggaaacgtccccgccgcggtaggcgatcacctcgaaccgcgcgcaaaacctcgcgtaaaactcctccgcttccttttccggcagggcgacgggctcgttcctcgcgcagacggccagcgtcgccagggataaaatctcctcgggatttttccaggagggaaaatcgcgcagcatgtccgtgcccaccagccaatacagcttcgcctcgggatacagctttcggaaatgccggcaggtaagataggtaaaactcgtcccgcccgcgcgcatttcatagtcgctcacctgcgtttttttgcagccttcaaacgcaaggcggcacatttccagacggtcgccgtcggaggacagagccttgtccgttttgtgcggcggcgtgtgcgcgggcataatcagcagcgcgtctagggccagactttccacggccgcctccgcgaggcgcacgtgttctatgtgaacgggatcaaacgacccgccgaaaattcctattctcatatttacattatactacatatttatttatttttcaagtttagaaagaaaaatttccgtcaaaaataaagacatgaaaaaatccgcttttatctccgacatattattttccttcgcggtgacttttctgcccgccctctgcctgctgcgctatctgcgtctccccctctcggcctcgctgctgttcgccgcggtcgcgggattgctcgtctccctgcccgtgtggttctttctcgacaaaaagcgggaaaagctgtgccttaaaaaacaggacgaggaggccaaggaaaagctgcttttacatcttgcgctttccacgcagaaacagaacgccgaatattttgccggatacttttcctcgaaagcaaagcgcgaagcggaaaaagcctcctcggaagaagctcccgtacgggcggagcccgtaaaagtgcggacgtgcgcgggcttttatgcgatagagacggcggaggagctgtgttttcccctctttacggtgcgtcccgcgaacggggacgaagcggcggcgatcgtgcgggcgaaatcggataagcaaaagcgcctgctctgcggcgagctttcgcccgaagcggaaaagctctgcgcggggttcggaatcgagacgacgacggcggcggacgcttacctgatgctgaaaaaagaaaattttctgcccgagcattacttatgcgaagacgccttcacgccccaaaagaaaaaacggctgcacctgtattttgccaaaagcaacagccgccgttttctgctggggggagtgctgatcctgctcacctccctcatcacgccctttccgctctattatctgattttcggaagcgcgctggtgctctcctcgatcttcgtgcgcatcttcggctaccgctgaacgcgccctattctctcaaggcgcggaaggccctgcccagatacgcgatctcgtccgaagcggtaagcgaatattcccccgtttccgccgcggcaaattcggcggcctttcccgcgagatacgcgcccgcgcacgcgccgtcaaacgcggacagcccgcccgcgcaaagccccgcgatgagtcccgaaagcacgtctccgcttccgcccttcgcctgccccgccgtgcccgcgacgttcaaagccgtgcgcttcccgtccgaaatcacggtcgcggcgccctttaacagcaccgtaacgccccgctttttcgcaaagtccttcggcgcgttgggcccctttgtcaaaaggtcgtccgtgctctcccccgtcaatctcgaaaattccttgaggtgcggcgtcaaaagaacgtcgcattttttgtcggcaaaaatgctttccgtctctttgccgccgtatttcgccaggctgttgagcgcgtccgcgtccaaaatcagccgtccctcatagttgcaaagaagataggccgcacccttgaaaatatcctccgaaccccccgttcccatgccgaacgcgatcgaatcgtaagtcagcagctttttgaagcccgcttcggtaaacgcaaccctgtccccgccctccatgggttcgagaagaacctcgggcaatttgagggcatacagcggaagcagattttcgggcacgcaaagggtagtgtatcccgcgccgctcctcaaagccgcggcggcggaaagataggccgcgcccgtgtattttgcgctgcccgcgacgatcgccgcgcggccgtagctccccttgtgcgagtttctctttctcggcggaagcagctccgccgtctccttttttcccgtcagaaaggcatagccgttttgcgtttcggagagcgcgggcagggcgatgccgatatccgcgcgtgcaattttccccgcgaggtcgatgccgtcgcctaaaaatacgcccgccttgtattccccgatacacaaggtctcgtccgccctgacggcgtttttcgcggcgaggccgttatttcccgaaacgcccgaagggatgtccgccgaaagcaccttcgcgcccgacgaattgataaaatccgccgcaaaggcgtttttgccctccagctctcccgaaaagcccgttccgaacaggcaatcgacgatgagggcgaaacgctttctcgggaagacggaatacacctcgccgcccagcttttcaaattcgtccctgttctttttacaatccgcggaaaacttatccgccacgcacagtgcctcgacggaaagccccttttgcataagaattctggcgcagacaaacccgtcgccgccgttgttgccgcccccgcacacgcacaaaatccccccttcggggcagagcctttccgcttcctcggccagcgccgcgcccgcccgctccatcagcagcagagagggcacctccagcgtttctatcgtaaatttgtccgcctcgcgcatctgcgcgttggtgagtacataccgcatagcttctccttcatttacggcaacgccgcaaggcggagagacacctccgccgccgtcacccgttcccttttcccgccgctttccacgatcagcccgccccgctcgtccacctccagcgcgcgcacgattctcgcctccccgttcgacaaaagggtgacggtacggttcaaaaaccccactcttcgtcggtattcccgcatgtcaaacgcttttcccgtctccgcgatcagcgtgttctccacgtcctcgcggtcaaacaaatgccccgccgcctcgctcatggaaatcgcagtattcttcaactcctcgggcagggaattgttgacgtttacgccgatcccaaccaccgacgaggaaatcctatcccccgaaaaaacgttttcgatgagaattccgcaaatctttttcccctgcacatatacgtcgttcggccacttgatttccgccgtaaggccgtagttttccaacgtcctgcacaccgcgacggaggcgttcgccataatcctgaacgcttccgttacgggcatcttcagccaaaagaacagccgcgagagatagacgcccccttctcgggaagcgaagcttctgcccttggtgcccttgccgcccgtctgtcggcgcgccgtaaccacgaggttctccccctccttcagccgcgctttcgcgtaaatgttcgtcgaatccgtctcttccagccgtataatccgcatgtcttcttcctctttcgtccgttttccgtctgtcctttccccgcttttccttcgccgtacctttcgcccgactccgttcttcccgttttattcctcgtccgtctccccgaagtccgaaagcgcgtttttcgccgtctcgtactcaaaccccttgccgatcaaatagcggaacgccttatacagcgtctgtttgtcgcatggctttccccgcatatatttttcaagcagtcttttcgccgtttcctcctcgccctcgagattttctaccgcggcttcgatatgctcgtccgctacgcccctgcttttcagctccatgcggatcagccgcacgcccttgcgcttgacggccgaccccgcgtagctttccgcgtacgcgccgtcgtcgagaaagccgtattcccgcatttttttcaacacgtactcggatacggcgggcaggtatccctttttggagaggtattccccgatttgtttttcggttttctgcgaagcggaaatatgggtaagcgccttgtccagcgcggtggccttttcgctctccagctgaatttccgaaagccgcgcggggtcgatcgtctgtcccgccttcagtcggtttttcaccgccgcctccagcgtcaggccgcagtaaaagcgtccgtctataaaaatattgcaccgcgttttgtccttgacctgcggcgtaatcgccgtgatttcgctcaaaaaaagcctccttaagcgcgaagccgcgcccgtttccgccccgtggggtataaaaatattgtaacattattataagtaaaagtcaaccccgattatacgcgaaaagtttgacttcccgtaaaaagggggctataataaacgggaaaatcaaattttaaggagttcgtctctatggaatccaaccttctcgattggaaaaatctccccttcgcctatacaaaaacccctctccgtttcgtctcccgctttcgcggcggggtctgggaggaaggcagccttaccgaggacgcctcgatcgtgctcaacgaaagcgcgggcgttctgcaatattcccaatcctgcttcgagggactgaaggcatacgaaacaaaagacgggcgtatcgtctgcttccgtcccgacctcaacgcagcgcgcatggcgcagtcggccgcgcagctggagatgcccgtgtatcccgaggaaaaatttttggaagcggtaaaggcgacggtccttgcaaatcgggcgttcgttccgccctacggcagcggcgcggcgctctatctgcggccgtttatgtttgccgcgggcagcgtgttgggcgtaaagcccgccgacgaatacgagttccgcattttcgcctcccccgtcggcccctatttcaagagcggcgtaaagccgctttccctgcgggtttcggatttcgaccgcgcggcgccccgcggcacgggacacgtcaaggcgggcttaaattacgccatgagtctgcacgcaaacgtgctcgcgcacgcagggggcttcgacgaaaatttgtatctcgacgccgccacgcgcacgtttgtggaggagacgggcggcgccaacctcgtctttatcacaaaagacggaaaattcgtcacgccgtcctctcccaccattctgccctcgatcacccgccgttcgctcgcctacgtcgccgggcgttgtctcggcatgccagtcgaggagagacgggtaccgtttgacgaggtagcgtcctttgcggaatgcggactgtgcggcacggcggccgtcctctctcccgtgggcaaaatcagcggcgcgggaaaagaaatctccttcgcctcgggctggcaagaggatagcgtactgacgaagctgcgcgagacgctgacggggattcagacaggcgagagggaagcgcccgcgggctggattttcgaaatcggataacatgtatcgaaaagcccaccccttcgaaaagtttcaccatcttcataatgctccaccccttcataaagtcccactccctttatagcgcccaccgcctcgaaaaatcccgtcccctttccgccatttaattccacgggacaaaatctgtcgaaaaaaggaaaattcgtttacttttcaaaaaaattgtgctacaatatacaaggctgaaaagccgaacggatttttcaaggagcttaccgatgaaaaagaaattttatacggtggatttcgaaggatttaaggcggagttgcccgtgctgcccctgccgagcggcgtatcgatcgcctttttcaatctgcacggcgacagcgcgctcaccgagcactgcgccaaacttttggcggaaaaactgaaggactgtgaagtgctgctcacggccgaatccaagggcttgcagctggcgcactgtatcgcgcgcaatctgggccagagatattacgccgtggcgagaaaaagcaaaaagctctatatgcaggacgggatcgaggtggcgatcgaatcctccatcacgacgggcaaggagcaaaagctttatctttccaggcacgacgtagagcttttacgcggcaaaaaagtaggcattgtcgatgacgtggtatcgacgggcgcgtcgctttcggggctggaggccctcgtcgaaaaggcgggcgggcgtatcgcaaaaaaggccttcgtattggccgaaggcgaagccgccgaccgtcccgacgtggtatatctcaataaaatccccgtattttcctgactattgtctgcggaaactatttttccataaagtccgcccccttaaaagccgaacgaggcaagcatgtctcgcccggctttttcgcatttctgtccttaaacgacatctctttaacggaaggcatgcgtctaaaatacggctataaaaagccgcaaactcctttcttcgtcaaatttcctgcgctaaaccgacagcccgccgcttctgaaaagcggcgggctgttatacgttccgaggcggctgaaatcgcgtttcgaaacgtaaagattcaataaaaaatcgtatatccgacaagcgccgcatatgcggcgaagcacacccgagcctaaaagcctgtcaaacaatcagtcggacaagggcagtccgtccacgtccgtcacctgtccgcaaaggcacataatcccctcgacaaagccccaaaggctgccgattccgcacgtgaccaaagtcacgacgatctgaatgacccccatagacgttttgcccagataaaaattatgaatgccccagccgccgaggaatattcccaaaagtcccgcggcgatcttgcttctcgagctctttttctgaggctgaggattaggactgccctgcgcgtaattgggatcgggcatagggggcgtatagacgtagcccgccccggggtcagggttaggattgggattcccctgcgaattgtcgggctgaggagcggggcctgcgtcaaacgccgcgttaaaattgccgtcctccggcgcggcaggcgcggcctccccctcctttttataaaccgccgccccgcattcggggcaaaaagcagcgtcgtccttgatctcttttccgcaatgtgcacaatacataaaaattccctccgctttatatttttataaaatgatacgaatgcaatagtcgaggatataccccgctaaaatcgccgcaaaaatcccgttgttgaccgccttattcttaaaaagcttaaaatcggccagccaatacaggtagagcaaaggaagcgcccaaaacattccgttacagcgcagcgcccccgaaaaatccaatttcaaagccgcgcgcaccgcgtgcgtcgtcccgcaccccagacagggcacccccgcccttgcaaacgggcagggcacctcgaaaaacagcgcgtagagccccaccatcaacaccgcggcggtcaccgcggctttcggcaaaattttttccgttaaagaaggttctttcaatcccttgaacatttctgttttattatactacaaacgcgcccaattgtcaatacggttaaataaaatatttttttctttttacggcagctcccacccgagacagcgttccaccgcccggtgccacttcgccagcttttccgcgcgcgtcgcttcctccatcgacggagtataatccgcctccgcctgccacagctttgcgatctccgccctgtccttccaaacgcccaccgacagccccgccagcgaggccgcccctaaagcggtggtttcgtgtacggcgggacgaatgacttttttgtttaagatatccgcctgaaactgcatgagaaagccgtcgcgggaagccccgccgtccgctttcagggccttcagcgcaacgcccgtgtccttttccatggccgcgacgagatcggccgactgataggcgatcgattcctgggcggccctgatgatatgttcgcgtttggtgccccgcgtaagcccgaaaatcgcgccgcgggcgtacatgtcccaatagggcgcgccgatccccgtaaacgcgggcacgatatacacgccgcccgtgtccgtcaccttccgcgcgtaatattccgcgtcgcggctctccgtgaaaaagcgcatctcgtcccgaagccactgtatcaccgccccgccgataaacacgctgccttcgagcgcgtaactcaccctttcccccttcgccgtcgcagcgacggtggccagcagtccgtttttgctgaccggcctctcgcagcccgcgttcatcagcaggaagcaccccgtgccgtaagtatttttcgcctcccccttttcccagcacccctgcccgaacagagcggcctgctggtcccccgcgattcccgcgataggcacagccatgccccccacgttcgccatgccgtatatctcgcccgagcttctcacttcgggcagcatcgcccgcggaacgccgaacagcctcaagagctcctcgtcccattccagcgtttgaatattgaataacatggtacgggaagcgttggtgcggtcggtgacgtgcacttttccgcccgtcaacttccaaaccagccaggtatccaccgtgccgaacagcaattccccccgctcggcgcgcgctctcaggccctcttcgcggtcgagaatccatttgatcttgctcgcggaaaaataggcgtcggggatcagccccgtcttatcgcggatcgacttttcgaagcccttttcctttacctccgcaataatggacgccgtgcgtcggcattgccagacgatggcgttatagacgggcttacccgtagccttttcccaaacgacggtagtttcgcgctggttggtaatcccgatcgccgcgatatcctcgggcgaaacgccgctctttgcgacgacctccatcatcaccccgtattggctcgaccagatatccatggggtcatgctccacccacccctcggcgggataaatctgcgggaattctctgcttaaaatcgccgcgacgcgctgattttcgtctatgagcgccgcgcgcgacgacgtggtgccctggtcgagcgcaagtacgtatttcatctttttcctcctttttcgtcgaattttgccgaaagccgtttccgacgtttttcgaccttttttatagttgccccgccgcgcatatatcccgaaaaagggcacgtatgcaggcgcgggcatatgttttatgccaaaatacgccgcaatccgagttattccgcggcggccgtcccgcttatctcgaagcttcttccgccgtcccgcttattccgaagtttcttctgtcggcccgatttttcccccttcaagctcttcgcgcgcccgtcgccgttcaaaggcgtgcacccagtccgatttcaggtaatagacgagaaacgccgccgaactcaggccccaggtgaggggatacgcccaaaagacgacgcctatgctggggataaaatgcacggtgacggtaatatagacgatacgaaggagacaccagcaggcgagcatgataaacatgggcacgttggccttgcccgcgccgcggcaaatgcccgcaatgcaatgggaaaaggccagcagacaatagaagagtgcctccgtccgcgcctgccgcgcgccgagcgccaccacttcgggcgaatcgttgaacaaagcgatacaatagggcgcgagcagccagatcgccgcgccgatgatttccgccatgacgacggagcataggatgccgaaccgcgcgcccgccttggcgcggtcgaacttctgtgcgccgagattttggccgatgaaggtggtcagcgacatggaaaagcaggtaatcggcagaaaggcgaagccctccacgcgggaataactgccgcagcccgccatggcgtcgtctccgaaggaattgatattcgactgtacgacgacattggcgatggcgatgacggaattctgaacgcccgaaggcaggccgtaccgcaaaatctgtcccagcatatccttatggaagcggatttccttgagggaaaccttatacacctcttttgtgcgcaccagctgaacgaggcagagcagcgcgctgacggcctgagaaatcgcggtggccgcggcggccgagccgacgcccatatgaaacacgccgataaaaagcagatccagcacgacgttgagacaggcggaaaaaatgagataatataagggatggcggctgtcgcccacggcctgcaaaatcccgacgcagatattgtagagcacgacggccgacgccccgtaaaaataaacgcggaaatactcgacggattgaggcaaaacctcgtcgggcgtgcgcatccatttcaacagcacgggggtgaaggccacgcccaagacggtcaaaataattcccgcggcgatcgcaaacgcgaggtcggtatggacggcgcggcgcatatcctcgtattttttcgccccgaacagccgtgcgatgacgacgcccgcgcccacggcggtgccgttgaaaaagccgaccagcataaagatgaggctgcccgaggaggaaaccgcggcaagagcctgcttcccgaggaattgtccgacgatgatcgagtcggccgaattgtaaagctgctgaaaaaggttgctcaaaaaaatgggcagcgcaaagaaaataagacttcgtcggatcggcccttgcgtcagggcctgtttggatgcttccgtccgcatacgaaaaaaaactccttctatatcgcctgcgccgaaaggttctttcggccgcttttctcgttccgttatcgtcaagacgccgccgcatgctcctgcggcggcgtctttatcttatcacccgcggcgaaaaaagtcaagcaaaacgcccgtcgccccctctatttgcgctccacgagacagacgtcaaacatccgttcccgccgcccgtccgaaatccccttcgtctccgccctgtccccgtttccgcgcccgccgcctgcgttcgtttcagccctgcccccgtcttccgtttcccgttcgcatatcctgtccagcaaaaatccgacggacgcctccgctattccccgcttatccgagccgacggagggaaaggacgcgggaatgggaatattctcccgcacgtcgtcgtagcccacgacgggcagctcgatacaccgttccttcagtcggcacaccgtttcgcaggcgagcaggtcgctgaagcaaaacacgccgtcaaattcgacgcccgtatcgagaaatttttcccagcattccttcggcgggtctccgcccaaaaacagacacagctcctcgtcgtacaatttacgcgcgcgcagctcggcgcggtagccctcgaaacggtcgcgcgcgcaggtgaggtcgaggtcctcggaaaaaaaggcaatccgcttcagccccttgtccgcaagatacgcggcggcgatccgcccgccctttacgtcgtccgtataaatgcagtccacgtttttcacgtccgaacgccttcccaccagcacaacgggcacgccgtacgcctcgatcgctccgcccagctcctccgcgggctgaataaagctcaaaatgccgtccacgttgcgcgagagcacggacagatacagctcctcggaaaagctccgcacgggctccaccatcatcagcatggaatagccgcgctttttcaggctctcgtgcagataggcgaccataaaggagaaatagagattgatcgggtcgtcatagacgacggcgatcattttcgtcccgcccgagcgcagggagcttgccgccgaatttttgacgtaattgagacgttcggcgatgagctttacctttcttctggtgggttcggagatatcgtccgcgccgctcaaggcgtgcgaaaccgtctgcggactgacgcccgccgcgcgcgctatatctttcaccgtcactcttttcgtcatttgtttttcctcgcttactctttacgcccgctcccaaacgccgtctccccgcgcccccttttcctttacgctcggcgcagtcccccgcctccgcagtgtctcctctccccgtccgtctcgttcattcgtccgtctcgttttccgtcccctcgaaaaaccgaagcggccccgcccgccgcggaaccgctccctaaaaaatcgcgttcaaagcgccgaaaagccgcagacgccgagaaatttcagaaaggccgcccgccccctttcgtcgcgcttaaataccgccgtgttgtcgaggatgctctcgcacaccctttccacccgtttcgtcaccgcttcgtgcgcggcctctttagaaagccgatcgccgtattcccgcagcagcgaggcaatcatgtccttgtggatggtcatgtcctccgcgatttctttgttttcccccgtcagaaacttttccgtttccttcagctggtactccagccgcccgggcagaataaacatgcccatcgcctcgatcaggccgatcgattcgctcttgatattatgatattccttgtgcgcgtggaaaatgccgtcgggctgttcctcgtcgcagcggttgtttctcagcaggagatagaggagatagccgtcggccgtctttcttgcgatcggcgccagcgtattgtgctgcgcgtccgtccgcgcaaaaatccccacgctctcgtccgaatactccagccactttccgaggacgatctccgccgccgcccgcagcgcctttttgtccctacccttcagcaagatcacgctgttgtaccaatcgggcagagccgcttccacgccctcgacggggcaggaaagccccagcgcctcgggcgctttaaacatggggaaatcgtgtttgccgccctggaaatgctcgtgcgcgagaatactgccgccgacgatgggcaggggcgcgttggagccgataaaatactgcggcgcaaaatcgacaaaatccagaagcttggcaaacgtgccgccgtccagcaccatgggggtatgttcggcgttgatggcgatgccgtgctgatagaaataggcgtaaggcgaatactgccaaaaccaaggctctcccgcaagcgtcaaaggcaccgtgcgcatattgcggcgggttctgccctgcccgacgtatcccacgttctcgcggcagagcatacacttgggataccccgccgaaacgtttctcagcttggcggtcaggcggttgttcttttcgggcttgctcagattgatggtaatttcaatcttgtttctcgtcgtctccgcaatccagaatttatttttacgaatagccgaaagcttgacgtaatcgtttttgacgcccagctcgtaaagcccgtcaaacgccttgtcggggctttcgtcatattccgcgaaaaaccgtctttccacttcggagggacggggggaaagcatatcgaggatttcggaggtaaaaaattcctcctcgccctcctcgaccagccccttttccttggcgtaggcgaggacgggcaaaattacctcgtcgggacaatccagcgcggcaattctttttttgtccgtttcgtaaggagagaagccgtcgaggcccagcttttcgatcagccgattggcaagatacgtcgcgtccgcgctttccatgcccagatgtaaggccgcataggccaacaaatcggatatttcttgattcatactcatttgccctccgcaatttcattttcttcggacgtttcccgctttctcggcgtctgctctttgggaacccgctcgcagtctcttataatttaccgttcgtttcccgccctgattggaaaccgttcgcagtcgcttgtaatttaccgctcgtttcccgccctgatcggaaaaccgtccgcagtcgcttataatttaccgttcgtttcccgccctgattggaaaccgttcgcagtcgcttgtaatttaccgctcgtttcccgccccgattgggaaaagccttcgttttcttacagcttgctcaccgtaatcccgtcctcaatcgaggtctcgtagaaggaagcgcggtagccgatcgcgtcgaaatacgctttgcccacgcggcggataaacccttccacgccgctctttttgacgatggaaatagtacagccgccgaagcccgcgccgatcatgcgcgaaccgaggcagtccgtttcctttctggccagcgcgctgagggtatccagctctttgcccgtcacctcgtacaaatcgcgcagactgtaatggctttcgttgagcagccgccccaattccaccagatcgcccgccttcagcgcggcgacggcttccttaacgcgggcgcattccatcaccacgtgctcggcgcgtttggagaccacgcccgacagcacatatttcacttcgttaaattctttcggcgacagcgcggcgaggcaaggaacgggtttgatcgtattgatcgctttcagcgcggtttccacttcgtggcggcgcacgttgtacttgctctccacgaggttgtgaggcttgttgcagttggcgacgacaagccggtattccccaagctgtaaaggcacgtactcgtactcgagcgtgctgcaatccagcagaatagcatggtcctttttgcccatggcggaggcgaactgatccataatgccgcagttgacgcccgcgtatttgttttccgccttctgcgagaggagggcgagcttcaccttgtcgtatccgccgcccgcgtactcggacagagccaccgcggtagaaacttcgatggccgcggacgaggagaggccgctgccgaacggcaccgtgcagtcgtacaaaaggtcgcagccgacgatgggcgtgccgctctcccggagataatatgcgacgcccgcctgatagttgccccatttgagacttttatacgaatccagcttgccgatatccagcgtcaccacctctttgaaatcgcttgccgcgacgcggatgacgttttgtccgtttcttcttccatagacgttgcatctcaaattgagcgccgcgggaaacaccttgcccccgcaataatcgacgtgctcgccgatgacgttgatgcgccccgccgcggtgaacaggtcctccgcttcgcctccgaacagctgtgaaaacaagctttgcgcttccttctgttccataccctgattacctccgaattttcctctctttcgggcgatgtgtactttaacgttaaagtacatatgtcaaaagacattccgcccttttcatccgaaatgattataacatgaaaaaagcaaaaagtcaacggctatttttcactttttctccgcgattttcaattttttcgtcgttttaatccgtacggtttatttatgcgcttcgatcattttggccgttctgtccgtttttatccgtttggggaggagtttttctccatttgaaaaaccacagcaaaaaatagacgacgccgacggcgatcagcaacaccgccacaagctgcgagggggtaagaaagggaataaaggtgtttccgcggtcgtccgcgcgcgcaaattcgataaaaaagcgccaaatgccgtatccgacgcaatagagcggcatcagcggaaatttgtgttttcccctgtttttgaaaaacaaaacgatgagcacggcggcgagggcaaagagaaaaatgctttcaaacagctgaatgggcacgacgcggtgccagacctcttcgcccgcgccgttggtgtaattatacatgttgatcccgtaccaggcgtccgtttccctgccgtggcagcagcccgccgtaaggcagcccaatcgcccgaacgcatgcgccagcggaatgcaacacgcgccgatgtccagcatatcgggaaaacgttttacggcctcgttatccttgcagaaatgctttcccgcgataaaataaacgagcaaaaacgcgcccgccccgccgatcagcccgccgtaaaaggtggcgcccgtattggcgtcgatgacaaatttgccccgttcggcaatgttgtaaaaggcctgaaagatcaccgccgaaccgtagccgacgatcaccgccgaaagcgcgcagatgatgacgatgcgctggagagagacggaaaagccgcgtttcacggtcatgcggtcggcgagcagaaacgccgccaccacgcctacaagaataaatatatcgtagagcgtcagccctaaaaagagcgaatgaggatacatagaggattgtcctttttccgaaactgccgcgccgacgaaaaattatcggcgtattcgtcaatcatcattatataacaaaacgcgctatttgtcaatagcgcgttttgttttttcacaataagtccttattttcggccgaaagttcaatcctcgctgaccgtaacggtaaaggatctgccctcgggcaggatgaggcgaagcttgtccccctccgccactgcttccccttcaaagcacacttttaacatcgccagcacttctccgcgcatctcttcaagagagagcttaccttcatccttgccacagtaattcgataccataaaaaatatcctcccaagtaaattttgtactttaattataccatcacgtacgagaattttcaaggttttacggtgtctttctttgtcgaatggcatcgaataattgaaaagattgtcaaaaccgacaaaaagtttttgttttttatgccttttgtgtcgagcggccttaaaagggaaaaaagaatttatgacatttcttccgtctgcccgccgcccgaaacgccgttcgcagcggctttctttttatttctgttgagcacgagcttataaatgatcccgcctataatccccaacaggatcgtcccgccgaggatgccgaaggaaagaagatagttttcctccaccaattcctgcccgcaccaggtagatgtcacgatggaaggaatgcgcgcgacagccgtgaggaggataaaaaggaatatgttttcgtccgtcaggcacaccagccaggtaaacatgtccttgggggttccggggataaagtaaagcagaaaaaaggttacgttcagccgctttttatttttcaaaaaggaaatggactgcattttttcgggagaaacgaacagccccacgatcttcatgccgtaccgcttgcctagaaatacgatgatcagcgaaccgatgatactgccgacggaacaccataaaagcccgtaccatacgccgaacgtacaccccgccgcaatctcgagcgcctctccgggaattagctttaacaccgtctggacgacccgcagaaaaataaagatggcaacccctttcgcgctgtctccgaagccgttgagccattccttaaacccctcggggttctggatgagaaaggcgatcttttttcctaccgtaaaatagaatacgataaagaacaccacgatgacgcccaagcctacgcccacggcgatgcgtttgcccttggcgtgctttacctccgtcgtgcgctcgtcaaccgccgcaaaaagcgcgtttttccagcgaagaagcgtttttttgacccttgcgaaaaggcccttctttttcggttccgcttcaggggcttcctctgtttccgccggcgtttcgctttccgattgttcctcgggcttcgcacctttctccgcttccgtcgaggtttctcgttcctcgacggacgaagcttcaggctccgccgaaatttcgttttccgacccttccccgcccttcaaggctttgtccgcctgggcgtcgatatccgttttttcttccgacttttgtaccgcttccgcgaggcctcccgccggcgggacggaggggactttttttgtttcgtctgaggaaagatttttatttttgttctttcgcatacaccttttttcctgtttcatgagcttatcatagcatcagaagatacatttttatctaacgcagcatttcccttcccttacgcttttgtaagatttccgcgcgggcgtccgcgataaaacaaacgaacaaaaaagaaccgcaccgtccgattaatcaagacaagtgcggttgaaaaatgcgattttccgttatgcgggacgtttttgtcaaaaacaaacggcgccccttacacaaaagcacttttgcttttttgttgcttacagtgcgttgacgtgaaccgcgcgcagtttgttgggatttttggggtcagcttccgtatcgaaagaaaccttctgtccttctttcaagctcttataaccgtcggcctgaatagcggaataatgcacgaatacatcctcgccgccctcatcgttggcaataaagccgtagcctttctcagaattgaaccattttaccgtaccttgactcatctcgggtacctccattagaaataaaaatttttttgtacccccgaataagaacatcaaacacgccgatctcgagattgttgctattggcaaattcaaaaccgcattcgttcacagtttctttcttgaatacaatttcattataccacatctttttggcaaatgcaatagtttagacgagaaattttgtgcattttttcgaaaatcttgtaaattttgtggacttatcggggaaagcatgttataattttgtcattgtcaggcattcaacggcataatctaaacgggagaaccgcatggaaatcagttttttggaaatactcaaggttatttttctggggattgtggaaggcatcaccgaatggctccccatctccagcacggggcatatgtacctcgtcgatttttttatccgcctcgacatgagcgaggccttcaagaacctgtttatggtggtcattcagctgggggcaatcctcgcggtggtggtgctcttccggaaaaagctgtttcccttccgcttcaaggagaaacccgtcgtgcaaaaggatattttttccctttggggaaaggtgcttgtcgcctgcctgcccgcgggaatcctcggcatcctcttcgacgactttctcgacgagcacgtctatacggaaaacgtgaggccgatcgtcatcgccgccatgctgatcgtttacgggatcgcgtttatcgtcgtcgaaaagcgaaacaaaaaccgccttccccgcatcgatgcggcaaaggatatcgactataaaacagccctgatcatcggcgctttccaggtgctttccctcatcccgggtacctcccgctcgggcgcgacgatcctgggcgcaatcctcgtcggcgtctcacgccccgccgccgcggaatttactttctttctcgcaatccccgtcatgttcggcgcaagcctcttaaaaatcgtcaaattcgggcttgcctttacggggacggaaattcttcttctgtcgatcggctgcgcggtggcgtttgtcgtctccctcttcgccattaaatttttaatgaactttgtcaaaaaacacgatttcacgcccttcggctggtatcggatcatcctcggcgcaatcgttttgtttgtcgccgttcccttgctgatcaacgcttaaacgacaaaattaacggggccgccgcgaaaattttcgcggcggcccttcgctttacgctttatcgcccgacagcggaatgaaacaaccagcctgcatgccgcgcgcgcaagcaatagtcaatcgcttgcggcttattccttttcggtcaccgcgatccagatttcgcaggaatagccggggttatctacttccgccgaaggatatacctccagctccacgccgtttccgtattcgtaattgctctgcggaaaaaattccgtgcagatctgccgataggtctctttgaaggcctcgggcatctttcctttacagctgaaaaccgcataggtatgggcgggaatctccacgagcttcagatcttcgctctccagcagcgcgccgttatattccgcgccgatgccgtagggaaaccccgaatccgccgccgcttcggaaaaacaaattcccaatataccctgcaaattatcaaatttgccgcagcggcaaagcttgtctatcgttccgttttcgccgcactcgtcctagaacgcggaaatgtcctccgtggcggtatcgccctgcggcttcgcaatccg

SEQ ID NO: 4181 - DNA, 21767 bp, Unknown
  16S sequences of unknown bacteria
gtttccaagcaagcaatgcagattcgtctaaaatccaggaacctgatataaccaaagagcgggaatagagagaggttctcccctctctctatctcctccgctatgctattttgtacctaatatgttcgcaatattgcgaacaaggaggaatattctatgaggaaagaaagcacaacaattcaaaaatgtaacagcagactaacagctttagggcttaacagcgacgctgcgtttcatagaagcaggctgattctaaagatttaccgggatgtagtctgggttctgagtgaacgggcagaagaattgcaagaaactgcttggattatgggagaacaagatatagagtctggcctctgctatcttgaaaattttgcaccagatattgaactgcaagcctttgaagaaaaagtttgctgccttgttcaaaatcaaatgctggtcaatattattgaccgtgcactccttcgtctgaaacggtatccggatcgaggagaactttactatgaaattttgactaagcaatttatctatcggttcaacagtacagagaaagaattgctggaagaactaaatatagagcgcagtgtcttttatgaccgaaaacgagaagctatctatttattttctgtttgcttgtttggatattctattccagaagtcctagaggaactgccccgactaaatcccgactaaattccgacaaatccccgacctaatccctactcccttccgacttccgacctgctatacttggtatagtggcaggaatgcgctaaattgaatacttttctacataaggcccggcattaaccgggcttttttcattcctgctgcaatatggcggcaggaacatggctggaggtgaaaacacttccggcctttttctttgcccggtattaggaggccggtatgcgctgggaggcgtacatagcaaaatatccatgacaccgttcaaattcactgactaccaagaatttgaacggaggaaaggatatgacaagagtattcatttggaaaaataacagcccacaggaatgggaggaaatcagtttttcagcgttcagtaaggcacgccgcaatggttgctttactgggcgcttttttattgagacaaccgaaaatgttgatggtcacaacgaaagagttattaccgagtgctcacaagctcgttataaaacacatcgccaagaattaggaactatcaatcaagatgtggttcatacgaactctccccaaagacacgatacctatgtctactactttgcagatggatcgcgttctacgctggttttaggagcagacgatacttcctgtgtcaatggagcttggattgccgaattgcgagaactggatcgcttggaatacaataatcaacacacacaaacacgccgtcactgttctttggatgctcaggaccccgaaggaatgggagggtactatacaggtgatgatatggaacgcgtgcagcttgaattggaagtagaagattttctcacttcacttcccaaagacctggaacaaattgctcgccttttgtgtgagggtttttctgccgcagaaattgctcgtaagcaaggggtcaatcggtcctcaatatgcagaaaaattaagaagatacaggatgccatgatgcactataatccttaagcaacaaaccatcgaaagcatagccctgccattttggcagggctatgctactttttgaattaaatttcgtaatctgtgcaacaaacggcctctgccgtggcctacaagtgagaggcacaaatgccagggaagggcattgggtccctcagtctctaaattaacagtaataggagcgaacaggccatgaaacaagaaactgaaaatcggcaacagaggccgcagatgatttgcctgtgtgcaacttgtgccaatgctttttataatgtgccaaccataaggattcagcgtgtggatcgctatcaacttgtaaaagatacctgtacttattgtggggtccgcaatgggtatgactatatcattactcctcgtaaatcgacacgccaccattcaggaaatgaggcgaggttatgaacaagaaagatgtctgtgcaaccaaaatagcctatgtacgattcacggaaaatgatttggcagacctggataatcaagttcgtcgtgtaggtgcgtcatccagaggcgcatatatccgcagtttaattaaaggagttcgtcctgttgaactccctccagcagactatgtagctctgattgatgaattagctaaacttcgccgcagcattgatacaatggcagctcgcgcggcggacaacaaggcgtctgcactcagccctgtcgaatactatacattatccagtcttacggcgttgacacttcaaaagatccggcttgcagcattaccacaacagtatcacttaccggaggatatgagccatgaatgaaacaattattgaccgcacttatgtgtgcttaaagctgattgatatgctctacaaaaagggacttatcaacgaagcaacctattttaatgtgaaacgaacctatcagaacaagtaggttttttgcgctgggttgtcaaggatgtcagcccagcgtccatatcattgcagattaaagattttttgagtattctcgttttgtcagaagaaatcaggaacactaaaggaggaagatgctatgtacaatatgtctccgtactcattatctcgatcttttcgggacaaaccctgtcgggcagtcatatatggccgtgcctcaacagaacacgaggcccaggtcaaagccttgcaaaatcagatgcagtggtatgatgatgttgctcgatttcatcctcaatggaatgttatcaaccgctacatcgaccaaggcattaccggaactcaggtctataagcgggatgcctttatgcggatgatggaggatgccaaacagcaaaaattcgatttgattgtcactcgcgaggtctgccgctttgccagaaatacggtagatgcattggtctgtgttcgccaactcgccgccatagggattgaagtctattttgtgaatgataacatttggactcttgacggtgatggcgagttgcggctgaccattatggctactatggcacaggaagagagccgcaaaatcagtgaacgctctcttgcaggacaacgggtcagccgcgaaaaaggagtcctctatggaaacgggaacattttcggatataccaggaacaaactcaccaagcagtttgaaattgatcccgatcaggcggaaactgtaaaaatgatttttgacctctatgattccggcatgggagaaaccttagtagcaaaagagctaacccgccttggacgcaaaaacggagtaggtaaggtcaagtgggatgccggaaaagtatcaaagatcatcaagcgaaaaaactatctggggtacacagtttactgtcagtcctattccaataactatttggagcaaaagagaatcaagcgtgacgagagcgagtttgtctatgtaaaaggtggcttccctcagattatctcggaggaacagtacgagcggtgtaatgccattcgtcgcagtaggaccaaacggctgactgatgagaaaggccatacacggagttttggtattcagcaggctcagaatgtgtggggcagaaaaatgaggtgtcgttgtggttctcccatgcttcgacatcgttggagaaccaataatacaggaaagcctatctatggatatgaatgcaagcgacaccatgatacccctcgcatccgccttcagaatgaacaaggcaatccaacacctatctgtgagatcaagccagttggacaaagcaaactggaactgatggcctccaaaatatttgagagggtatggggagaccaaagagaaatcgtcctccagacctgcaaaatgctggatgcttgctacaagccagacgcagatcgtcgagcagatttgatgaaagcgaaagatgattctgttcagttgctccaacaacagctggatgacttggttgtggtccgtgcccgtggagagattgagcaggataagttcctccagcggaccatagaaattcagcagcagatggaggcccttcgtcagagcaaagctcaaattgcttcagaggactacaatcccggacgcctggatatggaagccattgaagcagcgttgtgcgaggcagttgaaatgcatgacggtctggtaagcgaggatttcattgatctctttgtttcacaggttacaccactgtctgattcccgctttgcctggtgcttggacttttctccgcagcccacagttgcctttctgaatttagccggtcagaggaagtacacgacctgctctatggatagtaaattacactttggtccttttgctgatgaggaggggcacaccatcccttttccgggcagcctgcgtcggtgagctgcccggacagctctaattcaaaatgtacatcgttatatacacaaggtatgtacggcacaggcagcgttaagtaaagcacataaataaagaattgtaaatataaaggatagcattcacttcaaagtggatgctatttctttttgccaaaagaatgatctatgtaagaaagtgccggaaatacaactgatttaatataaaattcaagatttttttacagacatctgatagtacattttacatgattatctgataatataagtgtcgatccaaaaccgtgacttgtgatatattgccaaaggagattaacaattatgaagaattttcaagtaatgactcagaatgaaatggaaaatgtaaatggtggaatgattcgtcttctcaaatatttttttaagtttattcggctttgcgtaaaatattcagctcatggatcatattcaggaaatgatccacgctatgaatacaatgatgcaactcgtgtggctcgttaactgtaaatcagctttctttaaaaggagtattctcatgagaacattcaatgttatgacacagaatgaaatggaaaaattaaatggcggagctttacttggggtaggtcgtaatctgatattcattttgaaacgtatgctggataatttcaaacgtccaaaatattaatttctcactattatagctggatcgacaaaataaaaaacataaaagaccagtctggacaacttgtctggtgctggtctttttcaatatacagaggtaaataagatgatatttcatagacagcattatatatgtgtaaaacaacatgatacgaccgactgtggtccggcatgtctggcaactgttgcaaaacaatatggtctagatctttcactggctaagatccgttctattgcaggaacagacaggcagggtactaatatgttcagccttctgaggacggctgaaaaactgggatttgaagcgacaggtgttaaaggtgacaaggaagcatttctggcaggatttccagtgcctgctatcgcacatgtgattgtagatggaaatttgcttcactatattgtgatagaagaagttaccagtgagaaaaaaattatcgtatcagatccagcaaagggaattgttgtatataagccggatgatttcttttctatctggacaggagcgttattgcttcttcatcctggggaaacattcacttcagggacattttctgtctctccaatacattttttatttcgtctgataaaagagcagcgaaaaatattatttccaatctgtttactatctctttttgtcacgggttccggtattacaggggctttttactatcaatatcttattgatatcgccgctcagagtaatacgctgcagaaattaaatacatttacaattggcattatatttttatatattttgatgcaggtgttatcctttgcaagaggacaattaatcattcatctgagtaatcgtctggatacagctcttgtatttaagagctatatccatgccaccaatcttccgatggatttttttgaatatcggaaaacaggggagattatttctcgttttacagatgcagctcaggcaagagatgccatttctcagggggctatcaccattttgattgatgttgttatggctcttgcaggaggaattatgctgtatgtggaaaatccacttcttcttgaaattgcatgtgtgttgttgatcctttatgcagtgatcgctttttcattcgcgcgtccgttaaagaagcataatgaaaaaatcatgaatgacaatgcattttttaatgcacatatcatcgaatctatcaatggagaggagacaattaagacacttcaggcagaatctgattttgaagagaaaggaatgcatctgtttcagaatcttttgtccagtgtacttcgtggaaataccatatccaatatacaggctacgatgacaggtgctgcagcctttattggtgagatcctgattctgtgggcaggaactatcatgacgattgcaggctctatgacaatgggaaaactgatgacattcgttgcgttacttacgtatttcctgactccaattcagaatgtgatcaattttcagccacagttgcagaccgcacttgtttctattgaacgattactggatattttagaattgaactgtgaatcatctgatgaaacagatacggctaccatttcaggggagaacatagtattgtctcatgtgaattttcgttatggatccagacagctggttcttcatgacatcaatcttcgaattcaggctggtgaaaaacttgcaattgtgggagaaagtggctgcggaaaaacaacgcttgtaaaactcctgcttcgtctgtttgattttgaaaatggagatattctgattggcggcagaaatattcaatcgttctctcctcagtctcttcgtaagcagatagcatatgtgtctcagaatattgtactcttcagtggcagtatccgagaaaatctggagatgggaattggaaaattaccggaagatgaactggatcgtgtctgcgaattatgcagcatcaagtcctatattgattcccttcctttccgttatgatacgtctgtgggtgaaaatggagattctatgtccggcggacaaaaacagcgtcttgcaattgcaagggcattacttcggcatccttctgttctgattctggatgaggcaaccagtcatctggattcgattacagaaacggctattcagaagatgctgagcgaacttccggcttccatgaccgttatcatgattgcacatcggctcagtacaatcaaaaacagtgatcggatcgtggttatggatcatggatcaattgcagaactaggatcacatgaaaaattactggagcatcatggaatctattggaatatgtggaacagaagcatgttgatgtctgccagtaatcaggattgttcaatcgatcaaaataatggcaaagccacgcatatacagatgcaggaagaatagaaataaacattcgggagcaggagactgtcaagtcttccgcttttccgttggaaatctgtcggtgttatgttaagataagaaaagaaatcttcaggagaggatagatagcagaagaactggaggcacattagcatgagaaagacagacagtacagagaagttaacgacgcttatcaaggcagcaacttctccatttcacacagcagcggcaattgtaaaggagcttcggacagcgggatttgagccattggtcatgaaccgtccatggcagctggaagcaggcggaaaatattatgtggagcagtatggttctgctgttgttgcatttacggttggagaccaggtacaggcggaaggattcaggattgcagcagctcatacagattttccggggctcagggtgaagcaacaagcggagattttaagagagacctatgtgcagctgaatgtggaagtatatggaggtgcgattcttaatacctggctggacagaccgttgtctgctgccggacgggtggcactgaaaagtgatgatgtgtttcatccgcagatgcgtctggtagatttgaagcggccggtatttatcattcccaatctggcgattcatctgaaccgagatgtgaataaaggagtggaactgaatcgtcagaaagatatgcttcctttggctggtatgggtggagaagtggtatccagagattttttcagagaattactggcgaaggagctgcatgtgcagccagaagagatcctggattatgagatgggactgtataatgcagatcagccggaatatgtggggattcatgaagaatttttaagtgcgccgcggatcgataatctgtcaggtgtacaggcaatcctcaccggtatcacggaaggaagccgggaaggcggcatcaatgtggcggcattttttgatcatgaggaagtgggaagccgtacgaagcagggggcaggctccatgtttttatccatggtactggagcagatcagcatcggccttggacaggagcgtctgcaattccttcattatctggctgacagcatgtttctgtcagtggatgtgggacatgcatatcatcctaattatggggagaagatggatcctaccaaccacagcattctgaaccagggattctgtatcaaggaagccagcagccagtcttatgctacggacagtcaggctattgcagtgatcgagcagatctgcagacaggaagagattccttacagtaagtttttcaatcgctcagatggaagctgcggaagcacccttggttctattgcctccagtatggtgccggtgccgacggtagatgtgggggttccgatccttgccatgcattctgcgcgggagctgatgggcagacgggatgagcaggctctttcagatatgatccgcgcttactatacgttgtaaaatgaaatgtttatagaatgatccttacagcaaaatcagtgccttccatgaaaaactgatattgtccttgttgactttctacatagtaaatgatgcttttaacacccagtccgtgccctgacctcctggtgacaggaatcccatctgaaaaaacaggcggtacaggagccggatttttttccagcagcatcagatgattcattttttcaaaaatatgcagttcaatgcgtctgttttcctgagagagatcttttaccgcattcatggcattttccagaatattagacaggattgcacagaagatcatctcggaacagggaagatctttgggtgcggcgacctgtgcatgaaatgcaattccaagctcctgcagtcgggaactgtatatggacagaatcgaattgagcagttcattttgtgaaaatgtgctgatgatggtattttcataagtctggtgtatctgctggatatagtccagagctttgtcagtctcctggttctgcacataggtctgtaaaatcattaaatggtgccgcatatcatgccgcaggatcgacatattgtgttcacttttctttgcctgctcaatctcggaacgcagcgaacgcagctgcatgttgatcagttcattgtactgttcagtccggctcttcaattcatattctcgaaaataaatgagcagaaacagaagataggccaggcaaagggcgaaacccatgaattcggatacgaccttgctgccggaatacagcagggttgaaaatttggttgtggcataatcaaacaagtaatagacaaaaggcatactgcagataatgatcagttcccggtcagatttctcgaagagcagggcggtggtcggacacagatatctgcacagcaggaaaaatacgataagtgttaccaggattctgcagaggtaatagcaccattcctgatgggtgagagtgagtacaaagattccagcccagttactgtattgacagcaaagataagccgtcagaatggaagtcagtgactgaagccagcggaatttgtagtaaaataccaggatcaacaacaaaggcagatgtacaacaaacggatagatttcatcggaaaattctgtgccgatcaagaaaatgctgattagacacagaagtccggaagcaagtgccgacagcagcaggattccgatatttttccaatctcgattcactcctaaaaaaaatgccgacaaaaagacgccgaacagtaaggtggtgagatggtgggtataaaacaatatctgaagtaacatgaaaaaatcctctcatcattagataataagactattatagaagatataacagattaacgcaaatggtttgcagactatttgatggtaagaatcagttgcatatgtgacaatcttgtgataatattatctggtattaaaaactacgaaagaacgtttttgaatctttttagataaatgataagagataaaaaggaaaggaccggatcatatgataaattacaggatcgttgttgacagttgtggggaatttacggaggatatgaaaaagaatcctcattttgcacatgcggcattgcatctttctatagacggggaacagtttgtggatgatgagacatttgatcgtcttgactttctggcgaagatgaaggagagtccaaactgtccgaagtccagctgtccgtcaccggaagtgtacagagcggcatttgactgtggggcagagcatctctatgcgatcacgttgtccgcagaactgagtggttcttacaacagtgcagtgcttggcatgaacctttttctggagaatcatccagatgcaaaggtgcatgtatttaattcctgctcggcatctgtgggagagacgctgattgcaaagaagatcgctgagtacgaagaggcgggtcttgattttgaagcaattattgagaaggtggatgacttcatccttcatatgcatacgtattttgtgctggagagcctggataacttaagaaagaacggacgtctcagcgcagtgaaagcactggtggctactgcattgaatattaagcctgttatgggagctactgatcagggtgtgatcattcagctcggtcaggcaagaggcatgcagaaagcactccgtctgatggcagagacaataacagcagagctggagcatccggaagagaaggtgctgggactggttcactgcaataatccggaacgtgcggaatatgtgaaacaggaattaatgaagcttgtaaaagtaaaagacattattgtgctggagagttccggagtcagcacactttatgcggcacagggcggaattattattgcggtttaggaaaaatgtgatatacttattctattaagcgttgtgaggtgcagcgcgagaaacagcaaggagaacgtttcatgagtcaggaaaaagtagatcgttataaagagcagaaaaagaatcgcaaggctattttagcaaagaaaaagagaaatgtatttcttacaaaatgtggctgcggcctggtcgttgtattgctggcagcatggcttggatattcagcagtggattcctattatgccaaggcaaacagcgagactgtatatgcagatgtgacagcactggatgagtataccagcgcattagcatcagagtagatcgtaggaataaggggctgttttcctgaaaaaaggaaagcagcctttttgtgtcaaattcagtcttgaccctgaagcagggtttaacgatataataaagaaaacagcaaagagaggatagagatatgatacagactggaacgaaaaaactgacattggcggcaatgttttttgccattggtataattcttccgttttttatcgggcagattccattgattggacagatgcttcttccgatgcatatcccggtcctgctgtgcggattgattgttggctggcagtatggcctggcagcaggtttcttccttccactggtacgtggtatgctctttggaatgccggcacttttccctaatggaatcggcatggcttttgagatggcaacgtatggattggtgatcggatatctgtacagtcattcccgctggcagtgtatcaaatccctgtaccgttgtcttattgtggcaatgatcgccggaagactggtctggggagcagtacgtgtggtacttcttggcgtgagcggtatcgcattttcatgggaactgtttatggcaggcgcgctgatcaatgccattccgggtattgtgctgcagctgatcctgatcccgatgatcatggtagctttgaacaaagcgaagattgttccctttaagaagaatgagcatgtgcgtcagaacgtataggaggcagagaaacgtatgaaggagatcgcggcggcgattataacagagacaggtaaattagaggcgaaaaaagatcatctgctgattgctgttgatgggcgctgcggctctggaaaatccacattgggagcatatcttcagcagaaaatgcatggtaatctgctgcatatggatgatttttatctgcggccggaacagcggacgcctaagcggcgggaagaacctggaggaaatgtagatcgggaacggttcctggaagaagtactgctgcctcttcataaaggaacgaaatttacgtatcgaccatttaactgtcggaaatgggaactggatcagccggtggaggtggaagcgaggaagatcaatattgtggaagggtcttattcttgtcatccagagttatatgactactatgatcttcatgtgtttctgactgttgatccgaaagaacagatgtaccggattcagaatcggctgggaaaaatgacctgtgcggagacctttcggacaaaatggattcctatggaagagcattatttttcaaagatgcaggtgcgggagcgctgtgagctatgttttgacactacccatgcggagcgcgtggatggacagcaggaggagagatgatgaaaacattatatctggaatgttactccggtatcagcggagatatgacagtggcggctctgttggatctgggggcagatgagcaggcattacgacatgctcttgcaagcctgccggtgaagggctttgacattaagatcagccgggtgaaaaaatctgggctggatgtgtgcgattttgatgtgttgctggatgaagagcatgagaatcatgaccatgatatggcatatctgcacggagatgatcatatggaacatgtgcatacacacacgcatggtggtggagaacatatgcatccgcacactcatcgcggtatgaaagagatccgtgagatcctgacacaggcagacttgacaccgcgggcttatgagacggcctttcgcattttcacagtgcttggagaagcggaggcgaaagctcatggaaccacgctggagcaggtgcactttcatgaggtgggagctgtggattctatcgtggatatcgtatccgtagcagtctgccttgataatctgaatattgataacgtgatcgttccagtactgtatgaaggcggtgggaccattcattgtcagcatggcatccttccggtaccggtaccggcggtatccaatattgtggctgctcacggaatccgtctggcactgaccggcgagaatggagagtatgtaacaccaaccggggcagcgattgtggcagctgtccggacatctgataagctgccggagagctttgtgatggaaaagattggtcttggcggaggaaagcgggaatataaacgaccaggaatcctgcgggcgattctgatccgtgaagaggagaaggagcagaagaagatctggaagctggagagcaatatagatgactgtaccggagaaaatctgggctatgtaatggaacggctgatggaagccggagccagagatgtacattacagtgcagtctatatgaagaaaaatcgtccggcatggcagcttaatgtgatctgcacagaggagagcattccgaagctggagcagattatttttgaggagacgaccaccattggtattcgtaagaaccgcatggagagaagcgtgttaaagagaacttttgacactgtgcagatttctgagggagaggcaaaagtaaaattatgtcaggtgcctggcagagatggtgtaaagtcaatacagcgctgttatccagaatatgaaagcgttgtacagttatgtcgggcaagcggaaagtcttatcaggagatttatcaggagattgtcgccgtctggcatgaagaaaatagatggtagatgaaatctgtgaatagacatgacctgggaggtagtgacagaatgagtggaaaaatttattcacatattgataagattccttctggcagtgcgtcccggaaggtgacagaaggatgcctggtactggaaggcggcgcatttcgcggtctgtacagtcaggggttcatggatgccatgatgaaagcaggcatcaatatgcagtgtaccattggagtatcagcaggagctatggccgggatgaattatgtggctggtcagattggtcggtctgccagagtgaacctgaggtatcgtcatgacagccgctatgtgggaattcaggcggttcgccacaacaaaggactgatcggatttgattttgtgttcgatggtcttaaagaatccgatccatttgatggaaaacggttctttgagccggaacggaggtttgtggcagtggcaacgaactgcctgaccggagagactgaatattttgaaaaaggtcattgcaccaatatctttcacgcaatccgtgcatcggcatccatgccatatatttccaagatggtggacatcgatggcaagccttatctggatggtggatgcagctgtaagattccttatcagtgggcaatcgaccagggttttgagaaaatcgtggtgatcaagactcgacatgcagattatagaaaaaatctgaagaaagcctcagagacctctctggcacatcggatctatcacactcatcccgagtttgcccacgtgctggagcagagtgatgcggcctacaatcaccagtgtgatgaactggaacagctggcaaaagaaggacggatctatcttgtcagcccgtctgtacctatgagaatcagccgtctggaaaaagatatggagaagctggggcatctctatgccagaggctataaagatgccaaagaccagatggagcagctgaaagcatatctgggaatgaaataaaagttcatatatgcaacagcccgtgaggtcagcataaaagctcgtatgacgtgtatcggacagaaatgcactgacgtactgcctgaacacgtacacatactgtgttcgtgtcagtcaatacgccaccacattccagtccgctccaagtcatacagcgcagtttattgctgacctcacgggctgttgtagttcgtgatagtttattctatcgcccggggctgctacaggttatgagagcttttgtttcatacacagatcctttgatcacattttatgtcatatataccttgtattttatagaagtatctgctaagataaatacaacaatctcttgtatcgaatttctaagcgattttccgcaaaaataccatgagagaacggactttgataattgaataaaggctttacgctatggtataatattgcctgaaagggcggtgaaatatatgggagaagagagcatgacgaaagaagaaatgcagcgatttttaatcaaagaggcacaacggggtagtacagaaatagaagcatatagaaatctgatggaaatattgggaatcgagtatccaaaagaaaaagaagataactgatcagtaactaaataatcaaacctaaggtgtgaggtctttattgaggaatcaaagatctcacaccttttgttatattatttatttctcattctcatttttcttagcttccatcagcttcattgcacgaaccttcagcggcagtccgaacagtgtgatgaatccacttgcatcgtgatgatcatacatatcacccgttgtgaaggaagccagggactcattgtagaggctatacggagaagtggttccggctttgatgatatttcctttgtaaagcttgaattttacttcaccagtcacatattcctgagtgcttgctacgaatgcgcggatagcgtcacacagcggagtgaaccattttccttcgtatacaacctgggacatcttgttgcccatgtctttcttggcttccatggtagcgcggtcaagaaccagctcttccagctgtttgtgagcttccatcaggatggttccgccaggagtctcatatactccacgggatttcataccaactacacggttctcgacgatatctacaataccgataccatgttttccgccaagcttgttcagctctctgatcacatcagcaactttcatctttttgccatttacagaagtcggaactcctttttcaaaggtcatagtcacgtactcagcctgatccggtgctttttccggagtaacgccaagaaccagcatatgatcgtagttcggctcatttgccggatcctcaagctccaggccttcatggctgatgtgccacaggttgcggtcacggctgtagctgtggctgtggtcaaacggaaggtcgataccatgtttcttgcaatactcaatctcgtcatcacgggactgcatggtccatacatcagtcattctccacggagcgatgatcttcaggtcaggagccagagctttgatcgccagctcaaaacggatctggtcattacctttaccggtagcaccgtgacagatagcggaagcaccttcttttcttgcaatctcaaccagcttcttagcaataaccggacgagccatggaagttcccagaaggtatttgttctcatatacagcaccagcctgtacacacggcatgatgtaatcttctgcaaattcatcaacaatatcttcaatatataattttgctgcgccggaagcttttgcacgctcttccagaccgtccagctcgttaccctgtccgcagtctacacagcagcagataacgtcataaccgaaatgctctttgagccatggaataatagcagtggtatccagtccacctgaataggcaagaactactttttctttcatattaaaaatcctcctaatgtaacgtggtttcactgaaaataaatatacaacatccgacaggaaactgcaagcgaaaaaatatacatgatagcaacgaaaatatacattaaaattgaataaaatgcataaatatagaaaataaatgaattttatatgtataaagatgcagaaaaatatagaaaggtacttgcaaactcaaccaaagaggtttacaatatttccattcgacagaaaaatagtgaaatttgtgaggtagagagtatgataaaagcaggtattatcggagcaaccggttacgcaggagcagagctggtcagacttcttctcggacataaagaggtagagatcaaatggtatggatccagaagctatgtggatcaggcgtatgcatccgtctatcagaatatgttccagctggtagatgaaaaatgtctggatgacaatatggaagctatggcagatcaggtggatgtgatctttactgcaactcctcagggactgtgtgcatccctggtcaatgagaatatattaaataaggtaaagatcatcgacctgagtgcggacttccgtattaaagatgtcaatgtctatgagaaatggtatggcattgagcataaagcaccccagtacattgaagaagcagtgtatggactttgtgaagtcaacagagagaagatcaaacaggcaaggattattgctaatccaggttgctatccgacctgcagcttcctctctatctatccttgcgtgaaggaaggactgatcgatccaaacaccatcatcattgatgccaaatccggtacttccggagcaggaagaggagccaaggttgataatctgttctgtgaggtcaatgaaaatatcaaagcctacggtgtggccggacacagacatacaccagagatcgaagagcagttaagttatgcggcaggagagccggtactgatcaatttcaccccgcatctggtgcctatgcagagaggtatcctggtaactgcttatgcatctctcaaaaaagatgtgacatatgaagaagtaaaagcagtttatgataaatattatgacaaagagtattttgttcgtgtacttaacaaagatgtatgcccgcagacccgttgggtagaaggaagcaacttcgtggatgtgaacttcaagatcgacccgagaacaaagcggatcattatgatgggtgccatggataatctggtaaaaggtgcagccggacaggcagtacagaatatgaatctgttatttggattagatgagaagacaggtcttcagatggcgccgctgttcccgtaagtgtctgagatatttacggaaatagacgataagacaaggaggaaacaccatggatatccgggtgatgaaaagtgaagattatgacaagctctatgagttgtggatgacgatcaaggggtttggcatccgaagtatcgatgattcccgggagggtgtgaccagatttctgaaacggaatcccaccaccagtattactgcctgggacggggatacactgatcggcgcgatcctgtgcggacatgacggaagaagaggatgtctctatcatgtgtgtgtgcggaaaggataccgacgtcagggcgtaggtaaggccatggtcgtggcatgtatggaagctctgcggaaagagcagatcaacaaagtttccctgatcgcatttaccaaaaacgatattggaaatgcattctggaacaagattggctggacagagcgggaagatctgaattattatgattttacgttaaatgagaaaaatattactgcatttattgaggaggactgaggatgaagatcattacaggcggtgtgaccgcagcaaaaggatttgaggcagcttcggtagaagcccgcatcaaatatcagaaccgtaaggatatggcgctggtgtacagtcaggttccctgtgtggcagcgggaacatttactaccaatgtggtaaaagcagctccggtcaaatgggatcaggaagtggtctatcattctgaatccgcacaggcagtgatcatcaattccggtatcgccaatgcctgcacaggtgcggaaggatacggatattgtaagcagaccgctgaggcggcagcgaaagccctgaatgtaccggagagttccgtgctggtagcatccaccggagtgattggtatgcagcttcccatggatcggatcgcagcgggtgtggaactgctggcaaagggaaaagaggataccgaagaggcaggtcttgatgcggcaaaagctatcatgaccaccgataccaaaccgaaatatgtgggtgtggagattgagattggcggtaagaccgtgaccatcggcggtatgtgtaaaggctccggcatgatccatccgaatatgtgtaccatgcttggatttgtgaccaccgatgcagcgatcaccaaggagcttctgcagaaagcactgtccgatgatgtgaaagatacctacaatatggtgtcggtggatggagatacttctactaatgatacagtacttttgctggcaaatggaatggcgggtaatccggtcatcgacaaagaagacagtccggaatatacagaatttaagaaagcactgaattatgtaaatacagagctggcgaagaagatcgccggagatggagaaggagcaacctgtctgtttgaggtaaaggtgatgggagccgagagcaaggaacaggccgtgaccttgagccagtccgtcgtgatgtccacccttaccaaggcagccatctacggacatgatgccaactgggggcggatcctgtgtgccatgggatattccggagcacagtttgatccggagaaagtggatctgtattttgagagtaaagcagggaagctgaagatcatcgagaatggtgtgtccacgggatacagtgaggacgaggcaacaaagatcctttccgaggactatgtgacggccattgcagacgtgaagatgggaacggccactgccaccgcatggggctgtgatctgacccatgaatatgtaaatatcaacgcagattacagaagctaaggtggaaaaacctgtatttacagggaagaggagtggaaaaatgagaaaagatgatgaaaaatatctggagaaagcggccgtcctggtggaggcccttccctatattcagaaatttaaccggaaagtgatcgttgtaaaatacggcggaagcgccatggtagatgaacagctgaagaaaagtgtgatcagtgatgtgacccttctgaagctggttggattcaagccgatcatcgtacatggaggcggcaaggagatcagtaaatgggtcggcaaagtcggtaaggaagcacagtttatcaatggactgcgtgtgactgatgaagagaccatggagatcgcggagatggttctgggtcgtgtaaacaagagcctggtcactatggtggaagagctgggagtcaaggcagtcggcatcagcggtaaagacggcggccttctgaaagtaaagaaaaagtatgcagacggcaaggatatcggttatgtaggcgaaatcacagatgtagatcccaatattctctatgacctgatggagaaggatttccttccgatcatctgtccggtcggactggatgatgaatttaatacctacaatatcaatgcagatgatgcagcctgcgccattgcccgtgcagtgggtgccaacaagctggcatttctgactgacattgaaggcctgtacagagattttgaagataagagttccctgatctctgagatcaaggttaaggaagcaaaagaactgatcgccggaggaaccataggcggaggaatgctgccgaagttgtccaattgtattgatgccattgaggcaggtgtatccagagttcatattattgacggtcggattccccacagtattctgatggagatcttctctgaccgtggtgttggaaccgctattctgggagatacggaggaaaaatattatcatgagtaatccatatattgaagaagccgaggacgcgatcctccatacatataatcgctatcagattgttctggataaaggtgagggtgtgcatctttacgacgtcaatggaaaagaatatctggattttgcagcaggtattgcagtacagtctctgggttacaacaacaaggagtatacccaggcactgaaagaccagattgacaagctgacccatatttccaacctctattattctgttcctatggcagaagcggctgagaaagtaaagaaagccagtggtatggagaaagtattttttaccaacagcggcacagaagcgatcgaaggtgcactgaaggttgccagaaaatattcctatgcaaaatacggcgagaaccgttatgagatcattgccatgaatcattcattccatggaagaagtatgggggctctgtctgtgactggcaatgaaaaatacagaaaaccctttgaaccgttgatcggcggtgtgcgttttgcagattacaatgatctggaaagtgtaaaaagtcagttgacagataagacctgtggtattattctggaaaccgtgcagggtgagggcggtatctatccggcaaccgaagaatttttaaaaggagtccaggcactttgtgaagaacatgatctggtattgatcctggatgagattcagtgtggtatgggacggactggttccatgttcgcatggcaggagtacggtgtgatgccggatgtgatgacctgtgcaaaagcactgggctgtggagtgccggtgggcgcatttgtacttggtaaaaaagtggcagagacttctctggcacctggagatcacggaactacttatggaggcaacccgttcgtatgcgcagcggtcag

SEQ ID NO: 4182 - DNA, 2426 bp, Unknown
  16S sequences of unknown bacteria
aaaaatgcaggtttttcaggttatttcattatttgcggttcgaacaaaaagctgtttacaagcctttcccataaatatctcggaaataaacgtgttaaggtaatcggacatacagataaggtggctcggtatatggaggcctgtgatttgttttacacaaagccgggaggaataacatccaccgagggaacggttatgggtgttcccatggttcatatgaagccgattcccggttgcgaaagcagaaaccgcaggctttttgttaaaaacggtatgagcgtttcggcgaggggagtgctttttcaggctgtttcgggtataaagctgcttgaaagtcccgaacggtgcaaggccatgataaaggcacagaaaaaacaggaggcaggaaaatccgccgacaaaattgccgaatttatagaaaaaaaggttgaggagtgatttgatgctctggttgctttttgtgcttttcggatatttatccggcagcgtgctttattgctattatcttcctctttggataaaaggacttgacataacaaaagacagcagcgacaaaaatccgggcgcatttaattgcatttcgagggcgggtgccgcaatcggaatccccgcgcttcttttcgaccttctaaagggaacgcttccgattcttcttgcctgtaattttctcgatgtgaagaatttgacctttgcccttgttttggcggctcccgttttgggacacgcctttccgattttcagaaatttcaggggtggaaaggccataaccgttacatttggtactttgctcggacttcttcctttttggcagcctgtcgttttgcttgcggtcatttatattttcttttcccttgtaattcagatatatcccaaccgcagccgctccatgctgacctttttttgcttcggagtgctgtcggtggtttggataagggcgggcgccgtgtctctcggatgcgcggccagctcctgtattgtgttttttaagcacaaattttcatttgtgggtgaaaacgagacttttttcgccaagctgccctttggctccaaatattttttcaacaaatagattttgctccgacggtgttttttgtcggagcatttttgtgcctttttggtattgcactcgaggtgtgggtgtggtataatatctcagcacggcggatttgttccgttttgcccgaatggtataaatttatgtcggtaggtgtcgataatgagtaaagatatatacgaaagcccgctgaattcgcggtatgccgggaaggaaatgaaatatattttctctcccgataagaaattcaccacttggagaaagctgtgggttgctttggccgaaagcgaaaagcagctcggccttgacattaccgacaaacaaattgagcagatgaaggctcatatagacgatgtgaattatgaggtggcggaaaaaagggaaaaggaagttcgccacgacgttatgtcgcacgtttatgcctacggggttcaatgccccgatgcaaagcccattatccacctcggcgcgacatcctgctatgtcggagacaataccgatgttataattatgcacgaggctcttgaggtcgttcgcaaaaagcttgtgaacgtcataaatgcgctttgcgattttgccgaaaaatataaggatatgcccaccctcggatttacacattttcagcctgcccagctgacgacggtgggaaaaagagcgaccctttggattcaggatcttgttatggaccttgagtgtatcgatgaacagcttgcaaagaaaaagctgctcggctcgaagggtacaaccggaactcaggccagttttctcgagcttttcggaggagaccacgaaaaggtcaaaaaacttgatcttcttattgccgaaaaaatgggctatcccggcgtttttgacgtttcgggtcagacctattcacgaaagcttgacagtcagatgatgtttgtgcttgcgggaattgcccagtcggctcataaattcagcaacgacataagactgctccaaaaccttaaagaaatcgaagagcctttcgaaaaaaatcagataggctcctctgccatggcgtataagcgcaatcccatgagaagcgagcgcatggcctctttggcaagatatgtccttgccgacacattgaatccgcttatgaccgcgtcggaacagtggtttgaacgcactcttgacgattcggccaacaagcgcataagtattcccgagggctttcttgcggtcgacgcaattctcaatatttatcttaatgttgccgacggtcttgtggtttatgataaggtcattgaaagccatataatgaaggagctgccctttatggccaccgaaaacatccttatggatgcggtgcttgcgggaggagaccgtcaggagcttcacgaaaaaatccgtactctttccatgcaggcgg

SEQ ID NO: 4183 - DNA, 2477 bp, Unknown
  16S sequences of unknown bacteria
gtgtataagagacaggcccctgccgtgcaaaaatccagctgaatgccatggatgttgaaatcatcagcaaaattacagagcctgccaccgcagaatccaccagtgcggaaatgaactgccggacggtcatttcccgatagatcaggaaggaaaccaaaatgccgtagaccactgccacaacggaagcttctgtcggggtaaaaattccgccgtagattccgcccagaatgatgacgggcatgcccagtgccggaagtgcagaccaaatgattttaaacacttcgcccttggcgtgctgttcatggctcccgccgtaattgcgcctgcggcaaataatgtaagcagtcaggcacagtgcaattgccaaaaggattccgatgacaataccgcccaaaaacatgtcgctgatggaaacgccggtacatacgccaatggtcaccatgagaatactggggggaatcaggggacccaggttgcccgcgacggagatcatgcctccggcaaactcctcatcatatccatctttcagcatttccggatacatgattccgccaatggcggaaacggttgccggtgcggaaccggacagtgccgcaaaaaatgaacatgccacgattgtggtaatggccaatcctccccgcaccttggcgcagaggagctttgccacctgtacgattctggcagaaattccgccatactccatgagttttcctgccagcataaacatgggaatggccaggtaggaaaacgagtccactccggcaaacattctctgggcaatgccggttaactgaacatcacacgccagcatgcccacaccggaagcgacacccagggaaacggcaatgggaacccccagaaaagccaacaggaaaaatgtgcccagtaggatgaaaatcaggctcatgccgaaggcgcctcctccccagttttctccgtaaatgcattcggcttaaacacctggatggtcatgaagatcaattccagaataaacagaatgccccatgtcggcaaagccgcatacacaaaggccatattgagccgcagggctgtcgaagtttgattaaatgcaatctgtgtctgcattacttccagcgccatcactgttacaaccaacgcaaatcccagacaaactgcattggcaaagcaggtcatggccatgcgaacttttccgtgaaaacgattgattaagacatcgatgcagcaatttgctccctgccgaaacgcaatgacagaggcgaggaacacctgccaaaccatcaaataccgcgcagcttcttcgggccaggcaattgtggccttaatcagggtgcggtttaccacctgaataaacaccaccagaaccagaagtactgtgacgaccgccacgaaaaaactttccagcttactgactcctttataaaatttcatggctaagaccgcctctcctcagtgccgcaagcggcggccatcctcctttcctttgatcgatggggattaataggcgcagttgcggatggattcaatcagatcttcaggaacaatgtcatagaactgtgcgtaaatctggtccgtaatggacttgaaggcctctttgtcgatgtccgtatgaaccgtaacgccatcctcttcctgcagctccgtcaggtacttggattcccgttccgccacatctgcacgctgcagatcccgtgcttccgcagccgcttccttcaggatgttctgctgctcttccgtcaaggagtcataaacagcactgctcatcagaagggccgtggcgccatagaagtgctccgtcaggctcagctccttgcagacctcataatatgcactgctgtagtatgcgcagatggcgttttccgcagcatcaatcgtgccctgctgcagtccggtatacacttctccggacgccatgttggtgacgattgctcccagctcgctgaacgtggtggtctggatctcattttccatgatccggatcttggtgccctgcaggtcgctgggcgtccgaatctccttggtggaaaagatgttgcggaaaccgttttccatataggcaagacccaccatgccctggttcttcagctcctcaaacagctgcgttccgatttcaccatccaaaacggcatacgcatgctccttggagtcaaagaggtacggcatatccagcaccgacatcttgggatagaagttgctgatgggcgccgtggaaaccagtgccagatccaaattgcccagctgcagggattccatcatctcgcgctcttgtcccagggtgccgtcagtgtggacttcaatctgaatggtaccgttggacttctcatttaccagctcggcaaatttatccacgccaaagtcaaaatggctgtcttcggccagcacatgtccgcatttgaggacaatcgtgccgccctcttcacttccctcgtcaccagccggggtattatcggcggtctgcccgcacgctgcaagagacagtagcaggatggaggtgtgcc

SEQ ID NO: 4184 - DNA, 20351 bp, Unknown
  16S sequences of unknown bacteria
gcgtgtatcaggagagaagaatcagtgaacattgcagatataaaaaagaaagcgaggacagatgtgatgacaacaaccgaacgctacaaagcggcaaaggaactttacagggagattggtgttgataccgatgcggcgctgaaaatattgaaaaaaattccgatctccctgcactgctggcagggagatgacgtcggcggatttgaccgaaggggccccctgaccggcggtattcaggcgaccggaaattatccggggaaggcgcggacgccggaagagctgatggcagacatcgatgaagtgctggcacttgcaccgggggcggccaaactgaatctgcatgcttcctatgcgatttttgaggaggggaaatttgcagaccgggatacactgcagccggagcatttttcaaaatgggtggagtttgcacgtgagcggggacttgggctcgattttaatccgacgctgttttctcatccgatggtaaaggacaatctgaccttatccagtccggatgaagaggtgcgtgcattctggatccggcactgtcaggcatgcatccgaatctcggaatattttgcagaggagctggggcagccctgtctgatgaatatctggattccggatggctacaaggatattccggcggatcgtctgtcaccgagaaaaaggttcaaagctgcacttgatcagatcctggagatgccttatgataaagaaaaggtgctcgtcagtcttgaatcgaaggtatttggcatcggactggagtcctatacagtcggttctgccgaatttacggttaattatgcggcgagccgtggaatcctgctgctgatggacaatggccactatcatccgacagaggtcgtatcagataaaatttcttcgatgctgctgtttttcccgaagctggccttacatgtcacacgcccggtgcgctgggattcggaccatgttgtactgtttgacgatgagacaaaggagatcgcaaaagagatcgtgcggaatgatgcattgaaccgggtgctgatcggactggacttctttgatgcgggcatcaaccggattgcggcgtggacgatcggcatgcgcagtatgagaaaagcactgctttatgcgctgctttgtccgaatgaacatctggcagcgcttcagcaggaaggaaagctgactgaggtgctgatgctgcaggaggaattaaagacgatgccgtttggagcagtgtgggatcagttctgtgaaagctgcggcgcgccggtgcgcaatgcatggtatgaaaaggtccaggaatatgagaagcgtgtattggagaaacgcgtttgaaaaggaggatttgtatggaaatcacagaaatcagctttgtccggggctttatccggatgtgcaatgatggttgggagcagggatggcatgagcgcaacggaggaaatctctcttaccggttaaagccggaagaggtggaggagatccgtccgtttttaaatatgaacggagagtggaaggagatcgggacagatgtgccgaagctgtccggggaatattttatggtgaccggaagcggaaagtatttccgaaatgtgatacttgatccggcggattcgacctgcattctggaaattgatgagacgggaagcaaataccgcatctgctgggggttggtgcatggcgggcgtccgacgagtgagctgccaagccatctgatgaatcacgaagtgaaaaaggatatttccatgggtagacatcgggtcatttatcatgcgcacccggcgaatgtgattgcgctgaccttcgtactgccgcttacggacgaagtgtttacgcgggagctctgggagatggcgacagaatgtccgattgtatttccttccggaatcggtgtcgtcggctggatggtgccgggtggcagagagattgcagtggcgacaagtgaattgatgaagcagtatgatgtcgcaatctgggcacatcatgggatgttttgctccggtgaggactttgacctgacattcggacttatgcatacggtggagaaggcagcggaaattctcgtaaaggtctattccatgaccggtgcgaagcgccagacaatcactccgcaggatttccgggatgtggcgcgggacttccatgtgactgtgccggagaagtttctctatgaaaaaagcaatctggagcgtccgtagcatgcaattttccaggcattgacaccggaaagacggctgtggtagaatttagttcggatatgaaatgaggttgtggaggttttatgcaggcagaggtaatgctgaaaaaaacaattgattatcttagcggacatcttccgggatttgcggagctgatcgtgaagatagttctctgtgccctgatctatgtgatcgggaaaaagctgatcgcgaagctggtgcgtgtcgtgcgggccatgctggataagagccatgtgtcaccgggagcggcgaccttcgtggtatctatgctgaagatcatcctctacctgacgctgatcctggggattgcgatgcagtttggacttaaagagtcgtcagtggcggcgctggtggcatccggtggcgtggcaatcggcctggccttacagggtggcctgtccaaccttgccggcggctttctgattcttttgtttcagccgtttcagatcggtgattacatcctcacgcagggacaggaagggacggtacagaaaatcgagatcctgtatacgacgcttcacacgatcgataatcgcaaggtcattgtgccaaacggcaatctcgccaacaatgtgatcgtcaatgtgacggcagcagaccggcgcaagctggagatcacagtcggcatttcctacgaggactcgatccagacggcgaaggcagtcctgcagcggctccttacggagcatccgctggtgctgcacgatcaggaggcacaggtatttgtcacagagctgggagagagcagtgtcgtgcttggcgttcgctgctgggtgaagacagatcagtactttccggtactgtggcagctgaatgagcagatcaaggaagcatttgatgaggcgggtatccatatcccgtatccgcagatggatgtgcatatgaaacaggaatagaggaaaaatgaatcaggtgtgggctgcagatcggaatggtctgcggccttctttacaatttcaagaaaatcggtataatagggatagcaattcatagttcaccagaaaggaattactatttatatatgaagaaatggaacattgtcatcgttgctgctgccgtatcagtactgcttggcggctgtgcgatgggcggcgcgaccggagataagactacgcagggcgtgcaggcgttggagagcggggattatacgcaggcacagcagctgtttatggaggctctgcaaagtggcgagcaggaaatgctggcataccggggactcggactgtcctgcatgggactggcgcagtacgaggacgcggaggccgcctttacttctgcactttcggcagcggatgataaaatgccggagaacaggctggatttgcggttgtatctggctgcggcgcagtaccgccttgcggaatatgaaaaagcggtggatacgtgtacgactttgctggaggatgcctctgatggaaatgaggatgcctattatctgcgcggagccagtgaactgcacgagggcaatacagatgacgcaaaaaaagattttgaccgcgcagtggcattcgatccgacggactatgatctgtatctgaatatttatgagacatacagccagatgaatctttctggcgtcggaggggattatcttcagagtgccttgagtattcagggagaagagctggaggattactacaatcgcgggcggatttattattacctcggaagctatgatcaggcacagagtcagctgatcattccggtagagcagaaatatgagcctgcgatggacctgattggtcaggtatatctggcacagggggattatgctcatgcgaaagacatatacagtcagatgcagacggaattcggagaaagtgtggacagctataacgggctggcgctctgtgcgatcgcagatgaggactacgatggcgcactgtcctatatcagccaggggctggcgcttgacgggacggagggcaagcaggatctgtactttaatgaaatcgtagcctatgaaaagaagctggatttcgtgacggcaaagacaaaggcagaggcatatgttgccagctacccggcagatgaggcagggcagaaagaatggaccttcctgtcgacaagagaataaaaagtgaggaaaagagtttgatcgaattaaacgaaattcaggagaaggtgcttctgcttggcgtacaggaggcagacggggatgacacggaagagtctgttcgcgagctgggagagctggcggcgacggcgggagcacaggtggccggaagagtcattcaaaggagagagagtattcatccgggaacctatcttgggaaaggaaagcttgatgaggtgcgtgcgcttctgtgggagacggaggctaccggcgtgatctgtgatgatgagctgagtccggcccagctgaacaatttacagcaggagctggattgcaaggtcatggatcggacattgctcattctggatatttttgcaaagcatgcgacttccagcgagggcaagctgcaggttgagctggcgcagctgcgttaccgggcggcacggctgacaggccttggcaattctctgtcacgtctgggaggcggcatcggcacacgtggaccgggagagaaaaagctggagatggatcgacgcctgatccggacgcgtatcagccgactgaagcaggagctggaggaggtcatccggcaccgggatctgatccgtgcccagagaaaaaaatcagaacagaagattgtcgcgctcgtcggctacacatctgttgggaagtcggcgctgtttaatgcgatgaccaatgcaggcgtgcttgaggatgcaaagctgttcgcaacgctggatacgacgacgcgcggtgtgaagctttccggtaagcaggagatccttttgaccgacacggtcggatttatccggaagctgccgcatcatcttgtggaggcctttaaaagtacactggaggaagcctgctgtgcagatatcctgattcacgttgtggatgcgtccagtccgcagatggagatccagatgggagtcgtatacgagacactgcgggaactcggtgcaggtgataagccggtcatcaccgtgttcaataagcaggatctgctgatggaacggaggatttgcagggatcaccatgcggaagtatgtattccggcatcggcaaagctgggggagggactggatgatatccgccatgcgatcgagaaaattctgcgtgagcagaagatatacattgagcgattgtatccatatgaaaaggcggggctgatccagttgatccgaaaaaaaggcgagctgctgacagaggaataccgggcagacggcatttacgtgcaggcttatgtatcaaaggaaatctatgtgaagatatgaaaaaacactttcaaaatatggatctgcgtgacatccgcgatctgaaggacgcatccatcaataaaggaaaacgagggatcaagcatatcgtattcggacggaccggattgctgcttggatttattcttttgcaggtgctgcttttgtttctcgggctgaatgtgctggcgaagtatgtgtatgtgttttttggcggctatctggcgtttggtcttgtgattctgctcattatcctgaaccgcacggagaatccgacttttcagctggcatgggcttcgctcgtgctgctctttccggtcgtcggcggactgatgtatttgtattgtgaactccagccggggactgcgctgctctttgcgcgtattacagaaattgacagggaaactgtgagcatgctcaagcaggaaccgaaggtgcttgcagaccttggcaggaaggattaccggatggcacagctggcaaactatgttcagaagaatggctatcctacttatcagaacacggaagtaaaatattttccgggtggagaagacttttttgaggaactgctggtacagctgaaaaatgcgaagcggtttatttttctggaatacttcatcattgcggaaggtctgatgtggggagaggtactcaagctcctgaaagaaaaagtagaagagggcgttgaggtgcgcgttctgtatgatggaacgaatgaactcttcaatctttcttatcagtatccgaattatttatgtggtatgggtattcgctgcaaggtattttctcctgtatatccgatattctccacacattacaataaccgggatcaccgcaagatcgttgtgatcgatggaaaggtggcttttaccggaggcattaatcttgcggatgaatatataaatgtaaaggaacgtttcggacactggaaggatgcagggctgatgctcaccggtgaagcggtcaggacttttaccgtcatgtttctgaaaatgtgggatctgacggaaaaaacggagaatatggctctgtatctgaaacaggatctgcagccggcatccgaaaaggagcatgcagtgcggccgtatcatgaggcgcaggccgagggatttgtccttccctatggggaaaacccgtttgcggcggatcgcacagcggagcgcgtttatctggagatcctgaactgtgcgaccagatacgtgcacatcatgacgccgtacttggtaccggatcaggaattgctgcaggccttatgctatgcggcaaagcgcggtgtggatgtgaagctgattttgccgcatatcccggataaaaagtatgcgtttgcactggcacattcctattacaggcgtcttatgaaggcaggcgtgaggatttatgaatatacgccggggtttgtacatgcgaaggtgtttgtgagtgatgacatccgcgcagtcgtcggcgcgatcaacctcgattttcgcagcctgtatctgcattttgagtgtgcggcacttttatatggcatgccggaaattcaggcgatcgaggatgacatccgttcgacactcccgaaatgccagctcgtgacgccgttcgacgtgcgtcatgataaatggacgcgcaaggcagtcggacagctgatgcggctcgtggcaccgctgatatgatgatgctagggtcaaaaggtcaaaaagccgttcatgcttgcatgataaggcttttgaacttgggacccgccaaacatgagaaagtagcgatttacgtagtaaatcagcggatttcgaatgtttgcagaattgcgggagctgcttcgcagcagagcaattcgtaggcatcagttttgggcaaaataccttttgaccccaacaacaatatctcattattaaaagggtacaatggagacagatttatgtggaatgatcgaatagaacagacggaagagctgcgccgcaggcattacttaggcggcgggcaggcacggatagacaggcagcatgcgaagggaaagctcacggcgctggagcggattcagtatttgctggacaaggattcctttcatccgacaggaagtctccacgcgacgcgtgaggacagtgcttctcttctgaaggaaacgtttttgggagacggtgtcatcaccggctggggaacgatccatggcagaaaggtgtgtgtggcatctgaggactttaccgtgatcggcggtacgctcggagaggtgcacgctgagaaaatctgccggatacaggacctggcctacgatatgcgtgtgccgatgattttgctcaatgacagcggcggagcccggattgaggagggcatcctttccttaagcggctatggcggtatttttcagcgccatgtaaaggcgtccggtgtgattccgcagatcgcggcgatcctggggccgtgctcaggtggggcgagctattctccggcgctctgtgactttgtttttatggtaaaggatctgagcaagatgtgtctgaccggaccggcagtggtcgagtcggtgctcggtatcaagacgaccttagatgagcttggcgggagcgaagtacacggaaagaagagcggggtggcacatgtcgtatgtgaggatgaaaagacctgccttgatgagatccggatgcttctgacctatcttccgcagaactgcagcaaagaagcgaaggcagagctggatgccttgcatcaaccgccgagggagacaaacggctggctggccggaatgtttcatcgcacggagcagacacgcacaccggtgcggtttgaagagcttgtcccggataattccagacgcgcttacgatgtgcatgccgtcattgacaacctgctgctcaatgacagcttttatgaaattttccgggagtttgcaccgaatgcggttaccggctttggcgtgatggatcatcatgtgatcggagtcgtcgcgaatcagccaatgtatctgggtggagcgatcgattatgatgcggccgataagatggcgcgcttcatccggttttgcgattgttttcggatcccgattctgacgcttgtggatgttccggcctttttcccggggccgcagcaggagcaaaatggaatcatccggcatggggcgaagatcctttatgcattttctgaagcaacggtgccgaaggtgaccctgattatgcggaaggcttacggaggtgcatttatcgcgatgaactgcaaaatgatgagtgcggatgtggtttatgcgtggccgatcgcagagatcgctgtgatgggagccgagggtgcggtgaggatcattgaccgacaccggattgagcaggcagaggattctcaaaaggagtatgaggtatgcaagcgggcatatgaggagaagttttcgaatccgtttatcgcagcgcgtaagggctatgtggatgaggtactcctcccggaggagacgacggcacgcctgacggagacattccggttccttgcggacaagtacgaagaggagacgtcccctgcggtacgcaagcatgggaacatgccgttgtagcatcacaaaatcataactgaaaaccgcgaggtggacgcgcatgcgccgcctggcctttatacaggagaaacaaatgatattttcaacctaccaatttatttttcttttcttaccggtgacttttttcgtatattttctgctgaaccggttccgctattattccattgcaaagatatggcttgtgcttacctctctgtatttttacggacagggcagcccggatttctttccgttctttcttggaagcgtcgttggcaactatattgtcgggacctgtcttgtccgcatggacggtgagcagaagacgcagcgcaagctgttgctgctgattggtattctggcaaatgtcggactgcttggctattataaatatacggatttctttattgagaactggaactttttaagcggaagtgattatgcattaaagcacatcgtcctgccgatcggtatttccttcttcacatttcagctgatcgcgtttctggtggattcgtatcgcggagagacgaaggaatatgacatgattaactatctgttgttcatcaccttcttcccacagctgatcgtcgggccgattattcatcatgcggaggtcgttccgcagtttgaggatgagaagaatctgaagctgaatccggaacatgtagcggcaggtctgttccttttttcgatcggctgtgcgaagaagattcttctggcggacccgctgacgacggatgcccaggcatttttcggaaacattacggacgcactgccaatgatcggttcgtggtttcattcgatcgagtatacggtgtcgtactattttgatctttccggttatgcggatatggcgatcggcttgggtatgatgttcaacatcgtgattccgcataactttgattcgccgtataaggcgcgaaatttccaggattactggagacgatggcatatgacgctgtctcgttttctgagtaactatattttccgttccgtctataaaaaaggaacgaaatggcgcaactactatgtggcaacgatggcgaccttctttgtatccggtttttggcacggtgcaggctggacctttgtcgtctggggaatcgtcaacggctttttcgtctgcacagcgagctggatgaaacgcaggggaaagcatttcccggcgcctgccgcttatctgcttaccgcattgggcgttgtggctgcgcgggtactgtttgtcgcaaatacatttaccgatgcatggaatgtttaccgaggaatgctgaatgtttcctcactggagcacagtgtgtacggtatactccgccagggctggggatttgtaaagggaaatggaagatgtacggtactgctgctgattggtctgtttatctgctggttcctgccgaactccaagacgatgcaggaaaaattccgcccgacctggaagagcgctctttacgctgcgatccttctcatcgcctgcatcacacagatgaaccaggtagtgcagtttttatacttccagttttgaacaccagtttcgagtgacgacaaaacggaaagacagattggagcaaatttatttgcggaaagctgtgttttcgagccatcgtagatggcgaatagccctgtaagggcggtctgtggattgatgctcgaaacgcccgcattataatgaatggagaatacaatgaaaaaaggcaaacaatggctgatcctctttttcgcagtcgtcgcagtcggaacggcggctttcatgatggtcaactacatgatcgatccgaccggatacttttccgtagagcgcaaagccggagaggttgatgcgaacggctatacccgtgctgcgaaaagtaaatatattaagaagcataaggatgaatataatgcagtcgtgctcggcggatcgaagtccggtgttctgagcacggagctgctttccgagtataccggaaagaattattacaatttctattttgcatatggctgcttttctgatttcctcacatattcccgttatctgatagagacagcggatatcgatgagatcactcttcatctgagcagcatcgaggtgcagcagtatgaccgctctgcgacaaatgagatttatgaggtgccggcggttgtggatggcaatgccatcgacctgttgcttgagaatctgaactatctgtgccggaacatcaattccacggtttcctatgcgatggaaggaaaagagaatctggagaagggtatggataatctgagcacaggagagcggaactacagctatccgtacagcctgatggaggaagatgcggatgcttatgtacagaagtatgtgctgccccgttacacgaagagcctgaagaagctgtttgctggtaaggatccgagtgcgcctgcgatcaatgataacattacggcaatgaaacagatcaaggagctgtgcgatgcaaatgatgtgacattgaaggtcgtgatcgggccgaccttccttgcggagatgtataagttcgaagggcaggagtattataattacctgcgcgagctggtacagatcacagatatctgggatttttccggattccttttagaaaaccggaatccgtataatttcgtgaacgaaggccattataaaaatgtagtcgcggatctcatggtgaatatcatgtatggaaagaccgagcgggacggctttggtatcctgctgacaaaagataatattgaggactatcttgcaaagcgccaggcagactatgaggaactgaagcaggagtatgaggcgaccggaaatgtggcactcgagactgcaaataatgcgagctatatttcatctgcaatgtagacgtcaggcagatgtgcatcaggttgggtcagagcccgcaggcataaaaatacgccggaaatcatttcgtgatttccggcgtatttttcaggaaatatttttaagccagcgaagacagcttttgcagtgcctgctcagcgataatcgtctccatatgctcggcaaagtgcgcatccagtcccggtgtaaaccgcccgatatccgcgtattcagagagaatgttgcagaccttgttgaactgttcggcagtactgtccgccttacggagaatcaggtagtagctgccgttctccggatttttgtacagggcattcggaccattgtagatagagccgagaacagcggatacgtggatcacgtcatccagtgtacggaaaatataaaaacgggtgagcttttgcagatcttcatcatcgaggagctccgaagctgcgggctgttcctgggtggcttcctttgcaggagctgcgctgctgctctcacgggccgcatgctttttcgcctccgaaatgcggcggatcagcccgagtacatcgtcggcaccctcgatcttatccttcagatccgggaaggtggtatcggaagccggtgcatcggtctccggagagaagcgtgcaaaacgggtgtcgagctcttccggatcgtctacctttgtgatgatgagcacgatggtctccatcgataccgggatcgcttctacgacgagcggcatattttccgcctcgaagccaaagtcttcagctgcctgctgcatcatatcctgaaacagcgccttggctttatcagaaccgtaagcaagttcgctgagcttgatctcgcggctggccaggtcttccttggtcagcgtgcagcgaatctgccggtcattgattttttcaattttcatgttatcacatccttacttttgggaaatcccttaccttatcagtatacacatatttcattcgatctgtaaagaggatcgaaaagtacagcgttgaaaaagatggaaaaacgcttgcaatcagaacacatattatatataataaataacagaaaggatatatggatattcttataaatgcttacggaaaggaggattattctggtcatcatcttgtttatcgctgtactttccagccatatatcccttcggaacaccttttacgcattataatcaatttctatattgaacgcaagtgaaatcataggaaatctgcggacatagcaaaaatatatcacgatacctccttttatgggacggacaggatcgaatgccgcctgtaccatccggggaatgcacaggtccggcagagaaatgatcagctgcacaggggaagggatggaaaatccacgaaaaagacgaaaggaaacagcgttcaaactgcgattcctccgaatgcattttcttatttttttataaatatcccctgaaattaatgacgattgtcaaaagaactgctataatcacaggaactgtgaaaagcatttcaggacaaggggaggtacagcgatgacagataaaagaaaacgcttccgcttttttgcggtgttgcttgccggaattggggttctggcaatttttattgtctgcctggtgaagtttatgccgaccggaaagcacatgacgtcggaagagtattttggtcagcttggggagacagaggcagcggtggttgtagaggatcacattgcgcaggaacgcgcactgattcaggatggaaacgtttatattgactatacacttgtggagcgggagctgaattccaggttttactgggatgcatcggcgtcccttctgctgtttacgacgccgacgcagacatttgagattgcaccgaatacctcctcgtatatgattgacggagagagctttgatgcgggctatgatattttgcgaacgacatcctccgggatgtttctggcgatgaatttcatgcagcagtattcggatcttatctgtgcggtttatgatacaccgtccagagtcgttatcacatatggaagtgaatcggtcacgacggcggagcttaagggagatacggcggtgcgttaccgcggcggaatcaagagtccgattattacggaggccacgggcggcagcattgtgaccgtactggatcagatggacaaatggtcgcagattctcacagcggacggctatatcggctatgtgaagaacagccgcttaaaaggaattgcaacgaccacacgggataccgtctatgcgtcaccggattatacaagcattcacatggatggcaaggtcaatctcgtatggcatcagatcaattatgcggagatgaacagtgaatttgcttcggatactgaggcggtgacgggagtgaatgtggtctcaccgacctggtatttcctgcagaataatgagggagatatcgagtcctttgcagatgcctcttatgtggaggctgcgcatgcaaaagggatgcaggtgtgggcgcttatcagtaatttcagcgaagatgtgaatacctcgacactgctcgcttcgcgagccgcgcgtcagaaggtgcagaactatctggtgagccaggcacaggagcttggatttgacggtattaatatcgattttgaagggatcgcacaggaagcgggctatgcttatgtgcagttcatgcgtgagctgtcgattctgtgccggaagagtggaattgtgctttccgtagatgtgccggtgccgatggatttctcaaagcattataaccgtaaggaactcggcacggtatgtgactacgtaatcatgatgggatacgacgagcactatgcgggttcggatcttgtaggcagtgtggcgtcgatggagtttgagcgtacgggtattgagaattccctgacggaggtgtcaaaggagaagctcatcagcgcgattccgttctatacgcggctgtggtatacacagaccgccgaggatggctcgacgagcgtgacgagtgaggcgcttggtatggagagtgcacagcagaagctgacggaaaacggagtcacatcgacctatgatgaggcaacggagcagcagtatgcagaatggacggatgccgagggacgcttctgtcaggtatggctggaggatcaggattctgtcacaaagcgtgcatcgcttgtaaaagagtacgagcttggcggtattgccgagtgggtgcttggaaatcagcaggactgggtatgggagattatttctgcaaacattgcctagtacatggaaggagcagcatggctgaagaaagccgggctgctccctttcgttttcggaaaatacgtgcaaaaccaatgcccgcacttgcgtgctacccggaaatgcattataatgaaaaaatgggttttaccacgaaaaagaacggagtgtacagaaaaatgacagcgaccgtaattcaaaaattaaagctggatgccggcagcggcaatgagatctatgtgaaacgggatgatttgcttccattttctatcggcggcaacaaggtgcggatttccgaagccttttatgcggatatgcaggcgaagggctgtgacacgatgatcatctatggcagccggcattcgaatctgtgcagagtgctgtcgaatctctgctgtagccgtgggacggactgtgtgatgatctgttcccatgaagcggacgaagaggcagcggcgacgaataatacggcgctgatcgaatgggcgggcgcacaggttgtcaattgtggaaagcaggagatcgcgcagaccgtagagcgtgtgatgagcgagattgaggagcgcggcgggaagccctactatatttatggaaataagttcggagtcggaaatgaagggactgcggcttctgcctacgcagatgcgtatgcggagattcagacgtatgaaaaggagtgtggcaaggaatttgactatatcatttgcccgtccggtaccggtgcgactcagacaggactgatctgcggacatctgctgtcaggcgaccggaaaaagattctcggtgttatgatttcctcccgcgagacaaagcgtgcatatcaggtgattgaggaaggcatccgggattattttgcaaagcatgatcttgcattgcctgcagcttatgcatcggagattcatctgctcgatcagtaccgtcaggagggctacggcaaatacgatgcgcggatcgaggcgtgcatcagggagcagtaccgcacaaacagcctgccgctggatccgatctataccggcaaagcgttttggggcatgcaggagtacttaaagacggcgggcatcacggacagccggattctgtttctgcatacaggaggcaccccgctgttttttgactatgtgtcaaaatcagtttcgcgcagcagcgaaatgtaaagagcgtgtctggggcctgcgcgaaagggaagagacgttcaagagagcaatagaaaacttaggagatttaacatgctaatttcagtcgtaatcccctgctattattcggagaagacgatccgcaaggtcgttgagctcgtgatggcagagtttgaaaaaaatgatggttatgaatgtgaatttgtgctcgtcaatgacggttcgacggatcacacgtttgaggagatccagaagcttggcgcacagtatccgaatgtgtgcggcgtcaatctgatgcgcaacttcggacagcacaatgcacttatggcagccctgcactatgcgaagggcgattatgtgctcggtatggacgatgatctgcagacgcatccgtcccagatgttcaagctgatccacaagatagaggagggctatgatctggtctacggtgtctatccgcagaagaaaaattcatggatgaaaaatcttacgagcaaaatcaatgaggtgacctcccgtgtgatgctgaaccgtccaagggagatcgtatcgagtaatttctggatcatcactcgtgcggtgcaaaaggaggtcatcaagtatgacagcttcaacccgtacatcgacggtattttttaccgggtgacgcatcggattgggaatgtaccggtcgagcatttcaagcgcgaggtcggtacttccggttatacattaaaaaaactgatcaatctctggctgcgctactggaatttttcggtgattccgcttcggatctcatttttcctcggtctgttttccgggctggcaggtgtgatcattgcggtactcatcgtcgtaaatagaatcatttatccggatgtgccggtcggctggtcctcgaccttatgcgtgatggtcgtgctgttcggccttgtgctcatggtgctcggcgtcatcggagagtacctcgggaaaatcattctgattctgaataacacaccgcagtatattgtgcgtgagaccatcaattccgatgcggcggcatccgagaaggtacggacgctgatccgtgcggcggcgggcgaagcggcagcggcgacggaagaagagccggaaaaactgtgacggtacacctggcagtgaaacatttgctgctttgctgcgtaagaacgtaagtaaagcgggaagattctttgtgagtctgagatcgcggaagtgattttccagatacattccggacaggaggaaattacattgagaaaaattatgatactgggagccagcatttatcaggttccactcataaagacagcaaagaagctcggattgtacacgatcgtggcgagcattccgggtgaatatccgggctttgccattgcagataaagtatatgagatcaatacgacagataaagaagcgatctgccgggtatgtgaggaagaacaggtcgacggtatctgcacgacagggacggacgtggcagtggcaacgatcggctatgtctgtgaacgactgcatctggccgggctttctgagcatgccgccatgctggcgacggataaggcaaagatgaaagaggcgttccgggaaggcggcgtgtcagcgtcggcattttaccgggcagagagctatgaggaggcatgtaaagccgcagagacgctcggttatccggtcgttgtgaagcgggtcgacagctcaggcagccgtgggatctcgattgtaaaggagcgatcgcagctgcgagaagcctacgacaatgcactggagcgttctcaaaagccgtatgtgctcgtcgaggagatgctcggcggtacggaaatcggcgtggacggcatggtacaaaatggcgagcttgtttttctggccccgcatgaaaaatttgtctatcataccgataagaccacgattccggcaggacacggattcccataccgtggttctgaaaaagtactctcggagattgagcatcagatgcggcttgctgtacaggcgctaggtctcgacaactgttcggttaacgcggatgtgttcgtggatggagagcgggtgtcgatcattgagatcggcgggcgtaccggggcgacgtgcatcccggagctgatttccatgtactacggttttgatttttatgagaaaattttacagaacgcgctcggatggccggtacagtttgacgcggaaaaacagggtgtattctgcatggcgaagcttctgatgagtccggtaaatggcgtgatcacgcagattcaggaaaaatggctgaagaagttgagggaaaaaggtgttatcgtggcattggattttccggtgggccatgccgtggaggccatggagaatggcacgacgcggatcgggcatgtggtcacagaggcggacagcgtggaagcgttagacaacatcgttcgcaaggtgtaccgctgtatctttgtagatggaacgtcactggaggaattatggagaaaataaaagattatctgtttttgcatctgtgtgtggcgctgttttcctttaccagtgtattttccaagctggcgtcgatccagtacaaccgaggcggtcttgcgaatcctcttctgtatgtatttgtgtttctgatgttttttgtatgttttgcatatgcgatctgctggcagaagatcatcaagcgctttgatttaaacatcggctatgcgaaccggagcgtctatctgctctggagtcagatctgggcagtatttctgtttggtgagcatctgacgatgcgcaacgtgcttgggatcgcaattgtgctcaccggagttgtcattgtatcactgagtgcagagcaaaaagaaaaaggagaatgagtatgcttccttatttattactcatgtttgcggcgacctttttttccgcaatctcgcaggtgctgctgaagcagagcgccgggagaacgtataagagtgtcatctatgaatatctgaactggcgggtcattgtagcgtatggcatttcattttcggtgctgctgctcaatacctatgcctatacagtcgtaccgatgaagtacggtgcggtgattgatacgtttacctatgtgtttgtcatggggctgtcatatctgatcctgaaggaacattttacgcggggacagctgatcggcaatctgattatcatcgcaggggtactggtctatactctgtagaattggcatacactgaataaaaagtgtgtggagtatgccatgcaggaacatgaacaactacataatatggaaaaaagagcagccgtgattcttctgtttctggctgcttttttggcgggaggaattctggcacagatccgggagcggcttgcgcatgcggcagagacggagaactggggactgagctttcagcaggaggggcagcggccggtggcaaatgcgacgatagaagagctggcagcctatgatgcctggtatgcgcaggatacggagaataaggtgatttacctgacctttgactgtgggtatgagaatggaaataccgggaagattctggaggcactgaataagcacaatgctccggcaactttctttgcagtgggaaatttcctgcgcgacaatccggagcttatcaaacagattgtgtcagaagggcataccattggcaatcacacgatgcatcacccggatatgtcgaaaatctctgacctgaattcatttcagaaagaaatgaaagaggtggagacgctgtaccgggagatcaccggacaggaaatgacgaaatattaccgcccgccgcagggaaaatacagcacagagaacctgaagatggcgcagcggcttggatatcagacgtttttctggagtctcgcctatgtggactggtatcaggatcagcagccgacgaaggaggaagcattttccaaactgcttccgcgcatccatccgggggcgattgtgctattgcataacacgtcagcgacgaatggaaacattctggatgagctgcttgcgaagtgggaggaacaggggtatacatttcatagtctggcagaactgagttgaacgcaaaaggaacgcttgtaaatctgaggttggtatgatacgatttgaacgcagataagcattccccccgcttcaagtgcgcggagcactaagcggcgggtgagggggatgcttatgtcagtgggagttgaaagctcccactgacagatcgcgaagcgactgcgttcatgagcaagtagcgaagctaggccctgtcagcagagctgcagggatggattgcgaatgtccgctttacag

SEQ ID NO: 4185 - DNA, 32759 bp, Unknown
  16S sequences of unknown bacteria
aacctatgaccctctgcttgtaaggcagatgctctcccagctgagctaagcttccgaacgcttatataatataccaaatctatataaaaaatgcaactattttcatcggtatttttaaaattttttttaaaatttttctgctccttatcaatttatgccgcgtgagaaatttttgtgaaattgcgaaaaaccgctttaattttgagaaaaatgcagtataataggaatgctgcggaaatttccgcaggggagggatactatgccgtctttatatacgcaccagattctggcggaaaaagtaatggaactcttgcccgagcgcacgcggcggtacgtcacgcgcgagggagaatatttcctcggcgcgcagggcggcgacgtgttctatttatataagatgcgcgaggggcagaaaaacctgggaaaatacctgcaccgcaagaacgtgtatatggttttctgcaattttttggaagccgcccgttcgggcgacgggtgcgtcacttcctatatcgcgggttacattactcactacgcgggcgacatcgtatttcatccttacgtatattctctattgaaccgattggaattcgaggatacgggcaactggaagggcaaccgccacgccctgatcgagagcgacatggacagttatttcgtgcgcaaatacaaagaccttaccccgcacgaatataaatatccgctctcctattcggatatttcctgcgagtctctctttcgtctgatggaagattccacgggggagaggaccaagcgcaacgtgcgcatgcacgctttcaagacggccgtcaagcggtttatccgctataaccgctggctgcacgacggcacgggcggtaaaaagaaattcgtgtacggcacggaaaaactattccatatcccgcacacgctgtcctcgctcattcaccgcgccgattacgacgagagttatttcaatctcgaacgcgcgccctggcgctacccgaacgacgactcgctggtgtttaccgacggcgtggacgaactgttcgaccgcgccgtgtccgagagcgtacgcctgatcacccgctttttcgactgcctcgaaaacgggacgccgctcgaatacaacgatttttccaaacactttctcacggggctggtcatcgggggataaaaatgtcggctgcgctttgttttccgttctttccgcgatatacttatgtcgggaggaaaagatcatgcgcagactctacgattacaacatgaacccgatcggatacgtttcggaaaacgcagacggcaaacagacggcgtacgacaccaactaccgcgtcctcggttattatttttccgggagcgacaagacgtacgacaacaatatgcggctcgtcgggaggggagatcttctgtcagccttttacgcgccgaccgcaaaaagatgaaaacagccgaccgcaaaccgcggtcggctgtttttgattattgctgcgcttcgagcgcttggatcacgtcgcctgcgatcttttccagatctttttccgtcggtctgtacgcctggcgcacgggcggcagcaacggctgcgccttgcactgcgtcaaagcgtcgtacacctgctggatcgattgtccgccccagccgtaggaaccgaaagcgataaacttcttcgcgttgcccgtcagacctttgaaataggtgagaaaactcgcgacgttgggcatcatgttgttgttgagtgtgggcgagccgaccgcaatgtatttcgcctgcatcgcctccgttatgacgtcggaattgttttcgcatttcaagtcgcacagtttgacttggatcccgcaatcgacgaacgccgtttccagcgcgtgcgccatccgttcggtggagtgccacatggtatcgtagacgatgacggcgcgttcttcctgttctcctgccgtccagcgctgatagcgggcgaggatctcggggatatgctttgtccagcagacgccgtggctggggcagatcatggaaatttgcagggaggagacggcttccagcgccttttttgtctgcaggccgtagggctgtacgatgttcgcatagtattttttcgcctgtttcaaaacttccggaaggtcgctgtcggtgtcgaaacgcgtggaggaggcgtagtgctggccgaacgcgtcgttggaaaagagaatgttttcgggcgtcatatggcagaccatgttgtcaggccagtgcaccatgggcgtggaaacgaaggcgaattcgtgtttgccgacggacagtttgtcccccgtctttacgccgacgacgggaagatcgccgtaatagccgccgaggtctttttctcccgcgggggaaaccgcgtagactttcgcgcggggcgcatggcgcaggataaagggcagcgcgccgctgtggtcgggttcggcgtggttggatatgatcacgtcgatcttgtcgggctctatgacggagcggatgcgttcgagcatttcttcctgcaggcaatccttgacggtatcgacgagcgtgatcttttcgtcgagaatgagataggcgttgtacgtggtgcctttttccgtttcgtacccgtggaaattgcgcacgttccagtctatggctcccacccagtaaacgttttcggatattttcaatgctttcataaaaacctccttgatccctgttttcgcgtgcattatataatatggatagaaaattttcgtgttgcatttgcaacatcggactatattatacacattttgcggaaagaatgcaagtcaaaaggcatatttcatgcaaaaaaatacgcaaaggggcaaaaaagagggacgaacggacgcaaaaatcattgacaaggcaaaaagaatatgataaactctaagaacacaccatcgtgaagaggtgtgatttttttgtacggagttttttaaaaatggctgctataaacagaaccaaagttacgttcgagtgtaccgaatgtaagcacagaaattacgacaatatgaagaataagaaaaacgatcccgaaagattgcagctcaaaaaatattgtcctttctgcaagaagcacaccgttcacaaggaatccaagtaaggaacgcgtgttcgggcgcttttgcccgttctctaaaattacaaagaggttgaaatgaaagcgaaatcggcagaaaaaaagcccaatattttcgtcagaatgggcagaaaactcaaagaagttttttccgaactgaaaaaagttacctggcctacgttcggtaaagtggtcaaggccacgggcgtcgttctcgtcgtcgtggtgattttcctcgtcattttcggggccatcaattacggtctcggcgagcttttgaaactgataacgagtttgggcagcggttcgtaataagaggagttgaacatggacaattctcttgaaagtcaggcaaagtggtatgttctgcatacttactccggctacgaggcgatggtcaaggcgagtctggaaagattgatcgaaaacaacaatctcaaagacagtatattcgatcttcggatccccatggaacagaccatcgaagagaaaagcggcaaaagaaaggtcgtggagcgcaaactcctgccttgctatgtctttataaaaatgatctattcgaaccaggtctggtaccttgtcaccaacacgaggggcgttacgggttttgtcggcccgcagggccgtcctcttcccttaaaggaagaagaagtgcgcaaaatgcaactcgaaacggtggcgaccaacgtggatttcgaggtggacgacgacgtcagcatcgacgcgggcccgctttcgggatttgtgggcaagatcaaggaactcaacgacacggcgcaaaaggcgaaggtcaacgtcatgatgttcggccgcaacaccgacgtggaagtggagtacgtccagatccgcaaaataaatcccatggaaattacgaaagagtaaggggcgacccttttttcttaaaaagtgggagaagcgcaaatatgtaatcaagcggcgctttgttaaaaccacaatattggaggagattttatggctaagaaaatcactgcggtagtcaaattgcagcttcctgcgggcaaggcaactcccggtccgcccgtcggctccacgctcggaccgcacggaatcaatattcccgggttcaccaaggaattcaacgcgaagacggccgaccaggcgggtcttatcatccccgtggtcatcaccatttaccaggaccgttctttcacgtttattctgaagactccgcccgtacccgtactcatcaaaaaagcgtgcaagatcgaaagcggcagcgcgaaacccaaccgtgacaaggtagcaaaactcacccgcgcacaggtggaagagatcgcaaagttgaaaatgcccgatctgaacgcgacttcgctggaatcggcgatgagcatggtcaaaggcacggcgcgcagcatgggcgttacggtcgaagagtaaaaaaggagtatgtgggagagtttatctcgcgattaccacaaggaggtttaagataatgaaatacgggaaaaaatatgccgaaagtctgaaggcatacgatcgttccaaattatacgacgtcgacgaagcgatggggctcgtagtcgatactgcgaaagcgaagtttgacgagaccgtcgaactgcacgtccgtctcggcgtcgatccccgccaggccgaccagcaggtcagaggcgttttagtccttcccaacggcacgggcaaatccaaaaaggttttggtcatcgccaaaggcgaaagggcggacgcggcggcagcggcgggcgccgattatgtaggcgcggaagaaatggtcgccaagatccagagcgaaaactggttcgatttcgacgtcgtcatcaccacccccgacatgatgggcgtggtcgggcgcatcggtaaggtcttgggcccgaaaggactcatgccgaacccgaaatccggcacagtcaccatggacgtcgcaaaggcgatctccgaagtcaaagcaggtaaagtggaatacagactggacaagaccgccatcatccactgcccgatcggcaaaaagagtttcggcaaggaaaaactttccgaaaacttcaacgcgctgatggacgccgtcgtcaaggcgaaacccgccgcggcgaaaggccagtatatcaagagcgtgaccgtcaccagcaccatgggacccggaatcaaggtcaattacgcaaaattataagtttatcccctcgaaaagatttgacttgccgctcgttttgcggtataatctttgagaatcgaatataccgcagaaagcaggcaccgcaaggtttaatcgtaaggcccgccgaggtacgaggtttttgtttgcatacaatgtttgcaagtccttatacccgcgcggtataaggacttttttaatgctaacaggaggtaaagacattgtcatctaatttagaagccaaaaagcaggttgtcgaagagatcaaagaaaagatccaaaacagcaagtcggtcgtatttgtcgactacaagacgcttaccgtggcggaagtttccgctcttcgcaataagttcagagaagcgaacgtcgaatacaaagtctataaaaatactttgctcaggaaagcgttcaacgatctgggcgtcactgctttcgacgaggatctgaacggtcctaccgctacggcgttctgtccggacgagaccaccgccgcaaagatctttgcggaagcggtcaaggctatgccggaaaagatcatccccaagagcgcctatgtagacggtgcgtacgtgggcaagagcggactgaaagcgcttgcggaaatgccttccaaggaagaacttctcgccaagatgctcggttccatgcaggcgcctatcgcgaatttcgcgggcgttctgtccaatatgttgagaggcgtcgttgtcgcgctcaacgccatcgccgagaaaaaggcgtaaaacgtttcaaaataatcaattaataaataattcggaggaaatttaaaatggctgatatcgctaaatttatcgatgaaatcaaaaatatgactgttgtcgaactcaacgaactcgtgaaagcgttggaagaggagttcggcgtaagcgccgccgctcccgttgccgttgcggctgctcccgctgcagctgccgctgcggaagtggaagagaagaccgagttcaacgtcgttctcaaagacatcggcgcgaagaagatcgacgtcatcaaggctgtccgcgagttcacctctttgggtcttgccgaggcgaaagcgctcgtcgaagcgctcggcaccatcaaagaaggcgtcaacaaggaagaggcggaaaagatcgttgcccgcatgaaagaagccggcgcgaccgccgttgcggaataatcttcaaaaccagcataaaaaagtcgcaaacgcccgaggagatctccccgggcgtttgttttcgtgtgagccgcgtgataaaatgcgataaagttatttgcaatttcgaaatgctttgcaaaagtgcttgacgattttactttttacaggtaaaataatatagacacaaaatctaaaaacgataatgcacaaactattttcaggaggctgtatggcacagagtttaggcaaaaaagttgccagaattttttccgtactcgtcgctgcgcttttgatttgcagcgcggcgtttttgttcacggcgtgcgaaaccgatcatcccaaaatcaaaatgaccattgagttcaacgacaaatcgtacgaactcacttataaactgtatcggaacatgtaccctaagaccgtggcgcactatctcgaactcatcgacatggatttttacgacaacaccgtgatccacgattactccacgtcctcgtcggacggcaaggggcagggattctacggcggcggctattatatgcaggaagacaacgccgaccgtatggctgaactcgattacgagaaagcgacgatgacgaacgactcggtcacgttgaaaaatatttccgtatggaaggatacggcgcagaacgaacccttaaatacgctgtacggagaattttccgccaacggattcaaggtcgcaaataacggtcttacgcataaaaaaggttctctcgccacccattacaacgcggtgagcgacgccaacggcaagaaagtcgcggtcaagagcaacaaactcggcgtagtggagcgcgaatacaagtacaacagcaccacgagcctgttctttatttcttcctcttccaactcttcgctcgacgcgaattactgcacgttcggctatctggcggattccaaaaacgaggataaattccaggaattgctggacgcgatcaaggatttcattgcggacaagacggaagcggattcggaatactcctttaccgaagaacaggattacgacatcgaaggcaacgaatatacgggacagacggaagtgaaatacaacgttcccaaagaagagggccgcatcacgatcaagaaagtggaagtcctcaaatattaaaaagaatatagaaaaacacccgacttcggtcgggtgttttatttttcgaaattatttgcggttgcgccccgtgagcatgatcacgtaaacgaggaatcttataaagtacaaaagagataccaaagacgacgcaacgtaagtcatcgccgcggctgaaagcactttcgaggcgccgcgcttttcctcgtccgtctgcaatacgcccgtttcggcgagcatttttttggcgcgggaggaggcgttcagttccacgggcagggtgacgagtgtgaaaataaaggacaacccgtaagcgcatacgcccgcaaacacgatgatattgccgatggaagtggcgaggaatatttccagcaacacgcccagaagcacgagagggatcgccagcgacgagccgatgtttgtcacgggtacgagcaccgaacgcagtttgtaggggatgtaaccctcttcccgctgcaccacgtgcccgacttcgtgggcgcaaaccgcgactgccgccacggaattggaggaataggtgctctcggaaagcgtgatggtcatggcgcgcggattgaagttatcggtcagatgccctttccccgcctgtacggcgacgccgtatatcccgttcttttccagaagcatacgggccgtgtcgctgcccgtccaattggaactcgtcggcagcctgtcgaacgcggcaaaggtggaatgcactttgctgctcgcgacgacggaaatcagaatacagggcaaaacgatgaccgcgctgatcagatacatggtatagatatccagaaacataatggtctccttaggttccgtttgattctattataccacgccgcgcggcttttatcaagaaattctcagccttccacggggcagatgttcgagatcagaccgccttgcatctgcacctcgaaaaagcgcacttcgaagaggtttgccgaacgcggatacaccaaccccgcggcgttcttgccggggtgttgtaaatcgaacagttcgggcggcgccgaaacgcccgcaaaggcgccgagataatccgccagttccgccgcacgcggtttcagtgcgtcgcccaggtattgggaagggtctccgcgcacgagcacttcgttgaaaaacaataggggaacgagcgcgggattggtttcggcaaggtcgaacgttttttgcgcggtcacggaatatcggcgcatgacgaacgcgccgttcgaaaacgcccactccgtttccgccacgtgtccggcgggatcgtgataggcgatcttcgttttaaggcagtcggtaaaggaatattccagcacgcggctcacgaatgtcttttcgggcgtacccgaaaagacgatcagttcggtttccccgtcggcgggcgcgctcgcgcagaaaaagacttccccgcccaatttttgcgaggaaagttcgcagtcttcgaattcgcgcggcagcacggtcagcgcgaatttgttttggcgctcgacggaaagtttgaggtccccttcgctgtacagcgtcagtagcgcatcgtccatgcgttcctgccgcaaaactttcaattcgcgcgcgcgggcgggaaaggcggtcacctgcacgatcgccccgccctcgaacacgtatacgtcgcaaaagtcgggcggagccttgaaaaaattctcgtccagcacgcacgatagcggataaaaatcgccgctttcgggcaggatctccgcgaaaatgcggtcggcgggcgaaaggtcggtaaatttttcgaaatttccgataaacccgagaaaaattccgttgagtttgagcgctgcgctcttcgcgctcataaaatatactctcatggttataaaagtatgtataagcctcattttttatgtcaataatgggataaaatcaattttaaggaggcttaacgatggataagatcaacggatacagcgcgcaggaagccgaagggctggtcgaatatatttccgaagggaaaaaggcgggcaagacgctcacctctctcttttcgagttacggcagccgccacggccgcgcctcgggcagcgtacgcaattactactaccaactgttgaagaccaaggacgaaaaggcgaagcgcattctgcgcggcaaggggctgaaagcggaaaagatcaaagaattttccgatcgggaaacggacgaaatgctcaaaaatattcttgcagaacgaagcaagggcgtttcggtgcgccgcgccattcagaagatcgcggacggcgacgaccgcctgatgctccgctatcagaacaagtaccgcaatatgctcaaaaagcagcccgaacgcatcgaagaaacggcgaaaaacatgggactggaaaacgttgtggtgcagaaaaacgggcagggacggggcaaagattttctcgaacggcgtctggaaaaggagatcaacgaactgtacgaccgcctcgcgctctctttgaaaaacgaaaacgaacggctcaaagagacgctcaggcaactcaacgaggaaaacgaactcttgcgccgcgccgcgcgcgcgcagtcggaaaacaagcacgcgtaacggcataaattctttcataatgcacatactcggcatagagcgaaagcttatccggaggaaaaacaaatggaaaaatttattgctggtcttgccctcggcatgatcggcggcgcgctgatcgttgccaacagcaaccgcacgcgttcgctggtcaagaagggccaggacgaaatgatttcgagagtggacgcctacatcgacgaaaaactcgaaaacatggaaaacgcggtctccaagcagggcgcgggcaaagcgaaatcgggtgagaagaaatccgataaggaatgagtgtgatgtaaggcggcgcgatcaagcgtcgccttacaccatatttcaccaaaatatttaaataaaactgtggacgcgctcggggtaatgtgttataatgggttcgatcgaatgcccgaaaccgtgcgcattcggatttttacgcataaaaatacctgcgacgaggaaatatggaaaagaggatcattgctttcgatatcggagataaacgcgtgggcgtcgccgtgagcgatccgttcaacacgttcgccctgcccgcgagcacttttttccgtacgaaaaacgccgaagaggatgcggaaaaactcgccgcgctggcgcgggaaaaggaggcggggctcatcgtatgcggacttcctttcaatttcgacggcagcgaatcggcgcagacgatcaagacgaaaaagtttgcgcagcttttagaagcgcgcaccgaacttcccgtcgtgttcgaggacgagcgctttaccaccatggaggcggagcgcgttttgatatcgggcggcgtgcggcgcgaaaaccgcaaacagtccatcgacagtatagcggcttcctatatattggagggctatttgaataaaagaaataaaggagcgaaccaatgagcaaagacaaacaaatgcacgacgaagagtgcgactgctgcgaggaggacgtcaatatcgtcgatctcgtggacgacgaaggaaaggttcataaatgctatcacatcggtacgatcgagtataagaacggctggtatgccttctttcagcccgccgacgaagaggaggacgacgaggattccgtcaccattttgcagatcgtgggcgaagagggcgaagaagaactcgtacccgtcgaggacgacaaacttctggacgaggtattcgaagagttctgccgtatcatggaagaggacgaggacgcggacgaggcggcaagtctcgacaccgaattcgaagagggctgcggctgcggttgcgtacatcacgaccacaagcatcccaaggaagacaaataagttcacctttcggcttttgcgcggcgcaagactaagattttgcgccgcgtttttgtaaaaacgggacaagtaccgtgaaaatcgcttgcaatcggcggtaggatatggtaaaataatatggctaaaaattcacacccgcaaagccccgcgctccgttcccgtaaatttttgtttgcactacgggtcaatcgcgcggatcaaaggcgttccggggaggaataaacggaggaattcaaaatggcagtcatcacaatgaaacagcttctcgaagcgggcgtgcacttcggtcaccagacgcgtaaatggaaccccaagatgaagaagtacatcttcgcggcgagaaacgacattcacatcatcgatctgcaacttacggtcggcctcatcgagcaggcgtattcgttcgtcgcggattccgtgaaagcgggcaagagcgtgctgttcgtcggcaccaagaagcaggcgcaggaagccatcaaggaagaggcgcagcgctgcggtcagttctatatcaattcccgctggctcggcggcacgctgaccaacttcaagaccatccgttcgagaatcgaccgtctcaataaactcaacaagatggaagagtcgggcgaattcgatcttcttcccaaaaaggaagttctcggcctcaaaaaagagatggaaaaactggaaaacaatctcggcggcatcaaggacatgaagggcctgcccggcgtcatgttcatcgtcgatccccataacgaagacatcgcggtgcaggaagcgagaaaactcaacattcccaccgtcgcgatcaccgataccaactgcgatcccgacctcatcgactacgtgatccccggcaacgacgacgcgatccgcgcggtcaaactcatctcttcggtcatcgccaacgcggtcatcgaggcgaaccaaggcgagaccatggacgttgcgcttgccgccgaaaaggaggaagccgcgcccgaatccatcgaagaagtcgtggaagcggctgctgccgcggatgcggaataatcgttaagaatacggaatataggagaataaagaaatggcaatcacagcaagcgacgtaaacgcgctgcgtcagaagacgggcgttggcatgatggactgcaaaaaggccttgaccgaagcgaacggcgacatggacaaggcagtggagatcctgcgcgagaaaggcatggcgaccgcggcgaaaaaagcgggacgcatcgcggcggaaggcatcgtcgacagttatatccatatgggcggcaaagtgggcgtgctcgtagaagtcaactgcgagaccgacttcgttgcgaggggcgaccagttcaaagagttggtgcacgatatcgccttgcagatcgcggcggcgaaacccgaatatatcaccaaggaagaagttccccaggaagttctggataaagaaaaagaaatcctgaaagtgcaggcgatgaacgagggcaagcccgaagcgatcgccgaaaagatggtgcagggcaggatcaagaaatattacgaagatttctgcctgttggagcagcctttcgtaaaggatacttccaagaccatcggcacgctcattaccgaggcggtcgccgccatcggcgaaaagatcacggtgagacgctttgcccgtttcgaaatgggcgagggcctcgaaaagaaaaaggacgacctcgcggaggaagtcgaaaaacaagtttccaagatgaaaggttaacgaccgaaggcgcacaattatcgatttttgtgtgcctttttttccactaacggtacggaggacttatgaaaacagatttaaaacccaagtataagaggatcgttttaaaactttcgggcgaggcgctcgcgggagataagggcttcgggctggacgaagagatcatcgccggcgtcgtcgatcagctcatccgcgtacacgatatgggcgtggagatcggcatcgtcatcggcggcggtaatttctggcgcggccgtcagggcaccagcatggaccgcaccaccgcggatcacatgggaatgctcgctaccgtcatcaactcgctcgccttgcaggacgcgatcgagcagaagggcgttcccacccgcgtgcagaccgcgctcaatatggtcagcgtggcggaaccctttatccttcgcaaagccctcaggcacttcgaactgggcaggatcgtcattttcgcctgcggcacgggcaatccctactgttctaccgatacgggcgctgcgctgcgcgcctgcgagatcaacgcggatatcctgcttttagccaagaacgtggacgggatctacgacgacgatcccaagaccaaccccgatgcgaagaagatcgaccgcatcacgcatatggaagtcatcaatcgcggactgaaagccatggacaccacggcgatcacgatgtgtatggataacgacgtgcccgttctggcgttcgcgctctccgaaaaggacgcgatcgtgcgcgcgatcgctggcgaacagacgggaacgctcatcaccaacgaaaattaaaaaaaggagaacgacatgacagacaacgaaaaagtggaagagattttgctcgttttggaagagagattggaaaaaacgttttccgtcctcaaagaaaactatgcctccgtgcgggcgggcagggccaatccgcacattcttgacaaagttctcgtggactattacggaaccatgtcgcctctcaatcaagtgggcaacatttccgtatccgatgcgaagtgcctcgtcatcagcccgtgggacgtcagcctgttaaagggcatcgaaaaggcgatcatcgcctcgaatatcggcatcaaccccaccaacgacggaaaagtgatccgcctcgttttccccgatcttaccgaagagcgccgccgcgaactcgccaagcaaatcaaagcgatgagcgaagagagcaaggtggccgccagaaatgtcagacgcgacgcgatggaagccctcaaaaaactcaaaaacaataaagagatctccgaggacgaatgcgcgggcgtcgaaaaagacgtcgaaaagactgtctccaagtgcatcgagcagattgaaaaatgcacggcggataaggaaaaagagatcctttccgtataggaaagacgctatgagaaatatcagactccccgcccacgtcgccttcatcatggacggcaacggccgctgggcgaaaaagcatttccgtccccgcggatacgggcataaaatgggcgtgcagaacatgatcaaactgtgttcgcatgcgttcaaactgggcgtgaagatcgtcacggtgtacgccctttccaccgaaaatctctcccgtccgcaggaagaactcgacgggatctacgatcttttccgttcgtattttcaaaagcagaagggcaaaatccaggagttgggcgtgcgcgtcaacgtgatgggcgatctgacgcctctccccgaggacgtgcgcggacttttgctggaaactatgcgcgacaccgcggtcaatgcacccaacggacttttaaatctgtgcatcaattacggcgcgcgccaggagatcattcaggcggtcaatcatgccgtggcgttcgggcgtttcgtggacgaaaacagtttcaaatcgctgttgtattccgcgggcatgcccgatcccgacctcatcatccgaacgggcggcgaggtgcggctgagtaattttttactctatcaggcggcgtataccgagttgtatttttccaataaaatgtggcctgaattttccaggcgagatctggaaaaagcgctcgtcaattattcgcagcgcgacagaaggttcggaaacgtaaaaaagggttgataatatgttgaaaaggttgattacgggcatcgtctatatcggtatcatcgtgggttttttctttctgcgccacgtgcatacctccttgttcggtattctggtgtacgccttttccatcatcggcacgctggaaatgattcaggcgttcgcccataagagcgcgcagcccgacggctcgctcgccccgaaagtggcgatgaccaacgcacagaaatccgccgtgatgacgtacgccgtgttctttgcgcccgcgtattataccgtaaatcatctctatccgggcgagggctaccgcgccatgctcgtgctctccttcgtattggggatcatccttttgtgccttctcgtcgtggacagaaagaccacgctggaaggggtgggcgcttcgcttttatgcggcttttatcccactgccatcctcgcgaccatgctgctcacgaacgatctggggcagggctccacgctcgcgctgcttctcatttttaccatttcgcctattgcggacagtttcgctttcgtcgtcggaagtctggtaaagggcaaaaaactgtgtccttccatcagtccgaataagacgatctcgggcgcgatcggcggcgtggtgttcggcacgggcggctgccttctcatttactggctgtacacgctcacaacttcctacgtctatgcgggattcgggaatccctgggtgatgttcacgatcgtcggcatcatctgttcggtcatgacggaattcggcgatctggtggaaagcgtattgaaacggcgcatcggcatcaaggatatgggcaaaatactgcccggtcacggcggcattttggaccgtatcgacggaactttgttcgccagcacatttatttatatcgtttttgtactatttatcctttgacgcaaaatagaatagaatgtaagaaaagatacctgctttcccgcaggtatcgcttttatacgaaggaggggacatgcgtaaaaaaatagccctgatcggaagtacgggctccatcggcagacaggtgatcaacgtcgcgctgcgttatcccgaacgcttcgagatcgtggcgatggcggcaaataccgacgatatcaccttttcccgtcagatttccgccgtgcgccccgcctttgcctgtatgcgcgacgagaactcggcaaagcgcgtcgaggcgccgcggggaacgctcgtaaaagggggcgagacggctttttccgaggcttgcgggtatgcgggggcggacgtcgtttttaatgccgtaacgggatttgcgggcctgaaagtcgcgctcgatgcgatcgccgcgggaaagcggctggcgctcgccaataaggaatcgctggtggtcggcggcgcgctcgtcatgcccgcggcaaaggcgaaaggcacggagatcgtgcccgtggacagcgaacattccgccatctggcagtgcctgcatttcgaccgcgcggcgaagttttccaaactgatcctgacggcgagcggcggcgcgcttcgcgacgttccccttgaaaaactgcccttcgtcacggcaaaggaggcgctttgccaccccaactgggacatgggcgccaaaattaccattgactgcgccaccatgctcaacaaagggttcgaagtcatcgaggcgatgtggctgtacggcgcgcctgcggacaagatcgacgtggtgctgcaccgcgagagcgttgtgcattccatggtcgctttcgaggacggcgcggtgctcgcgcagatgagtgcgccgagcatggaacttcccattcagttggctctcacctatcccgagcgtctgtcctgcgcgctcccgacgcccgatttcgcaaaactcggcgcgctgcggttcgaaacggtggacgaggcgcgatacccttgctttaccgtcgccaaagagtgcgcgcgcgaggggggcagccttccctgcgttttgaacgcggcgggggagatcgccgtgcgtgcattcctcggcggacaaataaaatacacgaaaattgcgcaaattttagagggaacgctttttcgcttcgcgcgggaagaggtttccgattatgcgcaactactcgaaacggacgaacgggcgagggcgatcgcaaatcaacttatagcggaaggttaaatcatgcaattcagtttactttcggcggcgagcgtattttccgccatcggctctgtcgtggtcgccgttctcatcttgctggtcatgatcacggtgcacgaattcgggcattacgtggcgggcaaaattttcaaattcaagatcaacgaatttgcgatcgggttcgggcccgcgctcttcaaacatacgaaaaagaacggcgagatcttttcggtgcgcgcgcttccgctcggcggctactgcgcgttcgagggagaggacgaagataaagatgaccccgccgcgttcaacaataaaaagccgtggcagaggatcatcgtactgatttcgggcgctctgatgaactatattctggcggtgctcgtgatcatcgtttcctttttcgcctgcggacaattgcttttgatgacgctggaaacggaggattcctcctatacggctgcgggaaattatatcgagagcgaatataaatttcaggaccgcgacgtcatcattgcctgcgaaggcaaaaacatttatctgacctccgatctgatggacgcgttggaagggctgaaagacggagaacttgcgaaattcaaaatttcccgtgtgttcgaggacggccgcaagatcgtggaagtggagatcatgatgcgcgccgacgcggatttttccggcatgacggacaccaattcggtgtgggaatgtatcggcgtcgcaaaacagttgagcgaggacggggaaacgtatacgtacaagatggcgtcgaccgcagtcaagggattcgggtttttcgaaactatcggccgcgcgttcacctattccatacgtattgcgggcacgctgttccgcgtgctgggcgaacttttgacgggtgcactcggattatccgcgttcggcgggccgatcacgaccatccgcatgacttcagccattgccacgctcgggtgggtgcagttcttcgagatcacggcgctcatcggcgtgaatctcgcggtgttcaacctcttgccgatccctgcgctcgacggttccaaagtcgtgttcacgatcatcgagtggatacgcggcaagccggtcaaccgcaaagtggaggcggtcatccacacggtgggatttttgttcctcatagggtttgcgatcttagtggatattttgcaattgttttagaaaaaacgcccgacgcaacgtcgggcgtttttttagttgaatgttatttatcctctgcgacgggttcacctgccgcgggggcaagcgtatatcgttctatttcgtgacggaaagtgcgcgaagagaggagcagcgcgcccacgacgatgacgatggcgatatcgggcagaacgtaactcgcctgatagatgaaactgtacagcgccacgggctgaccttcgggggcaaattctccgaaagcaaagatgcccgaaacgaagtgcattgccagccgtcccactcccgcgacgaccgcgcccaaagcgaattttacttggggatatcgcaaagaatcggtgcgcgcgaacatgcccgccagaccgatggcggaaaacgcgaggggatagtcgagcaaaaactgcgcggggtgcaaaatatacgtatcctggaacgcctgtaaaacgccgtagatcatacccgcgaacacgccttttttggtgccgaacatataagaatagagcatcagcggcaacaggctcgcgagcgtaatggatccgccctgcggcagttttacgatgcgcaggtaggagagggcgaaactcatggcgatgcagaccgcggcaaaggcgatggaacgagaatcgaatccttttttatccttgcgtccgaacaggaaagccagcgcgacgacggccgccagcagcacggctgcgagcagccacagggcgagcgtgttcacagtgcccgcatcctcgatgccgttatccgtgacggggtcgcctgtcgaaaaatgaaccatcatgcagaccagcgtggcgatcagcgccgcgcccgtcgcgattcccgcggcaagaaagaccgccttgtcgcgcctgaaatacaggcacacgccgctcgcgcccagaacgaggatcaatgccagaaggggataaaatagaatgggcttgattccgtcttccgcaaacgaaagggacaggaacaaaacgctcagcgccgccacgtaaacgatcgtgacgatcaggctgatcttcgcgcattttttccgcgttccgcccgacgtcagaagcattatgagcgcgaaaacgatcacgagcaccgcgctcagccagatagcgatcgtgcggcaggcgttcatcggcgagtcgaaacggaacaaaaaccattcggcgctcaacaaattgagtaacatgagaaacctcctttgtattccgccgacaatataaaaagcgctcccgaaaaagggcgcgccaaatcatctctttgctctttcgttcaagtgttgccttgtccgattcaaagggtataatctcagctttttacagcacccccggcggatattaaattttcttcgattatagaacaattccttgcgaaagtcaactgttttatgatacaataaagcacggagaaaaacgtcatgtacaatttttacgcctttttggacagaatgaaatacatccgccgctggtcgctcatgcgctcctcgcgcgacgaaaatatcatggagcactcccagcaggtggcggtcctcgcgcacgcgctcgccgccgcggacaccgaacttttcggcggcaaagcggatatccccaaaaccgtgctttacgcgctctatcacgaggtgagcgaggtgatgacgggcgatcttcccacgcccatcaaatacttcaacagcgagatccacggcgcttacaaacagttggaggacaaggcggcggataaacttttgcatatgctgcccgaaccgctttctccctatctcgcaccttacgtcaaggcggacgccgcgtcctacgaatataaactcgtcaaggcggcggacaagctttcggcttacatcaagtgcctcgaagagttgaaaagcggcaacgacgagttcaagcgggcaaaggagagcatcgaaaaagagttgcgggaaaagcgtatgccctgcgtcgattatttcatggaaaactttatccccgcgtttttattgacgctcgacgaaatggaggatctggaatgaacaaggtcagaatcaccgttttaaagacgacgctcgacaaagaacttgcaaaagaatacggcgtagcggggctgggaccgtgccccatgctgaaagcggggcaggtgttttatgccgattacgccaagccgcaggggctttgcgacgaagcgtggaaagcgatttatcaatacgtgttcgcgctcgcgcacggcggcgagcaactcttttactacggcgactggatccgcgaaaagggcgtcgcgatctgctcgtgcaacgacggcatccgccccgttatctttaaactcgaatgtaccgatatacaggcgaaggcaggggagtgaatatttgaataaaaaattttaagcccgcggagcaattgtccccgcgggctgtttgattgcatattcagttttaagagacactcttaaagattttattttccgtcagaaatcgaacataacaacgcagatgcctcctgcctgcagcgctatcggccgtctgcccgtcgcggaatttatcttatctgtctgcccccttggttaaatagtacatcggtctatacctccttagccaagttttctcaaaaaatcggatttgtacataacagtacctcctttttgatacgggcagaaccgatctcgttccccgattgctttttccggcaatctatatcccacgtgtgcgtgtatttggcagggaaccattttcggctccgttctcctttcgttccgtaaagaatttttactccttccgtgtttttttgaactttgaacggctttcacttttcccgtgcacttaggatcctgaaaatgattgccgtttcggaacgatccgggcgaacgttgccctctccgtattgagatgtactatcgggaaatgttttatttttcccttttgtacctttattatagcatagatttttcgcttgtcaagggcttttcgaaattatttatgaaaaaaagttgccgtttttgtgaatttgtgacagacgtgtgaagtcagcggagtgtatggagttttacgctgtactcgggatgcaccgcctgcaggatatcgtctttcattttttcgtagtacttataattgtggcggtacaaactttgctgcacgccgtaaacgtcgcagccgctctccatgctcttggtatacacgtcggaaagagtttcggtaatctgtttttccgccgcgtccagaacctttttctgcacgatctgcgaacgggtgatatcttccacgctcttggctttgctcgcgtctgtgatctgcgcgctgcactttatcatgacggtgaacttagcgagatcgtccgtcactttcagttttacgcccttggattcgggcttgatctgcaagatataggtgatctcttctccctcttcttccatgcggatgggaatggtcgccagttccgtgtctcccgtcgtgacattgagcgcgagcgtctcgtcctcgttcaaaagcccgaccatcctgcccgctttgaagagcgccgtcttagaggccttgaagattttcggcttttgctgcccgctctttccgcttccgccgccgcccgaactttcttctgccgaaacgggcaggggcgttttacggaaatcccaccagcggaaacgcagccttttgagccgcgcgagcgtgttgtcgaaccccgccgaatagggcagggtaaagtttgcgaccgccgcgctctccccgcttccgccgcttccgcccgtctgtccgccgctctgctcgcccgaatccttcatctcgatcataggcagaaatccgctttgggatggagaatagtaacccttggcgaaatcgcgcaggttgctcaccgatacggtgcccgacttttgcgcctcggaagagagcgtcttggtgatcgccgtggcggacatatcgttgatgggcgactggctgccgagcacctcgtcgcaccgcccgtccacgacggcgacgagcgcggtatcgggcacgtaatcgctgcgcaggaaatagtcgagcgcgtcgaacacgtcgcggtcggtggtgtctttcccgaacagcaccaaattgcagtagacgagggtagggaaccagcccgtctgcgaattgatctgcgcgaccgcctcgccgatggtgttggtgtcgcgtatggtgatctcgcaggcggcctccgcacccgacgtgcccgcagttacgggaatggcgatctgcgccgtcacgtcgtatttatcctcctgcttttccgatttgtcgatgccgaccgccaccacgatggcggtcttctggatatcgatgatcccgaaatcgttggaaaagaacaggagcagcagcacgcaggcggctacgatgaaaactcttgtccacagtcggttcattttttcttctcctttctcaaaaaccatgcaagaagcggcaccacgtagcagaataagataaagaacagccccattttctgcgtcatgaacttttgcattgcgttgaacgagcgggtgaagagcatgacgaacagaaacagtatgccgttgacggcgagcgcggggtacagcgccttgcatccgatcgtctttttcacgcagtgcacgcacagcacgagcggcagcatcagatagaacacgagcacgagcgtcagggcgtagataaatacgaaatcgatccttcccagcgaggaaaaggtcgtcgtgtatttggagatctgcgagagcgtatattgttggcgcagggcgatgctgccgaaaatggcgtaaaacacggccagaaaaacgagcgtgagaacggcgcccacgccataggagatcatcactttgagcgtggaacccttttcatagcggtagtgccccatgaaaaataagagaaacacgcagtccgtgtaccaactcagcgaggtataggacgaatgaaaaagttttgacgggggcgttgcggaaagtacaggcaggagttcgccgaattccgcttcgggcagcgaaaagacgatgatcgccgcgaacgatacgacgaaaataggcatcagcacgtccgccatgcgcccgatgctcttgatgcctttgatcgaggcgaacaggctgagcgcgaaaaaaggcgcgaacgagatgaacgagggaacgttttcgtaaaataccgtcagaacgaaacttttctgctccatgatcggcagggcggcggcgacgataaagaatacggcgaacagcccgtacacgatgcgcgcgcccacgtttccgaaggtgttttccaccagttcgaacagcgtcttatcggtctttttggaaagcagcatcacggaaagtatgatgaggctttccgcgacgaggttgatggctgcgctccataaaagatcgtgccccacgtcgtagacgagcgtggtggggtagatgatcgtcttcgtcaagggaagcatacacgcgagtataaagcagatctgtctgattttgattttatccatattcggtctaatcctcctgctcttcttcgtctttaattgcaaggcgtactttgttttgcccctgcaaaaacttggggcgcattttgagattcaggatatccgcctttacgaccgaatctttgagatcgcgcgtgatcagcggcgagaagggcgccagcagcggcgcgccgtaactgtcggacgtgacgaggtataaaagtaccagccccgtaaacagcacgatgccgaacgtgccgaggcttcccgccacgatcagaaaggcaaaccgcagcagcgtcaggctgccagcaaggtcgggtagggtataggcggcgatgcccgaaagcgccacgatgatgatggcggaagaggatacgatgcccgcctttacggcggtgtcccccaggaccagcgcgcccacgacggagagcgccagccccacgtatttgggcatgcgcacgctcgcctcgatgagtatttcgaggatcaccatcaaaaagaacatttccaggctcggggaaagcggcagatcgcgcacgttgcccgaaatggtcatcaacagccccagcggcagcagttgtaatttgaacagttgcgccgcaacgtagtaggcgggcaagagcagggcgatgacgagcgagacgaggcgcaaaaggcggctgacggtcgcgcggtaaggggaaaccagatagtcctgcacgctctgaaaatcttcgaccagaatataggggagcgtcagcgcgataggcgaaccgtccacaaagatcccgatgcgcccttcgagcattttggctgccagaatgtcgggtttttccgtcgtgccgacctgtttgaacatggaatagggcttttttgcgagaaatttcgcgatatatgaggcatcgggtatgccgtcgatctcgatccgtttgagcctgtctacgatctgctttttgactttcagatcggaaataccgtttaaatagcacacggcgatcatggacttcgatcgcgtgcccaccgtcagcgtttcgaattgcagatcgcccgttttcagcctcttgcgcagaagcgccatgttggtcttgatgtcctcgataaagccctcgcgcgggcctttgacggcgatggaggtgggcggctcggtgatggtgcgcacggggatctttttcacgccgatgatcagcgcgctgtccagcccgtccacgatgagcgcggtgtttcccgaaagcacttcgtcggcgatcgcctgaatgctcttttctttcttgacttcgggcgaggtcaactttttcgccacttcgtcgatgctgtcgccgcgtttgtccgaagagaggggacggatgacctgttctcccagaaggtctttgtcgcagatgccgtcggcgtagatcgcggcgcaggcggcgccgtccgtcgtttcgaaatgaaagacgagaatatcttccgccgacaatatatttttgacggcgcgtacgttcttttgcaggttggcgttcattttgttcattcgcgtatcttcctcatttttccaacagtatccgcaaaaaaataaaaaaatatccgcgtccccgaaaagggaacgcggataagcggggcttatacgttttcgatggtcttaaccagccatttcaacaaattttcccgctgcgaaggagtaaattcgggcagattctctgcgagaagtccgcgcatttttcctgtccgtcctcctcgcccgccagcgcgcacaggttttccgccagaccttcgggcacttcttcgaaaaatcccgccaatatctcgcgcacgcagtccgtccgcacggaaatttccgtcggcgcgccgccgcgcagaaactgttcgtacaccacgtgtatcaccgtggcggcgccgcccgcggcgacgcctttctgcaacgtttcctgtacgggcggcgcctgccaatgcgtaaaaaaggaaaacgccgcatacagcagaatccccagaagaaagggcacgaacgtcagatactttttgggcgcctttttcaagagcgtctttttgagtatcagcgtcagaacgtacgcgagcgcgcccaacgcgagcacgtccgctccgaacttgtcgaaaatcgcagcaatttgcagccactccatgatttaccgccttttcaggaggcgaaaagttcgcaaaggctctcgtacacgccttcggcacggtcttgcaaccgcgcgtgaaacaaaaacaccgcaaacatctttccacctcccgccgtttattttccccgccgcattcccattataccgcggaaagactgcaaaaccaacagtgaccgacaaaaaaggcgccgcgcatttgcgcggcgcccttggggcgttccgtttcagtcggtactttcgaagatgcgcgcggcgaccacggtcatgtcgtccacggcgacgccgccgcacatatcgatcgcctttttcaacagttcgtcggcaaaggtctgcggattgaggcagggcacgctctccataaaggcgcagatatccgtactggaagagaatgcggaagtgatgccgtcgctgatgagaacgacggtgtcgcccgcgccgagcgcttcgcgcagcaccgtgggctttacgctgtccagaatgccgagcggcagcgattcgctctccaaaacgcggatcttgttttccgagagcacgaaggagaggggcgagcctattttcacgagatcggcgcagcccgtgtcgagatcgaccgtcgccacgtcgatgcaggaaaaactttcctcgcggttgaacgagagcagttggttgacggtggaaagaatggtgtccgaaggcattttcgcgcggtaaaaactttccacgagcgagatggtgcagtcggaaatgcgccgcgcgtactcgccgctgcccatgccgtccgagagtgcgagcataaaagtgcgctcgtctattttgatgacggaatgggtatcgccgcaggcgatctcccccgtcttggtcgcggaagcgatgccgaacgccgcgtcgtacgcgggcttaggctttaaaacgtaacagtatttgtttgcggcgagcggcagttttttcgagagcgtcatgcgccttcccaaaacctgttcggcggcggaaacgagttttttcagatcgtgccgcccgctcaccgtcaaggaaagcgtcagatcgtcctcgccgtacaccatgatctcgttgagcaccacgccctttttggcgacgaggtcgcggatgcgccgctccgcgtcggggttcatggaaagaggggaactctgttcgagcgcgaggtttttcaaaatggtgctcacgccgcgcgcctgttcggcgagcaggcgcttgcccgcggaggcgttttccgcttccagcatgctcttgcggtattcggaaagcagcgcgttgagcgtaaacatgatgcccgaggggtttacgcattcggcggtcagccgcgcgggcaggtcgatcagattcactttgcccttgccgccgcccacggaaacgagtttctgaatgctctcgcccatgccctcgtttctgcaccgctcgaaattggcgcagcggccgcatacgtcctcggcgatcttgttgcagatgaactgcgaggcgtcctccgcggtcgcgcccgattcgtccaggctgatgaacgtgttttcgatctccttgaacacggccgcgatctcgaacagtttttcgcccgtcgcggagcggttggcgttgatattcagccttgtcagttggcgttccgaatacagttttaatacgtttgccgccttttcgtaaacaaattcggggatgagcagaaagagaaaacagggcacgagggaagtgagcatggtcagataaaaggcggaagacacgaacgcatccgcgcccacggaccaaaaatcccgcgcatagcgcacgaacacgtcgctgagaaagatcgccagcgcggcgggcagttttcccgcgcgcagaaagcacagcgccgcggcggaatagaggataaaggcggcgcaggcggataaatcgggcgcgcccgcctgcacgctcatcgcgatggcgcgggggatggagagaacgagcgcgacgtaggcggcggaagcgtttttgagcacggcgcaggcaatgagtatgagcaaaatcgccgcgccgtcgtaggcgtaaccgcccgcgcagttgaaaaatcccgtgccgacggcgacgacggcggccgacaaaaagacgagttcctccgccgcgaggcggcaccgccccgccttgaacagcacgcatttgagcgcgctgatgaacacgaacgcgagaatgaaaatgacgatcgccacgatggcggcgcggtagatatcggcgtaaatgtactcggcgtagatccataaaaagggcgcgagcgcgacggcgagaaaaatcaccgtttccgcgccgggttttttgcccgcgcggttgtagaaccagaacacggcgaaaaacaacacgcccgcgatcgcgtacacgggaaaggcgagcaggctcacggaaaaactcagcccgcccgcgagcagaaaaagccccacgctcgcccagatattcaggccgcacacgagcatcgccacaaagagcgcgagcgaaaacggctcgaacgcgggcatggtaaagtttaggaacagcatgcagaggaagagcgtgaaatacaggatcacgtttgtgtatccgtatttcaacttgaatttatccgacatgatttgtactccgaatgaaaatgattttattcattatatcacgcgcgcgcgtacaaaatttgccgcattttagcgaatttatgccgatttggtcttgccgctattgctcttcgcgaaaaaacgataaaaggattttgacgtcttcttccgcctcttcgagcatttgaacagaaattttcacgcttttttcggcgggacggaattgcgtgcaaaaatttttcttttccgtatattttttatgaacggcacatactcctgcgtccgcattccaaaaagtataagttactttccaataaagcggttcataaaacatgcaacggcggcaaactttattcgtcatcgaaattttcctcttcattatctcgtaatacttgtcggattgccgaaatttctgcaaggatttcatttaaagccatagtagccgcttttttactgctacgccaacctctttttaattgatacgatttacaggattcaaagtttaatacaactttttgttgtaccgcacaataaccgaatttagcccttttaaaatcacgcgccttttttatgtagtacgcgtcgaaattttcgcatcgaaaacatctatttttttgttcttcttccatagtaaacctccgtatcttaatattactacaaacaagtttgtaatgcaagtatattcacaaatatttttgtagaataatattaggtgtagtatgtatgaaatcggagaagagttgaaataccatagggaaaagaatggattctcacaaagttctcttgctacggcaacaggtatttctcaacaaaaaataagttattacgaaagcggcaaacattcaatacctattgagttttgcataacgcttgcagacttttacggaatttcgctggacgaacttgtcggcagagattttatacaaaatcaaaaataaaaggcacgggttgaaccgtgccttttttcgcgatgtttttaagaacgtaaagaaagatacaccatgagaacggcgatatccgcgggattgacgcccgaaatgcgtcccgcctgcccgagattcgcggggcgtatctggttgagtttttgccgcgcttccagccttaacccgtctatcttcatgtagtcgaggtcggcgggcagttttttgtcttccaactttttcgccttttcgatctgttccagcccgcgtttcagatatccttcgtatttcacgccgatacacgccgtttcgatatcttcgcgccgccgtccctgcaaaatgccgaacgtctcgatgatatcctccaaggggatcgcgcggcgtatcatatccgcataacttacgcccccgaacagttccccgaatccgtgcgctttcatgaacccgtccgcatctttgggcgatacgcgcccgtccaattcccgcaagatctcttccacggcgcgccgccgttcacaaaacctttggtagcgctcttcgcccgcaagtcccgcgtcgtacccgatctgtgtcagtcggaaatccgcgttgtcctgccgcagatgtatgcggtgctccgcgcgcgaggtcatcatgcggtaaggctcgttggtgcccttggtcacgagatcgtcgatcagaacgccgatatacgcctcgtcccttcgcaacacgatctgcggcttgccgcgcagtttcaaagaggcgttcagccccgcgatcagcccctgcgccgccgcttcctcgtatccgctcgtgccgttgatctgccccgcggtgtacaacccctcgatttttttgaattcgagggtggggaacacgtccagcgtatcgatgcagtcgtattcgatggcgtaggcgtagcgcatgatcttcacgtgttccaaccccgccacggtgcggtacatatcccgctgtacgtcgtgcggcagcgaagaggacatgccctgcacgtacacttccgcggtgtccgccgattcgggttccaaaaatatctggtggcgctccttatcggcaaaacgcaccactttgtcctcgatggaagggcagtagcgcggccccgtgcccttgatgacgccgctgtataagggcgagcggtgcagattggcgcggatgatctcgtgcgtcttttcgttggtgtaggtgagatagcagggcgtctgtttttgcggaacgccgtccgaaagataggaaaagggataaatatccgtttccccgtcctgtttttcgcatttggaaaaatcgacggtgcgcccgtccacgcgggcgggggtgcccgtcttgaaccgccttaccttaaatcccaacgaaatgagattttcggttagtaagtttgcgggcgcgaacccgttggggcccgaactttgcttggtttcgcccaccacgatctcgcctttgagatagacgcccgtcgccaggatcaccgctttggcggtcagaatctccccgacggcggtccgtacgcccgtcactttgccgttttcggtcagaatttccgccgcctctccctgtaatatcgagaggttttcggtatgttccagcgtctttttcatctgcgtatggtaggcgtttttgtccgcctgcgagcgcaggctctgcaccgcggcgcctttgcccacgttgagcatccgtatctgtaacgcggtcttgtccgcgttgacgcccatttcgccgccgagcgcgtcgatctcgcgcacgagatgccccttggctgtgccgccgatggagggattgcacgccatgaaagcgatgctgtcgagattcaaagtgagcatcaccgtcttgatgcccgtgcgcgcgagggcgagcgccgcctcgcagcccgcgtgtcccgcgcccacgaccacggcgtcgtattcggttgtatagaagcgatttttgaccataagaaatttccgtttacaaaatccgtttcaaaaattgaaacggattttccttcgttactgttttaaaatgatatttttgatatcgttcacttctttcgccacgcggtcgttcactttcagaaggttgttcaccttttcccgcgaatggatgatggtggtatgatctctgccgcccatcgcctcgccgatggaaacgaggggaatgttcatgatatcgcacatgaggaacgcgcagatctggcggggctgtacgagttcttttttcttgctcttgcccaaaaggttttcgcgcgaaattttataaaaagcgcagacgctggaaatgatcttatccgaagtcaccgtttcgtgttcttcttcgctcaccgcctcgttgagcgcgtttgcggcaagttcgagcgtgatgggctgttcgtgcagtttgcttgcgaaaatgaccttggtgagccgcccttccagcgtgcgcacgtcggtgcccgaatcgcgcgccagaaaatccagaacgtcgttggaaataacgactttgcgctcgtaggatttttgtttgagaatggcgatcttggtttcggtgtcgggcggctgaatgtccgcgatcagcccgccctcgaaccgcgttctgaggcgctcctcgagcgttgcgatctccttgggcggcacgtcggacgtgagcacgatctgtttgttctgcgattgcagttcgttgaacgtgtggaacaattcttcctgcaccgcctgctttttggcgaggaactgcacgtcgtcgagcaacagcacgtcgcagtttctgtagcggctcctgaaacgcgcctgcttgtccctgctgtttccgcccttgttgaggtaaatggaatcgatgagttcgttgataaacttgtcgcaggtggtgtagatgacgcgaagggaaggtttatgcagattgatatagttggcgatggactgcaaaaggtgggttttgcccagtcccgaagcgccgtatatgtacagggggttgaaattcgccgcggggtttttggcgaccgactgcgccgccgcgaacacgaaatcgttgctcttgcccgccacgaacgaatcgaaggtgtagcgcgggttcagattgcccgcaacgtcgtcgtcatcgtcgaaatcttctacgctcgtaaacaccacgtcgtccttgccctcgaccatcaactcgaaatcggtgatgcctgtgtttgctttgcggatggcgcttttcatggtgtcggcgagtttcgttccgatatagttcgcgaaaaattcggtgtccgttttcagtacgatcttagtctcttcgatatccacgggaacgagtttggaaatgtacatctcgtaggtgatgggggagatcatttcctgcataactccttgtatttgtttccataaaaattcgaattgattgttttcggacattataaacctcgaaacactttctctttttccgcaaatttggtataataaacccgcagccgataaggtttttctattataatacaaatttcgaggaaaagaaagtattttttgaccatgcgcataaaaaaattattgttaaaaaatttcagaaattacggcgaagaggttttcgggtttgacgaagggctcaacgtgctgtac

SEQ ID NO: 4186 - DNA, 16011 bp, Unknown
  16S sequences of unknown bacteria
actctttaacctttactgcacggaaatctgacttgctgaatgtatcaaaatcaacaaattcctcaaataaaggctctacctttaccttagaaaaatcaatcttttcagactcagtttttacattttttcaggtgcttcagaagctgtattatttacatcatttttcttatttacaccatctaaggacttcattgtcgggaagagcagcacgtcgcggatggaggcggagtcagtcagcagcatgaccagacgatccacgccgaagcccagaccgccggtggggggcataccgtactccagcgcgcagagaaagtcctcatccacgtcggcatgtccgccctgcgcccgcttggcggcggcctgccgctcgaagcggccgcgctggtcgatggggtcgttcagctcggaaaaagcgttgccgaactcaaagccgttgatgaagaactcgaagcgctcggtcatctccggctcgtccttcttgcgcttggccagcggagagatcgctacaggatagtcggtgatgaaggttggctggatcagattgggctccacgaaagcgtcgaagcactcttccaggcactggcccttcaccgcgtccttttccacatgcacgtcgtgggcttcgcagtccgcccgggcctgctcgtcgctttcccaggcgtagtagtcgatgccggagtatttcttcacggcctcggccatggtcatgcgggcccatgggccttccatgttgatctccttgcccagataggggatcttcagcgtgccgcagacctttttggtgacgtagatgtacagttcctccaccagatccatgatctggtgatagtcggcataggcctgataaagctcgatggtggtaaattcgggattgtgacgggtgtccatgccctcgttgcggaagatacggcccacctcgtacaccttgtcaaagccgcccacaatgagccgcttcaggtacagctcggtctcaatacgcaggtacatggggatgtccagcgcgttgtggtgggtgacgaaggagcgggagttggcgccgatctcgatggtctgcagaacgggagtgtccacttccagaaatccgcgggcgtcgaggaactcgcgcagcgccttcaaaatctggctgcgcttgatgaaggtatccttgacatccgggttgacgatggtgtccacgtagcgctgacggtagcggatatcctgatccttcaggccgttccacttttccggaagcacccgcagggacttggtcagcagcgtcagctggtgagcatgaacggagacctcgccggttttggtacggaagactacgccctccacgccgatgatatcgccgatgtccatggttttgaagtccgcgtatacgtcctcgcccacgtcctcgcggcgcacataggcctgaatctggccgtcgccgtccagcatgtggacgaaagaagccttacccatgatgcggcggctcatcatccggcccgcgatgcggacggtcttgccctccagcgcgtcaaaatccgccagaatctgcgcggaggtgtgggtgcggtcaaaacgggtgatggtatagggatcgcggccttcttcctgatacttggccagcttggcgcggcgaatctgctcctgttcgctcaggtcctgaacctgctgaatttccggggtcatgaggctgcctcctttgttgatcgaatgaatggggctcagcggctgatctccagcactttcagctgcatggtgccgccgggaacctccacgtccaccacctgaccgaccttcttgcccagcagcgcgccgccgatggggctgtcggaagaaattttcatgttgcgggggtcgatttcgttcgcaccaacgatggtgatggtctgttcccgcttcagggtcagattatccaccttcacggtgttgcccacgcccacggtctcggtggtgacttcgtcgtcctccaccacgatgcagttgcgcagggtgttttccatctcgacgatcttggcctcgatgcggctctgctcgttcttggcctcgtcgtactccgcgttttcactcaaatcgccgaagccgcgggcgatcgcgatctgctcggagatctcgttgcggcggacgctgatgtaataattgagctcctgctccagcttttggtagccttcgcgggtcaggatgactttcttttcttctgccatctttgataaacccctttctctatgcgcggggggctgaaccccggtagatgccgcgctttcccggcgctatgccgccggaatatcccttcataaacacagcgccgcaaccgttcggcccgccaaaagcgcccgcacgttgcaacgcagcttgagagaatacgaattattatagtccgcccggcagggaatgtcaatggcggtttccgttgatttttcaagatttgcggcgcttttgggcgaaaaaagggaggacgcacggggcaaaggctgaggtcattctcggccagagggaagggaacgatttcatcatggaacggccagccgttcttttactgctttacgttctccatttgggaagtggattccgtcaggtcaaaggtcacggacagggaagcaaacagcgagcccatgaccttttgggcggctgcgcgcacatccgccgcggccacgtaggcctgaatccgcgcccgttcctcgggcggcacctgaaagacgctcaggctcatttccagaaagcggctgatcttcttttccagcgtgaaataggggtcgcactttcgaaccatatatccgcgcatgatgcccgccgtgcccagctctatctcgtaaaagtcactttcggcgcagtccggcaggtagctgccgaacgccttttgtagttcctttgccgtgcgctggtggatcatttccgccgtggcggggtaggtgtacgcctccacataaatatcgcgcaggttctcgttcatttccgtcagcgccagctgcagagccgtttccatggcgtagacatacactggcgagggcagcgccgtcgctgccgtcctgactgcgccgaattgacggtcgaacatgatgcccaccagctcggtcagtacgccgtccttggtacggaaaatgttttgaaaggaaccggcggacacatccgccgccttcaaaatttccgccacacgagtatgggtgtagcctttttccagaaaaagccgaacacaggcggccagaatgcgccgctttgcgtctttgctgtcgtaacgtctggccatgggatccttctttccacgaaatgtatcatgacccgattatacattgatctgccataaagtcaaatcttttggttttttcgcttcggaaggaaggcgttcgcgggtcttcacggctttgccggcgcttgacagtatgtcctaccggggctataataaagtgtcggctgaatgggagagcctgtgcaggcacaggaacccggctgttttcggatatacgttggtgactggctttttcccgcgtcggttcgttattggagcggcggaagaggacgtcggttgttcgtatggagaggtttcggggcgcagaagcgtccgggaacgtttcttgagtatatgctttgagtttggaatgcggatgggccgccgggtttgcaaaagcaaaccggaattcgccgcaggataagctcattgtttgcaatgttttgcaatacaaagcagcagaaagccgacggggcattttttgctccccggcttttttgtttgccctgaaaagggcgaaccagaaaagcactgcacggaagaaaagccgcggcggaaggccgcatccccgggtgaaaattgacattgaacggaaaaactgacagagagaaaggagtgcaaccaatgcctgtatttttgggaatcgtcattgcgctgctggtcggcgcggcaggcgcggcgggcggctatctgtaccgcaagcaggccagcgaaaagaagatcggccgcacggagcagtacgccaaaaatttgctggaagacgcgcagcgcaaggcagatgaaaagaaaaaagagaccattttggaagccaaggaagaagtgcttcgcctgaagaccgagctggatcgggagtgcaaggaccgccgggcggaggtgcagcgcagtgagcgccgcatcctgcagcgggaggagaccctcgacaagaaacaggacggtctggaaaagcgggaggaagcgctgacccagcgcgccgccgatctgcagaaggaagcggatcagctggaagaaggcaagaacaagcagctgcaggagttggagcgcattgcgggcatgacgcaggacgaggcctgtcagatgctgatccagcgggtgcagaaggacgcgtatcacgacgccgccgccatggttcgggacattgagacccgggcccgggaagaaggcgaaaagaaggcgcggaacattatcgcgctggccattcagaagtgcgccgccgaccacgtggcggaaagcaccgtcagcgtcatcaacctgcccaacgacgacatgaagggccgcatcatcggccgcgagggccggaacatccgcgcccttgagacggctaccggcgtcgacctcatcatcgacgacacccccgaggcggtcatcgtcagcgcgtttgacccggtgcggcgcgagatcgcccgcatcgccgtggagcgcctgatcatggacggccgcatccatcccgcccgcattgaggaaatggtggaaaaggcccgcaaggaagtggacaatcagatccgcgaggcgggcgaacaggcggtcttcgagacccatcagcacggcattcatcacgagctggtcaagctgctgggccggttgaagtaccgcaccagttatggccagaacgtgctgaaacactccattgaggtcagccatctggcgggcatgatggccgcggaactgggcgcggacgtggcgctggccaagcgcgccggtctgctgcacgacatcggcaaggccgtcgaccacgaagccgagggcacgcacgtgacgctgggcgctgaactggcccggaagtatcacgagagccccgacgtgatccatgccattctggcacaccacaacgacgtagagccccagaccgtggaagcggtgctggtacaggcggcggacgcgatttccgcggctcggcccggcgctcgccgcgagtctctggagaactacatcaagcgtctggagaagctggaagagatcgccaattcgttccagggtgtggaaaagtgctttgccatccagtcgggccgtgaggttcgcatcatggtcaagcccgaggacatcacggacgagggcacgaaggtgttggccaaggaagtggccaagcgcattgagaaggaaatggaatatcccggacagatccgcgtcaacgtcatccgcgagacccgcagcaccgaatttgccaaatagcaggggcagtgcccctgcaccccacaccgcgtcctttgggcgcaggagcgctcgagggaaagcggcttggctgtggagctgccgccgcctgcaggtctggcgcgggatgccagcgggcgcaaaatacggatttcaaaaagcccggcgtgcattcagcacgccgggctttttgtcatcctcaaaagattcgggtcagggtcagcgcgtccatataggcgtcggaatagccgcaggtgctgccgtccttgagaacggtgcagcggcattcggtgaaccagccgggaaccaggcagcccttttcatttcccacccagcagggaagaatggccgtcagcgtttcttcggtggcgtatctggtataatcgccgtagagaggatcgccggtgatctcgtaatcctgagcgaccgaggagggccaccagacgttggccacccacaggcggagccattcttcccagctgcgttccggcagaggataggattccgcagccgtcacgacgggcagactgcggagggccagctgcttcaactggccgccgtcgcccatcaccagctccaaataggagctttccccgaaggaatcttccccttcctgatagtaaaattgaaacatgacgggcagatccagcagttcatactgggcgcgaagcagcgtgacctgatccttgccggacagccgggcttccgtgctttgacgaatctcttcataccacgtgctgctgctttccgtagcgctgtaggcggaaagaacgtcctcgggcgtcaggcgcagcgcctgcagaaacggctcgctggctttagcgcccagcttttccagcagtgcgcgggcaaaatccttggccgcggccatttccgcttcatgcccggcggacaggctttggcagagcttccccgtatagggatgggaataggaatcgctgccgttgatgtccgcgccggtgctggaatagtaaaggaaacggctggcccagccggagctgctggaacgcatctgatcggcggaaacgttctgccccaaagaagacagcgcttcgctcatctgctgcttttcgatcttctgatactccacctgaaggcgaacctgctgcttggccgaaaagccctgcggaacggggcagtccaccagcagacgataggaaccgctgtccccctcgcgggacggaagaaggatctctcccttcaaacggccgtcgatttcctgcacctgcgacaaatccacttcctccgggagacagaaacggggttcgcctgcctctgccagagaaaaagcagggcacagcaggcagagaatcatcaggctcacccaaatccacttgaaggctttcatttggcttcctccttttcgtttttggcaaacccctgaccggccgggacctgcagggtcagggtgctggtctggggctgaccggtcccgtaaacttcggtctccagctccacccggatcgtgacggttccgtcaggatcgacggcggcattctggcttctggcccgttcccacggggcttccagcaggaaggtctcgccctgctcctccggcagccagtctatggtgacaggcagcatggccacgccgccgacggtcatctgtcggacggaaagcaccagcatctgcttgccctccggcagccattcgtcaaacgaaagctgctttccgttccaccagatccggtcgaaatgctcgccgtcggcgccgatatcggtttcgtacagcagacggtagcgctccggctccttcggggaaatatgcacacaaagagagaatttgtcttcattctgatacagatcccgtgcgtccagatgcaggacagccgattcgctttcagcgcggaaatcctgtgtaatgcccggctgcacgtcttccgccgcagggccgttccagatgcgggttgtcagaaaatccagcacgcccagacgggagcccgcataggccgcgcccgccagcgtgagcagcagcgccgccagcaccaccgcccggcggacggggatccggggcacagcggcattctccttcttctgcaaggatcgcagcgtgttttccacccggatatgaaagccttccggggtaggctcgtaaggatcttgccaatgcttgatcttttcagcggtcatttttctgctcctttccatgaacggccatagggcggacgggaagccgtttcgtccccttccgtctccagccattgaacgcgaagctggtttcgggcctgatgcagtctggatttaacggttccggcagggatgcgtaatatccgggcgatctcctccacagagaagccctccagataatgcaggctcaacggcagccgcagcttttccggcagcgcctccagcgcgtccgccagctccggcagggcgggctccggcgcgggctcccgttccggctccgccacggggatcagccgcttctttcttcggccgatattgtggcattcattgatgacgatgcgcgtcagccatggccggaaatagctttcgtccacgcgctttcgcttgtcccatgccttgcacagcgcttcctgcaccgcatccgcgcactcgtcccaggtgcgcagatatccccgcgccacccggtacagcgtgcgctccatggcgcggacctcgctgacaaaacgttcttcctccattccggttgatctcccctttctttcgtgggcccatttacaccattataacggctgagaagggggaaaggttcggactattttttcggataagacgatggtagcacagcgcgccgaaaaagtcgttccgctcgctgcggaaaaaccgggaaagtcgaatgattttccttgcggcagggagaaggccgtgataagataagcaggacggaaagcgtgaagaaactgaatgacagcgccggggcgacccgaagggggtcgttcggcgaaaaaatggaagctgctgaaggggagacgatcatggtacactttgaaaagctcgtgattcccgcggcctcgcttgggccgctgaaccccatgccggacatcaagaacgtcagctatatccacgccgggtatgaaatgacggacaaggtgtcggaggaagaaaagaaatacatcggtcagggcatgattccgaccatgctgccctaccggctgcaggacggctacgaccgggaaaagaagccccgggcgtttcagacggctgtggtggaaaacgatcacgtgcgcgccgtgttcctgccggagctgggcggacggctgtattccatctatgacaaggatgagcgcaaggaactgttgtacgtcaatccggtatttcagccgggcaatctgggcctgcgaaacgcgtggttcagcggcggcgtcgagttcaacgtgggcatcaagggacacaatccgctgacctgctcgccggtctttgcggcggtcgatcaaacgcccgagggcgaggtgctgcggctgtatgagttcgagcgcatccggggcgtggcgtattccgtcagcgcgtgggtgcgggaggattcgcccacgctgtacctgcgctgccggatcgaaaaccgcacggacgagacgaagtatatgtactggtggtccaatatcgccgtgccggaaacgccaggcgcccgggtgatcgtcccggcggagcggtcgttcctcagcttctacaacgccgatcattacattctggataagacggacattcccatggcggatggcgtggacgtgagctatcctactcgaatcccttcatcccgggatttcttttaccagatcccggacgagtcgcccaagtggatcgcatccgccaatgaagagggcttcgggctgctgcaatgctccacccgccgcctgcttgggcgcaagctgttcgtgtggggcatggggcagggcggacggcactggaacgagtggctcagcgaggaaggctccgcctatatcgaaattcaggccgggctggctcatactcagctggaacacatccccatggcgggccgcaccgtgtgggagtggcaggaggcatacacgctgctgaagggcgacccgaaagtgctgcacggcgagtatggcgaggctgtccgggcggtgagggattgcatgaaacagcgggtaggcgacccggacgagatgcatttcccggcggacgagaccgtgacccacacgaaactggtctgcgaaggctccgggtggggtcatgtggaagaaatgctgcggggcgaacctgtcagcgcgacgctggccttcccgaagacaaacgacccggaaagcgcggtttggctcgatctgctggaaaaaggcacgttcccatgccccgatccgctggaagaacctgccggttacgtcatgggccgggaatggctggaaaagctggaggcgctgcctgagcagaactggtatagcctattgcagcagggcgtcatccgttacgcgctggccgcctacggagatggttccgtggacggagcgaggaaagcgtgggagcagtcgctggccgtctgcgaaaacccgtgggcactgcggaatctggctatgctgtataagaatgaatatcacattccgaaaaaggcgcacgaaatgctgctgaatgcgtttcggctgaagccggactgccgggcgctggccgttgaaacggccatgcagctgacggaggacggcaacgacgaaaagtggttggagctttatgacgagctttcgccggagttacaggcctacggacggctgcggcttttgcgggctgtggcgctgctgcacatcggccggttggaagaagctgccgcgatcctgaacgtggattttgtcatgcccgacgtgaaggaaggcgagctgtcggtttcctatctgtggtttgagctgtaccgccgcctgtacgccaaagagacgggcgttccctacgacccggaggacgaagcgctgcttcgggcggcggatgaaaaatacccgctgcccaaaacgctggattttcggatgcactgacgatttcccaaatgccttcccaaaaggagaatgaccatgaaaattcctcagccttttttgccgctgcgggcggaaagtcagaactacgaacatacgattcacgtcattggccgggactataccgtaggcgcggacggaatgctccgctccattcgttctcagggcgtggagctgctggccgcgccggtgcggattgtggccgtggaggacggggagccgtcccactgggacgacaactactccgaaaacgaggccgagagcttcattcagcggcggaatgatgaagaagttatcatgtgcggcgcgaagcagtccgaccgttttattgtggatagctgcacgcggatcggctatgatggcggcgtggatatcgacttgaaattgatgcccagaggacggacggtggcgcaggtcttcggcgtggcggaggccaggccgatgctattcaaactggatcggctgtggctggaaattcctctgcgggcagaagctgtcacgctgtttcatatgttcccaaacagcgtgatctcgctggctgacggaacggagcggcccatgggaaccatgtccgccagcggggccgtccccgcgcagaacgcggccatgcccttcaaggccctgctatggttgggcaatgaggaacggggccttggctggtatgcggaaaacgaccgaaactggcagccggaagacccgaacagggtcatggagctggtacgggacggcaaacagctgatcctgcgcgtccgcctgctggacagccagcccaaaacgtggacggctgaccctgcggacggcgtatacgcctatcatcccgtcacgttctgcttcggcctgcaggccacgccggtaaagcccttccccaaacagccgtacattcacaatgcgttccatatcgactgcggcgccaaggtcaagggcaactatatcgacgtgctggcgggacgctatgacgagctgaaggaaaagggtgttaccacgctcatcctgcacgaaaaatggaacaagtgccagaactggttcgagctgagcgagttcaccgcccatcagctgcataccattgtggacgagtgccacaagcggggcatcaaggtgctgccctatttcggctatgagctctccaccatggctccccaatggagcgaattgcaggacaaggtgaaaatggtggacgaaaagggcgcgatggagggcggctggtggcgggtgcccttccagcgggattatgtggtgtgctaccacagcgagtatgaagcgctgtttttaagcggcgtggaaaaactgatggacgagttccatatcgacggcgtttatctggattccatcaccttcccgcgactgtgctacagtacagagcacggctgcggctggtacgatccgcagggcaggctgcatggcagctactgcctgaaaacgctgcggcggatgttccgacggctgtacgaaatcgtccaatcccggggcggcgagatcaacgtccattccttcggatatgtgaattttatgacgattccttacattcaccagaactggtatggagaaaatctgcagttcgaccgaatgcacggcgacacggaagacctgaatctggaatacttccgggcggagtatctggggcggaacattggcgcgccggtggaatttatcgcctatgagaaccgtcccctgtggacgtttgaacaggcgctggcctgcgctgtgctgcacggcattctgccccggcccaatgaaattcaccatccgttggagctgatgagccgggtatggaaggtgttcggcgcgttccccatcgagcagtcggaatggatgccctattggacgaacaacgctcgggccgatcatgaaaaggtcagaatcagctattaccgctacaccgatctgtccggcgcgccacagctgttggcgtttgcggtcaatatttccgcaaagcctgtggaaaaggtgacggtttccttcccggagccggtcgcgcaggcgcgggatatgctggaaggtcgggacgtcgggctgacctttgggctgaatggctattcctgccggattttgtttgtgaaataaagaaagcgccgggaactgctgcaaaatgcggttcccggcgtttgtcatcaatgccgttttattttccgaacagacggagcacatccttaaaggtgaagaaaatcataaggccgaagagcagcacatagccgcagaggtgaacgcccgcttcgatcttctggttgacgggcttgcggcgaatggcttcgatgatcatgaaaatcagccggctgccatccagaccggggatggggatcagattcatcagccccaggttgatggagatgatgaccaacagatagaggtaaatttcaaggccgccctgctgggtctgctgcgccaccaacgacaccacgcctacaggccccgccgcgtcgttcagcccctcgccggtggtaaagagcttgcccaaactttccacaatggcgacgctggcttgcttgcacagcgaccacgcggagggcagaatggagctggcgggcattttttcatagccctgagcgatggtcacgcccacccggtaacgttccagttcgctgtcgtactggggagtcacggtgaaggtctgctcctgaccgtcccggagaacggtgatttccaccggggcggaggaagcgtccgcgccgatggcgttgctcacgtcctgcacggtaccgttttccacttcggtctggttgacccggacaaaaatatccccggcctgcagcccggcttcggcggcgggcattccggcttcgacctcctgcaccacaggggtggtggcgaccgcgccgtaaacgcccatcagcgcaatggacacgacgaaggccaacacgaagttcatgcccggtcccgcaaggacgctgagcatccgtttccaaacgggggccttattgtagttgcggggatcgtccttcgtgctgccgttcgggtcgtcgtccgtgtcgccgtagaacatgcagtagccacccatcggaatgggacggatggaaaaagtagtatcgcttttcttgctcttgtgctgccagatgaccgggccgaaacccagcgaaaattccttgattgcaatgccgcacagccgcgccaccgcgaaatggccgaactcatgcaccataatcaggatgcccaacagcagaatggctaacagaacatacaggatcgtcatatggatttcctttctgggggacggaaaagcgtccctgtaaagctagtatatgcgacccgccccgggcgaattcaccgagtcagtccgccgccagaagggacgcagccacgtcccgggcccggcggtcggcctccagaatttcgtccagcgagccggcaggaagaacgcccaaacggttcagggtttcctccaccacttcatagattcgaccaatggtcatgcatttcccgcctgcgggttgtaaaggctgttgtaacaaatgggccacggccgcttcgttggccgcgttcagctcgcagcaggcggcaccgcctgcccgcaggcattcgcgggccagccgcagggaaggaaagcgttccgggtcgggccgctcgaaggtcaggccggacagcgagaacagatccagcggcgcaccgcctgtgggcaaacgttccgggtagctcatggcgtacaggatgggcaggcgcatatccggcgtgcccagctgagcgatcagcgcaccgtcggcgaactgcaccccactgtgaatgacgctctggggatgaacgaccacctgaatgcggtcgtcctccacgccgaaaagccacttggcttccatgatctccagcgccttgttgaacagggtggcgctgtcgatggtgattttctgacccatgacccagttgggatgcttcagcgcctgtgccttggtggcgctgcggatggcggctttatcccacgtgcggaaaggcccgccggagcaggtcaggatgatcttgtcgatgggattgcccgccgcgccctgcaagcactggaaaatggcgctgtgctcgctgtccaccggcaggagggaatgctcgcccgccttccgggccgcttccatcaccagatggccgccggtgaccagtgcttctttattggccagcagcacccgtttgttttgacggaaggcttccagtacgcccttcaagcccgccatgcccaccacggacaccagcacgtcgtcgcagtccgtctgtgcggccagcgtcagacattccgggccaaagacccattgacagaatttcagatcgtccgggatctcttccatggaaacaggctccacaagaccggccagctggggccggaaccggcgcacttgctcaaaaagcttttctttgctgcggttggccgtcagcgccgtgatctggaaacgatcggagtgaagcgcggccacctgcagcgcctgcgtgccgatggagccggtggagccgagaacggcgagtttacgcttggactgcatgagaatccttccttacatatgagggttcgaaaagatcaaagaatatacagaagcaacgcacggtagctgtacacgatgatgcaggtgaagaaaatactgtccagccggtccagcatcccgccatggccggggaagatggtgccgaagtccttgatgccgcagtggcgcttgaccatgctttcgaacaggtcgcccacctgaccggcgaatccgcccagcaggcccaccagcacatcgccccacagggcgggatagggagccgcgccgcccagcgagaacagacggccaacgatgatcgcgcacaagatgcttcccagcaggccgcccacagaaccggcgatggttttattcgggctgatgtgggggcacagcttcggcccgcccaccgcgctgccgatgaaataggcgaaggtatcgccgcccacggccaccgcaaacaccatcaccagcagcatcttttgcagggaggccggggaatccagcaggccgatgaggcacatgcagggcagcaccagcgtgatcatgggcagaacgctgaccagaatgtcgatcaggtcagggtcctcccggcgcatgacctgcagcaccacaaaaaagcccagcacggtcagaattgggataatggccagcgaagaatagaacctcatcgcagggacggccagacacagggccacatagctggtccagcagaccgggcggtggccgcctaccttcagagcgttcagttcctcgtggatcgccagcatcgtggccagaaaaacggctactgcaaaataccagccaccaaggcagagtaccagcgtcaaaacggcgatcaggcaggcgcctgtgacgatccgctgccacatggaggatggtttcttcttcggcgtttctttctttgcctcttcgctcatggtttgttccctccccagtgagatcattggtagaatccagaacaaaaggtagtgtaacctgttttgagcggaaggtcaagagtgggaagggggaaagggggtgaagcccctttgggaatcccccgagtttggattggtacgtggcgattctaacgggaggttttacctgccggggggtgcgctgatttctgcgcgaaaggggggatgcagcctcatggagcatttatgattacgataagtgaactgaaggggtggcaaacaacaagcgaggtgcacgacagtgtgagccgtggcgaaggcttgccccgaggaaagtcgcgattcattttattaaaattgattagatcatttgacgactacgacccgaaggggtgcagggggcgagcggaaagccccctgcttgc

SEQ ID NO: 4187 - DNA, 32759 bp, Unknown
  16S sequences of unknown bacteria
ttgcacaaaaatcaattacaaaagtatattaccacaatatattgtggttgtcaagacttgaattaccttatttatgttgcgatgacttgatttacttttctctcttgttatttttgaagcaaacaacatattctattacaatgttcattcaaataacaagcctcgcagataatttcagaaatttcttgttccaacaagtcattatccgaaggtaattcatatgattcaattctttttatctgctcggggtttcttaaggcaaagtctatttgtttcccattactcttttttatataacgatatacttcagcaaagaaagtaacacactcatctttgttgtactcctcaaatcccgaaatattcatccagacatgatcttcttttccttcgaaacagacgccatccggatacatcccattgactaatatgcgccggaaacagattttatcttttctttttctttcaatactacccttaaaattcaatggtatattataataacaggtagcgaaccatcctcttgttttatgaaaagatttaatttgtacatcaatgtattcatcataggtgaatttttccgcgcctacaatatcacggaaaccatcaggactaaaatcaattatcccatcgtatgtacttaccattatattttgcccatagtatgtttcaaacagttctttttcttccggatacttttgtaccaaagaggccgcttttttcaatcggattttgcgttcctctgtgtatttcttttcttgcgcttgtgccgcattatcaatttctgcttcaatgtagttgatttcatcagatgtcagcagaggtaataaaatatccttgttgtcataatctccgtttaataaacgttgtttaaatctggtaaggatatctcttatcattgtttcggaaagaaaccgagcattttcgatggagcaactgtggtaacaaccggtgtttatattgccttgttcagtaccatataagacggctgtattccacggacataaataatgttctttttgtatcagacgtccgcgttttaagccttcttcaaattcggggaaaacctttggattgccgcatccttcgtaatcgtctacccaaaaacctgatggaccttgtgctgcattttgaatcattgtatccaatgcatcaagtgttgcttttttagcttcgttgtttttcatatttacaacctccgttaataagtgctgccaatagcagcctgacatgctaacaaaagctaattgcaaacctatataagatacaaatatattatatcttaaaaatttcctcttttcaataacataagcaaaaattttgaatttttttctattatgtattttaaagtgaagaaaaaacagaatatttcccgtttttataattgtacggattaaaaaccggttatgtaccttgaaaacttaacagtctaactccgatacattccttgtcgaacagcggctatccatctgtcaaagcaaacagagccaagagcacttaaattcgggtggcaaccgaattacgcgattactcggcaagggtataatggtacttccgtaactcgcggtccggctataatgaaagcgggaaggtgaaattcctatggatctgtttgccgcagacatcggagcgacaataaaacttgtatacaaaatttacaaatggcaataattagaatgaaaggagaaaatatgcgtaacacaaataatgatgatttaaggcagatgccgttaaaggatataagcactgttaaaattgatactacaaagccgtgcgatgagagaataaggagttatgttgagcagataggaaatccttatcgctatattgacaagggagtaattgtggaaattgagtacgcagatacaaatataagtctgcacgaccgacttctttcatatgcgaccaatattgataaaggcacaggaaattggtggtaataccggataagctattgacaatttatcaaatctgaggcatactatatacaaggtcaatgacggcggcatacacggctgtcggaacaaataccggaaacaaatttcctgattttatttcggaggtttgttttcttattatgaacacaaaatatacagcggcaaacgctgataaaaatgaatattttgctgttgcttattatcggctttcaaaggatgacaaggcaaaatccgaaagtgacagcattgcaaatcaacgaaagcttatttcttcctatgtggattcacattcaaatatcaagctggttgaggagcattatgacgacggatataccggaacgaactttgatcgtcccggttttcgtgctgttatggcggcaattaaggaaagaaatgttaattgcgttatagttaaggatctttcgagactcggaagagaatatatcgaaatgggaagatatatcgagacggttttcccgtctttaggtgtgcggtttatagcaataaacgacgatgtagacagcagccaaagcaacgattccgacgatataataattcctataaaaaacataatgaacgaaagctattgccgcgagctttcaaaaaaacttcgtaaacagtttcagattcagcgcgcaaacggggaatttttgggcgctttcgcaagctacggctatttaaagtcgcccgataataagcataaaattattatcgacgaatatgctgccgaaattgtgcgcggaatatttttattgaaaataagaggatacagcgggcagggtatagccgattttttgaataaagagcgaatactgccgcccgccgaatataaaaagagcatcggacttaattacaaaagcgggtttaaaggtctttcaaaagcaaaatggagtgcggttacggtagggaggatcttgcaaaatccgatttatataggcacgcttattcagggcaagcgcggaactccgaattataaaattaaaaaaatgcgcgttcgggatgaggatgattggtcggtggttaaaaataatcatccgccgattatcgacgaaacgatattctcggtggtagggcgtatgcttgcaagagacacaaggaaatctcccaatgatgaaacggtcagcccgttatcgggtgtgcttttttgcggagactgcgaaagaacaatgacacagcgctcagtgacgcgcggcaataagaaattttactattatatatgttccacgtacaagtaccgaaaaagctgttcatcacataattttgagcaaaaaaagttagaaaaaataattctaaacgctattacaaatcaaatgaatttagttattgaaataaacgaaatgcttaaagaaataggggagagcagtctcgcaaaaataaagataaagcgttttgatatgatgatagctcagaaaaattcggaatcggacagatataacggtatgcgcgccaaattatacgaggcattgaacgacggacttatagaccgcgacgagtacgaagcaatgcgcgcaaaatattcaaagctgatttatgataccgagcagtctgttgaaaatcttaaaagggagcgttcggaatttatttcggatacggcggataacaatgcatggataaatgaatttatcaggtttaacggtgctaaggagcttacaagagagcttgttgtaacatttatagaccgaatttatgtttacgaaaataagcggattaaaattgatttcaattaccgcaacgagctgtcaaatatgcaggaattattagaacaaaaagcaaaggaggcaataaaggatggcgcgtaaatcgaaatatgtatccgtattaaatgaaacggataaaagcgctgcggtgtatcgctgcggaatttattgccgcctttccgacgaagacggggacaacacagagtataactctatcggtaatcaggaaaagatagcaatgcactttttaaaggcgcaccccgatattgaggcggtagatatatattccgataacggctttaccggaatgaacttcagccgacccggattcaggcgtatgctttccgatattcgtgacggcgttatcaactgcgtaattgtcaaggatatttcacggttaggcagacattttgttttaacaagcgagcttgcggaaaaaatactgcctgaaatgaatgtgcgccttataagcattaacgacggttacgacagcataaaaaaggatgccgatttatcaagtcttactttgcctttaaaaatggtaatgaacgattattatgttaaggatatttccaaaaaaatcaaggcaagcatagggactaaaatgaaaaacggtgattttttgcctgcaagcgggagtattccttacgggtatttgcgcaattccgaaaaaaacacctttgatattgatacggaaaccgcgccgacggttaaaagaatttttgaaatgcgggcggcgggtataagtataaatgcaatttgcaaggaattaaataaggacggtattttctccccggggaaattgagatatgagcgcaaaatgacggacaaccctaaattcgcaaacgctttatggtcgcgaaagaccgtaagaaaaattttaagcgaccccgtatatttgggaaacagaatacacggaaaaatcgggcgcgaaagggttggtcttgataaaagctctcgccctgacagtgaatggataaccgttaaaaatgcgcatccggctattatatcagacgagctttttgaaaaggttcggaatttaatttcggaggaaagggatttccgaaatatgcatgatgcggcgaccgaaatcgggtgggacagcagagatattttcagaaataaaattttttgcgccgattgcggctcggtaatgagcggaatgaagggctgtgcaagaaagggcggaaaggctaaaagctggatatattatgactgtaattcttacagagagtcgcagcggcttttgtgttcatgccattatataaatcaaaataccgtaatgagcgtattgaaaaatgctcttgataagcagctgcaaatagccgtaaatgccgaaaggctgatttccgatattactgcccaccgtataaccttgccgttttatacagacgccgaaaaaaagcaaaaggagcttgccgttcaaagaaagagtttggagctgaaaacagagcaactgctgttagacctcacagacgggcttattgaccgcgaggaatatatgcttatgaagaaaaggtattcgaatatgcgggccgaattatcagcggaagaaaaaaacgccgcggagagaattaaagagtttaaaaacactgttgaaaaagccgagagccggttaaaggctttaagaaactataacggactgtcggaattagaccgcgaaacgcttgatttgttggtaaataaaatttatgtttcgggggacggaaatataaagatagtattaaactttgaagatccgtgccgccggcttaaaaaatatattgaaaaagcggggtgatagaaaatgcggcttgacgaaaggcagaatatctattatctacgtctttccagggaggacggcgatattgacagcggaaacgagacggaaagcaacagtataagctcgcaaagggtgtgtattcggcgttatattgaggaaaacggtatgaattgcgaggattttaccgaggtatccgacgacggttattcgggaacaaatatgcacagacccggtattcaaaaaatacttaaaatggcagaatcggggaatgtcaaaacaataattgtccgcgatctttcacgctttgcaagaaattatcttgaagcggggcattatcttgaatttatatttcccatgtacggcgtgcggtttatttccgtaaacgacggttatgacagccttttgacaggcgagaccacgggcggtttggggcttgcaattcataaccttataaatcaaatgtacagtatggatatttcacggaaaataaaaagcgcggttgatatgaaaaaactgaacggggaatatgtatacggcacggcgccctacggctataaaaagggcgagaaaaagaatactattgtgcccgataaggcggcagccccagttgtgaaaaatatttttgagtgggcggcttcgggtatgactgttacgagcatagccagaaaactaaacgctatgaatgttgtgacgccctcagtataccttgcagatgtgcgtgggaaatataaaacccgctccttttggacctttgattccgttcgcaatattttagaaaacagaatatatacgggcgacaccgttccctttaaatcgcatgttataaaggtaggcagcaaccgtgtgaaacaaattccgacagaactgcaaactgtaattccgaacacgcacgagcctattataacaagggatttattttacttggcgcaaacggcaaaaaggtcggttcataaaaataaatctgagccgcgaaaaaatttatttacatctcttttggtgtgcggctgctgcggaaaccgcctttcaaagggcaaagcacaaaataaatactggcggtgcgcaaattcaagatacacaaccgaaacggattgtaaaaatgttaaaattgaggaatctgctttaaaaaatattattttgagagctgtaaccgtgcaatgcaaaatgcttgacataagactgacaaaaattaaaaaagagagcagctctgtcgggtcggatgaatactttttaaaaaaggaaatatcctcataccgcagtaaaatagagcaggcaaaggatgcgaaaatccgtttatacgaagattatgcggacggcattttgaatgttgaggattataaaagccaaaaaaacgagcttttaaggagcactgacgatttacagcttaaactgaaaacagccgaatgcaggctcgccgaaataggggaaaggttaaaacaaaacgctgctcgtatatccgagagcaaagcattctcaaagtattccgaaatcaccgatttaacgcccgaacttgcaaaagaactgattgacagcattattgtctttccgaacggcacggtgagaattaaatggaattttgcggatgaaacggcaaatattattgagatgcagcctgtttccgaaaataaagctgtatagacttgtatttatcttgacaaatttgaaattttatgaaaatatgcaatcaaatgcagattttcataaacaagcaagtgtcttattccaattatgaactgaaaagtctgataattttaaatacggcaaagaaaagcactctgcggggtgcttttcttattgtaatggctgttgatatttcacggtttgtcttattaaattgttgtcccaaatacaacacaaaaaatatataggtgtgtgttataattgggacaacacttaaatttcgtcaaacccgcataaataaagggtttacacgcattttcagggtgtggttgtcccaaatataacataaatttgagccgttggcttaatatttcaaattttgcaaaaatgcccgcaaacccgcataaataaaggattttttaaaaatttaaaaaaattgttgttccatacttgacacactcgtgagcggcagccctattttgcaaaacggaaagcttataggcgcggtgacacacgttttaatagacgacccgacgacgggttacgctattttcgcagaaaatatgctgaaagaggcggaaaacaccaccggaaatacaaggcagaaaaaggcgtcctgataaataaaatcaataatgaatatattatctttccttacaaataataacaacacgattaaaaaaaggagattttaatatatgaaagccacaggaattgtaagaagaattgatgacctcggcagagttgttattccaaaggaaattcgccgcacaatgcgtattcgcgagggcgacccgctggaaatttacacgaatgccagcggggaggttatttttaaaaaatactcaccgataggcgaattatcaagcgttgccacgcagtatgccgaagcgcttaacgacgctaccgacctgaatgttctcatatgtgaccgcgaccactgcatagcggcggcgggtgtttcaaaaaaggaagtgcttgaacgcagggttacgcaaacggttgaggatataatggagggcagacgggtagaggttttcaaaaaaggggaacacagcccggctattgagggcatagaccaaaaaatcgcggtggcggcgccgatactcatttcgggtgacgtcagcggcgcggtggtgctgtcatcggataagggcaaaataccgagcgacagcgatataaagctggcttcggttgcggcatcgtttttgggaaaacagctggaacagtgaaaaaatacggctcacggtaaagcattacccggagccgtatttttttgtttcggtacttgttttttgctgaataatatggtataatcaggtaaaaattataatgggggagaagttggatttgaatacaggaattacaagagaaacggctgtcgggctgctcctcaaatacaataaagagaagtttcacatacagcacgctgttacggttgaaaacgttatgaaggactatgccgaaaagctcggctacgcagatgaagccgcagagtggggaatagtcgggcttttgcacgatgtggattttgaaaaatatcccgagcagcactgcataaaggcacctgagcttttgcgcgaggtaaacgcgagcgatgagcttatacatgccgtatgttcccacggatacggaattacggttgacataaaacccgagcacgaaatggaaagggtactttttgcctgcgatgagcttacaggacttataggtgcggcggcgcttatgcgaccatcaaagagcgtttcggatatggagcttaaaagcctgaaaaagaaatttaaggataaaaaatttgccgcgggatgttcaagagaaattatttcaaagggtgctgaaatgctgggttgggagcttgataagctgctcggtgacacccttgaaataatgcggagtgcggaaaaggctattgcaaacgattataaagagcttacgggtgaagaattatgagaaaaacgaaaatagtatgtacgttgggtcctgcctgctcggataagcagacgcttattgagatgtgcaaggcgggtatgaatgttgcgcggcttaatttttcgcacaacacgcacgccgaccacgaaaagcgaattgcgcttattaaagaggtgcgcgaagagctggggctgcccatagcgataatgcttgacacaaaaggacctgaataccgcattaaaacctttaaaaacggcaagataacgcttaaagagggcgatacctttacctttaccgccgatgaggttgagggggacgaaacccgcgtttcggtgaattataagggactgccgcacgatcttgaaaagggagatattattcttctgaacaacggacttttatcctttgaagtgaccgataaaaccgataccgacgttctttgccgcgtggtaatcggcggcgagctttcagacaggaaaagcatgagcttccccaacaaaacgctgaaacagaaatatttaagcaatcaggataagcaggatattaagttcggaatagagcacgacattgactttatcgcctgttcgtttgtttcctgcaggcaggatcttctggacgttaaaaattacctttcggaattgggcgcctcgggtatcgaccttattgcgaaaattgaaaaccgctcgggcgttgataatattgaagaaataagcggcgagtgcgacggaataatggtggcgcgcggcgatatgggggttgaaatcccctttgaggagctgcccgcgatacagaaaaagattattaccaaatgccgcatgctcggcaaacgcgttattacggctactgaaatgctggaatctatgatatacaatgtgcgcccgacgcgcgcggaaatatccgacgttgctaatgcggtttatgacggtacaagcgcgattatgctctcgggcgagaccgccgcgggcaaataccccgttcaggcggtaagaacaatggcgcggattgccgaaaacaccgaaaaaaatatacactacgaaaagcgctttttatcgtccgaattcaaaataaagaacactgttgacgcaatttcacacgcaacctgcggcatggcgattgatattgacgccaaagcgatagcggtttgcagcctttcgggtatgaccgcgagaatggtttcgcgtttccgcccgcctgttgatattgtgggtcttaccacaagcgaaaaaacctggcataagctctcgctttcgtggggggttaccccacagatgtgcgaaaattacccctctaccgatgttctgttctataacgcgcaaaagcttacaaaacaggttttgggactttgcgacggagataaaatagttattaccggcggcgttacaaacggtaaatcgggcaataccaaccttattaaggttgaaagagtttaaaataaaattttttaacgaagcggcaaaaccgctccgttaaggggagataaatatgataaagcatattattttatggcaattatccgatgagcttacggcagaggaaaagcttaaaaccgcccttgccgcaaagaaaaatcttgaaggacttaaaggggaaatagagggtcttgaagatattgaggtaataaccggaaaattgaacggctcaaatgctgatatgatgctcgacagcaccttcacaaccgaaaaagcgcttgcctattattcggtaaatccgcttcatgttgcggttgcggatacatatgtccgcccgtatataaagtcgcgcagctgtatgaattttgaagtataaaatagcatttagtttattacaaaaaacggctcactggaaaccgccgttgcagttgttggtgttgccgccgctatatattatggtggacccgtggcactttctgctttggccgcactgacttccgcgtgggctagcagcggagctcagctaccagcataaactattaataattttgtgaggtatattatgttttcaaaaacagttggcactgttacttttcattttgaacccctgttaattttcggtggattgatattgcttattttatttgcacatttaatccgctctatcgttacggagttagggtttcgggatatcacaaagaaactcgttacaggtgactacgatggcatcataaaaagcggtgagaaattgttgcagatgtatcaaaaatataatgcgagactctctaccagacagattatatcaaagatagagtatctgaatttttctcttgcaatttcatattttgccaggtctgatgacgatcagtttctatcgcatatcaatgaaatgaattcaagtttcgatattaaagagttttggttatcattattctatttaagaaaaaatgacttcgaaactgcatctgcgcattatgtccagattgcatccgatgatagcacacaagtatacaaaacgtttttaagctctttcgaagcttacaaacaaggtgatattgacactgcaaaatcaaaaataattggggtaatcgaccaactgaaacatcctatactaaagcaaattgccgactcaataataaaaaactagtttgtttcagccgcactttcgtgtgcggctgtttttattagtgcctttaggctggtttgctcaaagagcaaaccaaacaaccacccgctatgcgggtgtgcgtaaaaagttatacaaaaaaattcccctaagtagtacaataaggttgttcaagtcttagagtactgtgaaaggagaattttaatggctaacagcacaaatagtttatcacatacaaaatggttatgcaagtatcatatagtaattgttccaaaataccgaagaaaaataatatataatcaataccgaaaagatttgcaagaaattattagaacactaatcaaatacaaaggcgtggaaataatagaaggacatatgatgccagaccatgtacatcttttgataagcataccgcctaaaacgagcgtagcaagtttcatgggatacttgaaaggaaaaagtgcgctgatgatgttcgacaaacacgcaaatttaaagtataaatttggcaaccgacacttttgggcagaaggatattatgttttaacggtaggcttaaatgagagcacaataaagaaatatatataagaccaagagaaagcagatattgctttagacaagttaagcgtaaaagaatacgcagacccatttagttaacccctttaggggtagccaaagaggcaaagactctaaggcttgaacaaagagaaagcccgcgccttgagacgcgggtcggcattatgggcttttagcccttgtgcaaaccacccgtttggcggctgatttaaaatgttacataatttttccataatgcacctcttatatataatatgtgtaattctaatttttgtcatacggaataccgatttaattacatataataattcggggtgaagaaaatgaaaaataaaaaagaaaaaagcaagccggttatagatgtatcgtctgttccgattaccggaatgcccgaaaccgcgttcgatatggtaaaccgctacggcacatacaatatacagtctaccgccgataccgaaaatatgtatcccaccgttgcgcacggctttaatgaggggattattgagaccgattgcgatgaaaatacggacggtgataagaaaaagaagtaaaaacttgacaaatgctccgaaaagctttataatttcagtatgacttaacttttttggaggaattaaaaaatatgattagtgccggagatttcagaaacggagtaacctttgaggaagacggcaacgttcttcaggtaattgaatttcagcatgtaaagccgggtaagggcgccgcattcgtaagaacaaaggttaaaaacgttattaccggatcggttgttgaaaagagttataaccctaccgcaaaattcccgactgcctttgttgagagaaaggatatggaatattcctattccgacggtgatctttactactttatggatcaggaaagctatgagctggttccgataaacggcagcgagctgggcgataactttaagtttgtaaaagaaaatatggtttgcaaaatcctttcctataagggtaaggttttcggtgtagagccgcccacattcgttgagcttcaggtatccgctaccgatcccggatttaagggcgataccgctaccaacgccaccaagcccgcaacgcttgaaacaggcgctgaaattcgcgttccgctctttataaacgagggcgatatgataagaattgatacccgcacaggcgagtatatggaacgcgcataatttaaaaacggaggtttgcaaaatggatatttgtgagaaagtagcttacattaaaggtcttgctgagggtctcgcacttgacgacagcaccaaggagggcaaggttcttgccgctattattgatgtgctgggcgatattacaaacgagatttgcgaaatagaggacggctgcgacgagcttatggagcagcttgacgctgttgacgaggatctttccaatgttgaggatgttgtttacggcgacgacgattgcgactgctgcgatgacgactgtgattgctgcgacgacgaggatctttatgaaatagagtgcccagcctgccacgatacggtttatcttgatgaggatatgctcgaagaagacgggataacctgcccgaactgcggaacagagcttgaatttgattttgacggctgcgactgcggctgctgccacggtgaagacgataccgacgcagacgagaaagaataactttttaaagcggaattcggaatgtgtaatgcggaattttaaaatgagtaggtcttaattccgaatttatatctctgaaaactgcaaagctcccttatatcgggagcttttttgataaataaagaccgaggttttatatatgctcgaaacggaatttaagcttgaatacgaaattgaagaattgccggcagacggcggcgtgcccgttatagtggtggcggcaggctcgtcaacgcgtatgaacggcataaacaagcaaaccgcgctgctttgcggtgttcctttaataataaggactcttatgcagtttgaaaagtgcagcaaaatatcaaatattattctcgttgtaaagccggatgagcttttcagtatgcagcagttagcagacgggtatagcataaaaaagctatctgatattgtatgcggcggggaaagccgccagcaatcggttaaaaacggattggagcgcctgcccgaaaatgccgaaaccgtgcttattcatgacggcgcgcgcccgtttgtgacggatgaaattatatgcagcgttatatccgccctcagtacccataacgccgtaacctgcgccgttaagctgaaagatacggtaaagcgggttgacgaaaacggaaacgtgctgtcaacgcctgacagaaatacgcttgtagctgtgcagactccgcagggcgtgaatgtttccgattaccgcgcggcgcttgaaagctcggtggatctcggcaggtttactgatgatatgtcggttatggaggcggcggggcataagccgtttaccgtgcccggcagctatgaaaacataaaggtaaccacgcccgaagatatagcgcttgcggaatatcttattttaaaggatgaaaaggaatgagaataggtcacggctatgatgtccaccgctttgcggaaaacaggcggcttgttataggcggtgtggaaattccgtttgaaatggggcttttggggcactctgacgcggacgtgctgctccatgccgtttgcgacgcgctgctcggcgcggcagcgctgtgggatataggcaagcatttcccggataccgaccccgcgttttgtaatattgacagccgcatactgcttagaaaaaccgcggagctgctgcgtgagcgcggctttgtgccggttaatatagatgcaacggttatagctcaaaagccaaagcttgcggcttttattcccgaaatggtgaaaaatatagcggctgactgcggcattgaccccgattgcgttaatgttaaggctacaaccgaggagggcttgggctttacgggtaaaatggagggcatatcggcgcacgccgtttgccttattgagcgaatataggcactgacccccgcatattatttacgggggagtaaatatgaagctttttataaccttttcaaaaagaagtctcgcggcggtgctgctttcacttatagcggcgcttgtcgttttaagtagggtcacggcgctgtcgggcggcggtattaacggctctacaaacgccgaacgggtggattatatgaacagcctcggctgcaatgtagaggaaacggcgatttcctcaaaggaaacggtaattccacaaagcttcggcaaggtgtatgaaaggtataattcattgcagaaaaaagccggatttgaccttgcgccttttcacggcagggaagcgtgtgtttacacataccgactggcagatgaaccgaatacggttgtaaatcttattgttgcaaacggctgcattatcggcggtgatatttcatcaaccgcgcttgacggatttatgctgccgctttcgagtgagagtgtaaagaaaattgagacttgataaatttatttcttcacagcttaatatttcccgcaaggacgcccgcaccgcgattttaaggggcagggcggcggtaggcggcgcaacggctaaagccgtggattttaaaatagacgaaaacgctgatacagtcacccttgacggacaggcgttaagctataaaaagtatatttatattgttatgaataagccgcgtggggtgctttcggcaagcgaagacacgcggcagcggacggttattgatttgattcccgaagacctgcggcggaacggactttttcccgtggggagactggataaggacactacaggattgctcattataactgacaacggggattttgcccacagggttttatcgccaaagaaagaaatttttaaaacctatattgcggtattggatggcgatataacccccgatatgccggaaaaatttttaaacggggtgattttatcagacggaacaaggtgccgcaaagcatttttaaagcgtgtggataaaaacaccgcggaaattaaaatctgcgagggaaaatatcaccagataaaaagaatgttcggcacggtaggactcggagtaaacgcgcttaaaagaacggcggtgggtaatttccgtttaccggaaaatttgcccgagggtgcgtgttcagagaccgatttggaaatgcttggaagtatattttccgacgaataacgcccgaatatgcatattaaacaaaacatttcttttaacattggatatattttgcatagcattttttaaggcattttggtataataacaaagtaaactcaagcaatttttttaggaggctgcaatatggcaagtttgtctttgcgtaacgtatacaaaagatacccgggcggcgttacggctgtttcggattttaacctggagattaaggataaagagtttataattctcgttggtccttcaggttgcggtaagtccactaccctgagaatggtagcaggtcttgaggaaatttccgacggtgaaatctacatcggtgacaagcttgttaacgacgttgctccgaaggatcgcgatatagcgatggttttccagaactacgcgctttatcctcatatgactgttttcgacaatatggctttcggtcttaagcttcgcaaaaccccgaaggatgagattaagcgccgcgttgaagaggctgcccgtattcttgatatttcacacctgttagagcgtaagccgaaggctttgtccggtggtcagcgtcagcgtgttgctttgggacgtgcaatagttcgtgagcctaaggtattcctgcttgacgaaccgctttccaacttggatgctaagctccgtgcacagatgcgtaccgaaatttctaagcttcaccagcgtttgggtactacgtttatttacgttacccacgaccagaccgaggctatgacaatgggtacccgcattgttgttatgaagagcggtcttattcagcaggttgataccccgaataacctttacctctatccctgcaaccttttcgttgccggatttatcggttctccgcagatgaactttatcgagtctaagctccttaaagagggcgaggattatctcgtagagtttggctctgaagatacaaagacccgcgccggtgttaagtataaaattaaactcccggcttctaagaataaggataactgccttgaggcttatgtcggcaaggaagttattatgggtattcgtcctgagaacgttcacaacgaggaagacctcatagctatccataaggacggcttagtagaggctgacgttgaggttaccgagcttatgggtgccgagacttacctctatatgaactgcgagggtcagtcgattaacgctcgcgttagcccgacaaataccgctcgccccggcgataagattacaattgcatttgaaaccgctaagattcacctgttcgataaggacaccgagcttacaatctgcaattgattttaaaatgattaagcaaacaggcaaccgaaaatcggttgcctgttttttgtgattattaaatttagctgttaaatcacggctttagtgtgctgtcaattcataggctccaatatacccttcagtcagccatacggctgacagcatctcggctgccgcctcggtcggtgcttcttctttgcagaggtgtccacaggacacccgcaccctcgtcagagggagcctattttgtttccttttagcctataattcctattataaatattgcaagtataagtatgggcagtacgataataaagtaccatttcatccatttagcaacctttaagcccttgccggtattcgcttcttttctgtaattatcaaagccccagccgaattttgtaacgcagaaaagcaggtaaaccagcgaccccaagggcagcagaatattgcttacaataaaatcctcggtgtcaagaatatccctgccgcctataaggtgaacattgctccataaattatagcccaaaacggagggaatacttgctataagaattacaacgccgtttatcagagcggctttttttctgctccagccgagcgtatccatacaggaggacattatgttttcaaacactgctataacggttgagaacgaggcgaatgtcatgaacaggaagaaaagtgcgccccaaattctgccgcctgacatattaacaaatacattaggcagtgtaacaaaaataagcccgggcccctgatttacttcaattccgtagctgaagcaggcggggaagattataagtcctgcggaaatcgccacaaaggtatcaagcccgcaaatgcgcgcgccctcgcccatcagcgagtgctccttgcccatatagctgccgaaaatctccattgccgcaattccaaggcttaaagtaaagaatgattgattcatagccgcggctataacattgcccagccctactgatttaacgttttctatgttcggcacaaggtaaaatttaagcccttcacccgcgcccgagagggtaaagctatgtattgccaaaatgagtataagcacgaaaagcgcgctcatcataaccttgcttactctttcaagccccttttgtacgccaatgctgcaaataagtattccggcaataactgttatagccatccaaaatcccatttcaccggggcttgccagcatatcgttgaaaaccttgcccgcgtcctcatatctgtaagaacttaataccgattcaggcgtgctgcctgaggggaaggtgccgattaaaaacttaaagaaatagttcagcatccaacctgaaacggtagtgtagtacatcataagcacatagcagcctattattgcaaaccaaccgtgaatgtgccacttgtgcccgggcttttcaagcgccttgtaagccaacaccgcgcttttgcggcttgctctgcccacagccagctccattgttaaaaccggcagacccattataaccagcatcaaaagataaataagaacaaaaattccgccgccgttttgccccacaataaacgggaaacgccaaacgttgcctatgcctattgcgcagcccgcactgacgagcagaaaaccgagccgcgatttgaaagattctctctccattacataaacccctttttaatttttaataaaaatattatatatgagcgggtgtaaaatgtcaataattcaattttttgtgaatcttttgccgtccaaaggctcccttcttttgcgtaagcaaatagaggtggttgctctccgcagtgtggctgggctgctttgcctccctctgacgagggtgcctaaatcggattgaaatttattatgtttttaccttattattgcaataataaatttttctttaagtcggcaaggtcggcgataaacgttcccattaaatccttgccgatgcgcgtgtctaaaagcggcatatcaataacgcaaatataggcgcctatttccttggtgagtattcgccactggttttgaatttcctcgtaattgcgacctaagcggtcaatgcttagtattcggtcataaaaaatcatccccctgcctatataatacagggagatgacttgatattaaaatgtaaacattataatatgaggatattttaaatactatctttaatcagagcattttgcgctcgtgccgcgcagggcaccctatttctgtgcggacagaaataggggaaagagccgtcgggaaccctgttgattgggttcccaaaccctcctgaacaaccaaaggggcaaactcccctttggatacccctactgcgtaaagcaaaagtatgtgtggtaattttacttttttattccaatctacgccgatgttacggtgtaggctcgctgaaaagcccaatatgcggcgggtaatagctccagcgcacaaacagcactgtaaacacgcccgcaagaattgccgaaatataaattgcagccttgctttgcaggcagccgtacttaataattgcgtattttataagcagcattacaagcacacctataaagaacgaaagcacgtttaaaaacggtatatcatagccgataattccggtataggtgtaaaagaacataactattgaaagcataccgccgaaaatgcccgcaacagccgcgggaatataattccggggtttgtttttcattataaagtattctataaccgaataaataagagcagggaagaagattagctttaaatgctcccatgtgctttcgtttacgggaaagaaaaagccgataaaatgattgtcgcccgtccaatcgtacacaaagtgccacagtgtgcccacagtgcctacaataataaactcaagcacggcgtttaattttttcatataattatcacccataacatattatgaggataattatgccgattattcccacaacaaagaaaggcttacttgtgttaaatttcgggcggcgcggagtgcggatattgagttgcaattcggttttccggctttgtatcaaaaaggtaaagaaccaataaaaagagccattcaagcggtttcattattatatatactatgtcggcagcaagcggggttttaatatgctttgctatcgggtagcccgttttatcgtaaaaattacgaattgcgcggtgtaaatgcggagcacgctcggatagcagctgttcaaaagcgtttgcaatgcaaagctgcctgttaaccgttatttcgtgaccgtgccttttgcctgttctcaaaggctttactaattttttgtgcccctcggctgctacggtgcataggtaatgaccgtctctcggcaggttttcgggcgcgattttctgcgacattgtccagtcggctgtttcggtccagagctttattgcactgtcaggctcctgaccgaaaagcagcagaattaccgtaataatgccgagcaggggaataagcaacagcagtgccagtacaggcaggcttgatttattatgcaaaaatgcggagatacgcggcattttggttcgctcttccgtttcttccgacgttttatcggcagaaagcacttcgcaggctattacgcggaaaaaaagaattatatagtttataggaaataaaaagaggaaaaatgattcgccggaaatttgtacgcaccacaatacgcaaagcgtgcagccgatatatattgaggaaatgcagagcgccgaaaaaagcggcgggcgtttattctgcggaataaatctcaggcagatatgaccgataacagcaacggagaaaaggactgcaagtgtgggcgtatgctcgggcgatataggcgaatgtctttgattgtcgtaaagctgaacaaaccaatccttgaaaagtatattttttaagggggcaaatgtaacggtataataaactcccgcagcaattgagagcaattcccaaaggctcataaaagtacttttatatgtcagccgttttttgtttgtgagcagtaaaatattttccgcagtgagcacaaaaggcagaaatacaattgaaattacaagaaaagcggaaagttcaaaatcatcgcgaggaccgtaaatgagctgataaataacagtacaaattaaggcgaccgcgccgcaaaacagcaaggttgtggaaacaggatatttgagaaaacggtgccaaagctttttgatatggcgcattacgaatacccctttatttttctgtttttactataaacgaaaaatctatatatccgtccccggggacggtgtaaacatcgcttaaagcggaagagtatgcaacggtggtattttggaacaaaagcgggataatgtgcgtgccgcgaagtaattctgcctgcaccgcgtcgggggttttgccctttgcggaaatgccgaatttttcggcaaattccgaaaggcttttgctgtcggcacgaatggggaacacggatatcggtaaatcgcggtttttaagctgcggggtcagcttttcggcactgcttgcggtctcgatatttataaacgcgccgagtttgttttgccagtgccccacaatatcggttatgatagattttatattgccgtcatcgtaaaaatagagctttatatccgacgggaattttttatcgggtagatttttaagctccgccgagtaaagtgctttcgcaccgtcataattataggaaagcatacccgccgaggttttttcacccgaaataacacccgggaaaagggaagcggcggcggaatagcccggctttaaatcggctgaatatacctgctcgcctataagcattgcaaggcttttacgcagattttccgaaagggagtcatccatagtcataacccagcatatattctgataatcggttattttaagccctgccgattcagcgccttttgacagcgcggaatctataaaggttatatccacattgttatccagcagccgctcatagggcgttttatccttagcgcgggttagataaaccgccgcatttttggctttaaaggtgcccttgtagttatcaaaggaataaagccgtattccgaaagagtcctcgccgtcgttccagcgcccgagtctgtagctgccgcaggatataacggtatcgagcgtcagcccgtatttgccgcccgattcattgaaaaacttttcattgcagggcatagcaacgcttgtggtaaggctttcttcaaagccagggtcatcgtatgccagctcaattacaaccgtgtgctcgtcgggagcggatatgccgagggtatcggcgctttttttgcctttataaatatcatgcgcgttttttacggcgaaaagccgcgaggcatagggtgcggcggttacgggagttaccgcgcggcgcagcccgaaaacaaaatcggcggcggtaagaggctctttattgctccatacggcgttttcgcgcagcttaaaggtgtatttaagcccgtttttttcaaagcttttcgccgcgccgcaaacaacggcgccgcttgaattttttctgagcagcccctcgtaaatatttttaacgattgacagctccgaatcggttgaggcggtttgcgcgtcaagcgtaaaggggcgctcgggcagttcgtaataaataattgcgttttggtagctatctttgcagccgaccgatgttataagtaaagcaagcgccgaaaacagcgcgaaaaatttaaaacagcatttcatttaaataaccttctgaatattttctatgggtattttaccacaaaaaaagcttatttgcaataacaacaaaaaacgggcaaaaaaatttgttaaaaaattgtcgaaaggggcttttcaaatgaaaaaatatatgttatactacataagtatatgtagattcatatatatgaattgtgcatacaattattcgaaggaggattcgtttaatgcaaaaaaagatcagtaagcttccctttaagggaacagctgaacaggaaaaaaagctgcgcgaaataattgatgccaacaagcacgataaaagtcttttgatggcagttatgcagcaggcgcaggacgtttacggctacctgcctatggaggttcaggaaatgatagccgagggaatggacgtgccgcttgaaaaggtttacggtgtttccacattttacgcgcagttttcgctgtcgcctaagggtgagtacaacatatccgtatgtcttggcaccgcgtgctatgttaagggctcgggggatattttcaacaagctgagcgaaagactcggaatcggcgcggacgaatgtaccgaggacggcagattttcgcttaccgcttgccgctgtataggcgcttgcggcttggcgccggtgcttactgttaatgatgaggtttacggcagactgaccgtagacgatgttgacggcatacttgaaaaatacggcttcggtaaataaatcctgaaaggatactccgcatatgaagatcggtactataaaagatttgctgggcgcacaggtcatctgctgcgaggaggggctttcacgccacgtttattccgcctgcggcagcgatatgatgagcgatgtgctggcatatgtaaaggatcaggcggtgctgcttacggggcttgttaatttacaggttgtaagaaccgccgaaatgatggatatgaactgcatagtgtttgtgcgctctaaaatgcctactgccgaaatgattgagctggctaaggattgcggtatggtaattcttgctaccgataaaagaatgtacgaggcttgcggtattctttacagcaacggtcttgtagggaacagggttaaaaatgcctgaggctttgaaattccactttgacgttgacggtgaggattttacatcggcaggtaaggcctcggttcaggtcaagaagaatttaaggcaattagggctgccgcccgaaataatacgcagggtctccattgcaatgtacgagggcgaaataaatatggtaattcacgcaggcggcggcgaagccgacgttaccgtgagtgaggactgtattgaaatattcctgcatgacaaaggaccgggaattaaggatattgagcgggctatgcaggaggggtactccacagcgtccgaccagatacgttccttaggtttcggcgcgggaatggggctgcccaatatgaagcgctataccgacagtatggagataaactccacggtgggcgtgggtacggacattacaatgcgagttatgctttgaaaaaatattttcggcaggtgctcaaatgaacagatatgaacattcggtttaccttgacgaaaaaaagtgcagcggctgcaccgcgtgcttaaagcactgccccacagaggcaataagaatacgcggcggtcacgcctcaattgaccccgaccgctgtatagactgcggcgaatgtataagggtatgcccgcataacgcgaaaaaggcggtttgcgaaaagctttcggcaatggataaattcaagtggaaaatcgcattgcccgcgccctcactatacggtcagttcgataatttagaggacgttgactatgtgcttgacggtcttataaaaatcgggtttgacgatgtgtttgaggtttccgccgcggcggaactcgtcagcgcgtacacaaggctttaccttaaaaccgagggggttaaaaaacccgctataagctcggcgtgccccgtggtaataaggcttataggcttgcgttttccgtcccttaccgataatattatacatatgctgccgccaatggaaattgcggcaatgcttgcacgcaaaaaggcaaagcgggagcaccccgagctatcggatgaggagataggtgtttgctttatttcaccctgccccgcaaaggtaagctatgtaaaaaacgggtttgcaggctataaaagtcaggttgatacggtggtttcgattaacgatatttactttcagcttatagccaaaatgcagccgaaggcggatataaagtcgctttcaaactcgggtatgattggcattggctgggcaagcacggggggagaggctaccgcaatattcaacgaaagctacttagcggcggacggaattgaaaacgtgatacgggtgctcgatcaggtggaaaacggcaatataccgccgcttgaatttattgagcttaacgcgtgttcgggcggctgcgtaggcggggttatgacaatgcaaaacccctttatagcaaaagcgcggctgcagacgttaagaagatatttgcccgtttcgcaaaactttctttcaaaggaagaaagctatattcccgaaagctacattttcaacgaaatacctacctatcacccaatttccagactcagcgacagtatggctgaatcaatgcggatgatggcggatattcaaaagctgcgcgataccttacccggtattgactgcggcgcgtgcggagcacctaactgccgcgcgtttgcagaggacacggtaaggaacagatcctgcggggaaaaatgtcccttatataaggagggcgacggtaaatgacggtagaagaccttttgaaaaacggtttcggcgcggttgcaacccccgaaacggacagagaaataaccggcgtttatataggcgaccttttaagctgggtaatgggcagggcacaatcgggcgacgcgtggataaccataatgtccaacgccaatattgtggcggtagcagcccttgcggacactgcctgcataatagcggcagagggtgtggaaatacccgcggacgtttgtaaaacggcggaagaaaagggagttaatatactttcctttcccggctctgcatatgatgccgcggtaacgcttcactcgcttttatgaggtattattacgatctgcacattcattcctgcttatccccctgcggggataacgatatgacgcccgacagcattgcgggaatgggggagctgaacggactcgatattatggcgcttaccgaccataataccctaaaaaactgccctgcgttttttaaagcggcttacaggcacggaataattcccgtggcgggaacagagcttacaacggcagaggatattcacgcggtttgtctgtttgccacactttcgggcgctatggaatttgaaaaggtgcttgaagaaagaagaataaaaatcaaaaaccgacccgatattttcggggaacagcgtattaccgatgaaaacgataatatcacgggttatgacgattatcttcttataaacgctacttctttttcgcttgaagaagtgccgcaggcagtggaaaaatacggcggcgtgtgctttccggcacatatcgacaggcagtcaaacggcttgcttgcagtgctgggctttttccctgaaaaaccgtactttccttttgcggaggtaaacgacggggaaaaggcagcggaatatgccgagaaatacggcaaaaaaattataacaagctccgacgctcactatttatggaatataaatgagcgcggcgcttacatagagcttggctgcggcagggaaaacgccgcacaggcgcttataaactatttgcggggtgcggtatgaaagaaatatcgcttaatatacttgatatagccgaaaattcggtgaaggctagggcaacgcttacggaaattaccgtgaacgaaaccgacggtacgctgacgcttaaaatttcggataacggctgcggaatgacggcagaaacgctgaaagccgtaaccgacccgttttacaccacgcgcaccacgcgcaaggtaggaatggggctgccgcttttaaaaatggaggcagagcagacgggcggcactttttgtatttcatcaaaagccgaaagcgaataccccgaagaccacggaaccgaagtcacggcggttttcaataaaaagcatattgattatacgccgctcggagacgttgtttcaagtattgtgaccttaatacagggtcaccccgataccgattttctgtttacgcacacctatggggacaaaagcgtgacccttgatacaagggagctgcgcgcggttctcgaggaagtgccgcttaacagttatgaggtgctaaaattcatagaagaaaccttaagaaaggaagaaaacatatgaaatcattggctgaattacaggcaataaaggaaaaaatgcgcgataaggtcattcttcgcgagggcgttaacagcgttcgcgtagttgtgggaatggctacctgcggtattgcggcaggcgcgcgccccgttttgaacgctttggttgagggcgtaaacaaagagggacttacggaaaaggtgaccgtttcacagacaggctgcataggcatttgccagttagagcctattgtagaggtctttgagccgggcaaggaaaaaataacctatgttaaaatgactcccgaaaaggcagcgcgcgtaattgaggagcatcttaaaaacggtaacgtcgtaaacgaatatacgatagccgctcataagtaataatttggaggtaaaaaaatgattcgtgcacatgtgttgatctgcggcggtaccggctgtacctcttcgggaagccacgatattcaaaaggcgtttgccgagaatattgaaagctgcggacttgcggacgaggtaaagctcgtacagacaggctgtttcggtctttgcgctttgggaccggttgttatcgtttatcctgacggtactttttacagcagagtaacccccgaggacgttaaggaaattgttgaggaacacctgcttaaaggacgtattgttgagcgcttggtttataacgatacaggtaacgtggctgatgaaattgagggtaacgtatccctcggtgataccgctttctataaatcgcagaaccgcgtggttcttcgtaactgcggcgttattaaccccgagaatatcgacgaatacatagctatggacggctacgccgctctcggtaaggttttaaccgaaatgacccccgaggacgttattaagtgcgttaccgattcgggtcttcgcggcagaggcggcggcggcttccccacgggcagaaagtgggccttgtgcgcaccgaataaggctccgcagaagtatgtagtatgtaatgcggacgagggcgaccccggtgcgtttatggaccgctcggtattagagggcgacccgcactctgtaattgaggctatggctattgcgggctacgcaataggcgctacagaagggtatgtttacgttcgtgcagagtacccgatagcagttcaccgcttgcagatagctatcgatcaggcacgtgaatacgggcttttgggtaaggatattttcggctcgggctttgattttgatttacatatccgccttggtgccggcgcattcgtttgcggcgaggaaaccgcgcttatgacctctattgagggcaaccgcggcgagccgagaccccgcccgccgtatccggcagttaagggtctttacaactcacccactgttgaaaacaacgttgaaacctttgcaaacattccgcagattattcttcgcggcgccgagtggtttgcttcaatgggaacagagcgctctaagggtactaaggtattcgccttgggcggtaagataaagcacacgggtcttgttgaaattcccatgggtacgactcttcgccatataattgaagatataggcggcggtattccgaacggcaagaaattcaaagccgctcagacaggcggaccctcgggcggatgtattcccgcaagccttattgataccgaggttgattacgataacttaaccgctatcggctgtatgatgggttcgggcggacttattgttatggacgaagacacctgtatggttgatatggctaaattcttccttgaatttacggttgatgagtcctgcggtaagtgcacaccctgccgcgtaggtacaaagagactgcttgaattactcgataaaatcaccaagggcaacggcacgcttgaagaccttgacagaatggaagagctttgccactacattaagcagaactccctttgcggtctcggtcagactgcgcctaaccccgtgcttgcaacccttaaattcttccgtgacgaatatgtggctcacgttaccgataaggtatgtcctgccggcgtatgtaaggatcttgtttcttactcgattattgccgataaatgtaagggctgcacaaagtgcgcccgtaactgccctgtgggcgctatcagcggtactattaaaaatccgcacgaaatcaatcagaccgcttgtatcaagtgcggcgcttgtattgctaactgcccgttcggcgcaataattaaaaagtaagaaaggagccttaaataatggatatgttaaatgttaaaataaacggtatttcggtaagcgtagaaaaaggctctaccatattggacgccgcgcgagctgcgggcgttgaaattcccaccctttgctttatgaaggagaaaaacgagataggcgcctgccgtatctgcgtggttgaggctaacgagggcaggggcttccgcattgttaccgcctgcgtttaccccgtaagcgagggtatggaggttcttaccaacaccgaaaaaattcagaaagcaagaagaaccaccttagagcttattctctctacccacgagaaaaagtgcctttcctgcgttcgctccacaaactgcgagctgcaaaagctctgccgcgattacggcgtagaggagtctgcctttgagggctttaagccgacttacgagcttgatacttcaactcctcaccttgtaagggataacaacaagtgcgtgctttgccgccgctgcgttgccgcctgcaatgagcagtatgtaggcgttataggcgctaacaaccgcggtattgatacggcaataggcactccgtttgaggtgggtctttcaaatgttccgtgtatctcctgcggtcagtgcaccgttgtatgtcctaccggcgcattggttgaaaaggacgataccgataaaatctgggcggcgcttgccgaccccgataagcacgttgtggtacagaccgctccgtctatccgcgctactttgggcgaatgtttcggtatgcccataggcaccaacgttgagggcaaaatggttgcggctctgcgtcgtctcggtttcgataagattttcgataccgattttgccgccgaccttacaatagtggaagaggctaacgagcttgttgagcgcataaaaaataacggcacattaccgatgataacctcctgctcgcccggttgggtcaagttctgcgagtattattatcccgatatgttagagcatctttctacctgcaaatcaccgcagcaaatggcgggagcggttattaagacctactatgccgataaaatgggtattgacccgaaagacatagtttccgtttcggtaatgccctgcacggctaagaaatttgaaatcggcagggaagaccagagcgcggcgggcgtgcccgatgttgatattgccattaccacccgtgagctttcgcgtatgataatgcgcgcgggtatcagcttcacaaatctgcccgatgaagagtttgactctccgctaggtgaagacacgggcgcggcggttatattcggcgctacgggcggcgttatggaggcggcgctcagaaccgctaacgactggcttaccggcaaagataacaccgatatcgactttacagcggtgcgcggcacacagggtcttaaacaggcaactgtgaatattaacggcagtgatataaaggttgccgtagcctcgggcgcagcggctgccaagtgcgttatggacagaatgaagaacggcaaccccgacggctgggcgtttgttgaaataatgggctgccccggcggctgcgtaaacggcggcggtcagccgattcagccgcagtatgtaagagatactgttgacttaaaggctgtaagagctaaagcgctttacgatcaggacgcttcaatggcgctgcgtaaatcgcacgaatcccccgttgtaaaggcgctttacagcgagtggtacgacggcttcggcggtcataaggctcaccacgacctgcacacaagctacgttccgagaaagaaatattctaaataatacaaaaaaggggctgccgcaagagcgaaagaatcgcgggcggcagcccttaatgtttataaactgttaaaaagtcgaaagcttttttggtttttttgaacattgtatccgggcttcagctgcccgtttcgcatatgatcctctttcatacgcataaaggttgcgtctgtatcggtcttggaatagctttttctcttgccgcatattcctaaagcctcgcggtatttttctaatctttcaagatgatccgtaagccgttcgcagtccctttgcaattcggtctttcttttgccgctcccgtgcacaaattctatcccatacatacgggcaaaattttcaaggtacccaattacctcttctaattcggcgctttcggaaagtccgtattttaaagcaatacccggcaattcccggtctatacggtcatacagacggttcatattcttctgtaccgcatttgcccatacgaaggtatatcggttggcatttgcctctatcttggtaccgtccacaaatacatttttaaattctgcttcgccatattgctttgtctatacaaaatagttgtgtccaaataatatgaactacaaatttatgcgtcttttttgaaaaaaataattgttttataaaaaaagttattgacattcagcggtaaagagtatataattataaagctgtcaattttgcgaacggtgattacatataagcggagtagcagcgcgatagatgttataaaaactacaattaaatatttgcttttattatttatcgaggtgtggctcagtttggtagctttgaacacgagcgcttcctgtggaagaaaaagcgagtgtgaaaagtcgcagcggtcaaatttttttccgctccaaggagtaaaaaaatttgggcaccgcaagtgtaagcggagtagcagcgcgatagatgttataaaaaactacaattaaatatttgcttttattatttatcgaggtgtggctcagtttggtagctttgaacacgagcgcttcctgtggaagaaaaagcgagtgtgaaaagtcgcagcggtcaaatttttttccgctccaaggagtaaaaaaatttgggcaccgcaagtgtaagcggagtagcagcgcgatagatgttataaaaaactacaattaaatatttgcttttattatttatcgaggtgtggctcagtttggtagagcgctgcgttcgggacgcagaggccgcaggttcaagtcctgtcacctcgaccattttttatcttaatgaaggcatagctcagttggttagagtacctgcttgacatgcagggggt

SEQ ID NO: 4188 - DNA, 7341 bp, Unknown
  16S sequences of unknown bacteria
gccgtcacttatctgatccgctgtctgccgctggtctgcttcagccgccgcatcaagagccgctttctgcagtctttcctgtattatgtgccttatgcggtgctcggcgcgatgacgttcccggccgtcttcacctccggcggcgcgctgatcccttcctgcatcggcacgctgacggcggtcatcctcgcctggcgcggcaagagcctgctcatggtggccgctgccgcttcgcttgcggtttacctggccgccttgttctgctgatatgatccgctttggctgcgcgaaggacgctgcggcggtataccggctgatctgcgcgctggaggatgcggcctttccccgcgcacgcttcgatcagctgcatcactgcgcgcgcatcgcagagatcatggagctagcggtggaggagggctgccgcggacgcggtatcggaaccgtgctgttcgatcgtgcctgcgcgctgagcgcacaggccggctgtgtgcagatcgagctttcctgcagctgtgcccgtcatgacgcgcatcgcttctatgcgcgcaagggcatgtgtctttcccaccgccgctatatcaagaccctgaaatgatgacgcagagcgcacctgcttgaacagcggtcggcgctctgcgttttgtctgttcgcttggcagtatgccatgattttacactgattttacaaacggatgaatacttttttacgggacgaatgacataatacaactgtaaggatgtgtaaacatatgggtatgagtgtactgaacgccctgttttcctttatcggcggtctgggcatgttcctgttcggcatgcacatcatgtcagagggactgcagaagagcgccggagagaaaagccggcgttttatgcgtctgttcacagacaaccgcctgctgggcgttgcggtaggcgcgctgatcaccgcgatcgtccagagctcttcactgaccacggtcatggcagtgggattcgtgaatgccggcatgatgacgctgagccaggccgtgggcatcatcatgggtgcgaacatcggcacgacgctgaccgcatggcttgtctctatgaacgaatgggggaacctgcttcgtccgcagttcttcgccccgctgctgctggggatcggtgtggcgctgctgctgagcggaaaagaaccgcgccgacgtgatgtaggaagcatcctggccggcttcggactgttgtttctcggattggaaaacatgagcgccgcggttgcgccatacagcgattcgcctttctttaccgaggcgtttatcgtgatcggcacgcatccgcttctgggcatcgcggtcggcttcggcgtgacggccctgcttcagagctcatccgcttcacttggcattttacaaaccctggcaatgaatggtatagttacatggaacagtgcggtctatatcgcgctgggacaaaatatcggaacatgtgtaagcgcgctgatcgccggggccggcgcagggcggaacggaaggtgcgcggcgctcatccatctgttgttcaacacgatcggcgccgcagtgttcgccataggtgcggccgtggtattcacgctgtttccctggatcggcgcggtgccgctcaacagcgtggagctggcgctgttccatacgttcttcaatgtggcggccaccgcgctgctgtttccgttcgcgcaccggctggaggccttggcccgccgcatcgtgaagccgcaggaaaagccggatccctttgcgccggcgctggacagccgcatcctggagacgccggcattcgcgtttgaatcggccaagcaggaagtgcgccgcatgggcagcgtcgtcttgggcaatatcgaatccagccgcaaggcgatcgtcaaccgcagcgagaaggcgatccacagggtctatgaaaatgaagcaatcgtcaaccgctatgagcgggagcttacacagtatatggtgcacatcgacattgctgcgctgaatgagcatcagcagatgcagctgcggcatctgctgctcatggtcaatgatctggaaaagatctctgatcgctgcaaggatctggctgagctcagtgagctgatgctgaaggaaaacagcatgttctccatcggtggctatgaggacctgcagctcatcagcgcccagagcagcgagacgctggaggaggcgctctccttctggcaggatccgcaggaaatacagcgctatcagaaggcagtgcagagcggacgcatggtcacgcagctggaggagcagatccgtgaccggcacatccgcaggctcgcgcagcagcgctgtcaggtagaagccggcgtattgttcctcgatgcgatcgggcatctgcagcggatcagcagctatgcggtgcatctggcagattatgtccgagaggaacagattcaaggcgcctgaagccgtgaaaggaaagagggaagattatggcgagaattctgattgtagaagatgatgaaagcattcgtaatctgatcgaactgacgctgatgcagttccagtatgagaccgtgtcatttgaggatgcggagacggcctgggaatatctgaagaagaacagcgcggacatgggcatctttgatctgatgctgccggggatgaccggcctggagctgatcgcccggatccgcgaggatgagcatctgagcgggctgccggtcatcatcctgaccgcgaaggacagcgagctggataaggtcatcggtctggatcagggcgcagatgactacatgaccaagccgttctcggtgctggaactgacggcgcgcatccgttcgctgatgcgcagaagcggaacgagccacagcgagacgcataacttcaacgaagaggggctgaacatcgactttgacggacgcaccgtgcatgtgcgcgagcagcaggtggatctgacatataaggaattcgagctgctcaagtatctgatctcccataagggcaaggcggtgagccgtcaggagctgctcaatcagatctggggatatgacttcgtaggagagagcaggacgctggatgtgcacatcaactcgctgcgccgcaagctgggagagccctatgacggatggatccaggtgatccgcggcgtaggctaccgcttcgtgcaggagagcaatacatgagaaaacggatactgagagattatgtgctggtcgtgacagcggccctgctctgcggctttctgatcttttatctggtcgtctccaacatcatgatggagtctacccgcagggatctcgagtatgtgctgcagacgatacgatccatcccggtggaaaacctcgtcgagcagaaagacgatctctctgattcgctcagaggggatgattcccggctgaccatcatcgatgaagacggcaccgtgctgctggacagcgatgtgcgcggggatatggagaaccatttggagcgggaagaggtgcagatggcgctgagcagcgcagacggcatgggatatgccgtgcgcgattctacgacgatgaacatgcggatgatgtatgtcgccctttattcaaaggagcagcatgcggtctaccggatggccatcccttatcagggattagacagctatgcgatgacgctgctgccggtggcagctatctcctttgcggtcgcactgctcatcgccatcatcctctcgcgcaaatcggcccgttcggtgacccgtccgctgcgcgagatcggcaggaccatccgtgaatcgcagaaagagggaacgacgctgaagtttcgtacatttgagtatgatgagctcaatgagatcgcttcgacgatcgaacagatggaaaatgagatcaatcattatctgaaaaagctgaaaagcgagaagaagatccgccaggaattctttgacaatgcttcccatgagctgaagacgcccttgaccagcatccgcggatatggtgaactgctgcgaagcggtgtcgtcaacgatcccaagcaggcgcaggaatgtgtggaccgcatcctgaaagagacgacgcacatgaccgcgctgatcaccgatatcctcatgatctcccggctggaaggcaatgacgtcgtggagaagaagaccgatatcgccctgcgccccgccgtggaagagctgtgcaagtcattcacgccgatggccaacgagcatcgggtcatgctggagatgcagtgtgagacgctctgcgtgcatatgtcgcagaagcatgtggagcagctcatcggcaatctcatcagcaatgccatcaaatataatcatgaaggcggaacggtcgatgtgctgatccgcagacaggagaatctgctggtgatcacggtggaagacagcggcatcggcatcagcaaggaagatgaaaagcatatcttcgaacgtttctaccgggtggacaaaggacgaagccgcaagatcggcgggaccggcctgggactgtccatcgtcaaacacatcgcgcgctattatcatggcaagatcgacctgttttcccgagagaacatcgggacgacgatcacgatcacgctgccggatgtcatcgtggatgaatcatctgcagatcaagcagcataaagagatgttcaaacagggatcatgatcctgtcgaaagcttggaccatcacgtccaggcttttttttgcctgcatggagaaaaccagagatgcacatgcggatgatatgcttttatcgtcacaaagggatatccgtcgatgatgcctgcagataggtgagctcctgttttgagggcgggtcgtgcggtgaaaagaatgcgggcctctttcttgcgctgtctgttcctcggcctgtccggcgcacacaagcttgacgaaggcagggccagccggtgcaggcgtgatcatcgatctggtcattctgtcaggtcagcctgatccgtatctctcatgaagacaggaagagacagcgcaagaggatgaacgaaaaatggggtgagaaatgcacgaatctgaaagggaaaacgaatttgttcacgtggtgagcaaatgggacggtcatggcgcatcgtttggctgacaggccatgatcatgcctaagagaagatgttgactttgcggttgaacagatcgatgacgaggatcagcttcctcgtctgaatggaaaggaaggataacatgaagaaacgatcatcattactgcttatgatctgcctgatcttttctcttgctgcttgcggcagcaataccaacgatgctcttgcaggaagcgaacagcagacagctggggatcagcaggaacgatccggcgaggagctaggctcattcaataagagcgcttctcttgacgaaaccgttatggtggatgaaaacggtgtaaagatcactgcgacgggcttgaattatacggatcattctgtggatctggaactaagcattgaaaatagcagcggcaaggatttatcattcagcagcggcacgatgggatatcattgcaattccatcaatgggtatatggtgagcgatgggtatttgaactgtgatgtggcagacgggaaaaaagcaaatgaaaccatcagcttcagctatgacgcgctcatgctgtatggcatcgacgagattgccgatatggagatcggatttacgatgtcggacgatgactacaacgatacatactccggtccccggcaattgaagacatcagcgtttgacgcgcatgactacggtaaggatcattaccaggaaacgatcaaaagccgtgcggcgatgaacacctatggttacgacatgacttatttctcacaggatccgctttatgaagagaacgggatcaagctgtgttcaagcggagtgatggtcaatcaagacggcaggaccgccttgcttctggaactggagaatactacgagcgatatggtgcatatgaccacttctgacattgccatcaacggcttggtcgcaagcagcgttgtttggtcgagcgatacgatcaacccgggcaagcgctgcatcattgatgttgagctgtccgaagtgctgaattcggagtactggagcgtttatggcattcaagaagtaggttccgttacgctttctctcagccagtatgatgctgaggggaaagaacttgctagtgagacccctgttgagatcgtcgtgcctgatacggcggcagagcatgatgccgcaggcgatgaagtctatcacgaaggcggcctgcggatcgtggcaaaaacagtgctggaagatccgtccggatacagctcggatctgcatgtgctcttgctcgctgagaacaaaagcggaaaaacgctgaccatcgattatattggtgactctttgtccgtgaatggggtcatgacagacgctttctgtgaatacaaggagcttgcagatggtgaatctgccgcccttgagatcttgctgtggggatcgtctttagaaaccaatcagatcactgctgcttcggatgtcaaggaggttgagatcggattcgagatcaaagcaggcagcaacgatgttgacgatcctacggtcaagatcacctttgactgatggaggatgtcaatccaggctcttcctatcgcacaaggccccgtctggggcctgctttcatctgaggggcgtgaactgcctttgtgtgcagaagattttgatgaaatttggcctgttgtcatttcctgtgcgtctttttgtgcggcaggatcgtgtagtataaatgtacgtatgtgaaatcagcgttatccatgggccacatagacctaagaagaaaacgatcgctgccggtaaaggtttttttgtatgaacagcagttttctgttataataaatgaaagcgcatacatatacatttgggggaggagtgatcaaatggaatggaatcaacatgtgctgatgatcttgctgactgcggtgatgctggtctcgctgctggcgctgtgctatgcattcacgctgtatcgcagtgtccgcaaggaagatgcgggaaaccggacgatgcaggagctgtcggggttcatccatgagggagcgatggcgttcttgaagcgtgagtatcgcatcatcatcattttcatcatcatcgtggcggcggtgctggccgttctgggcatggtgccttcgctgcagggaatcgacggtgtcggggtcagcggagcgttttgctttgtcgtcggcacgctgtgcagcggtgctgccggctttatcggcatgaaggcggcgaccgcggccaatgccagagtggcgcagggtgcgcgcagcggcgggatgccgaaggcattgcatgtcgcgttcaatggcggttcagtgctggggatcagcgtggtcggtttcggcttgttaggtctggctgccgtgtttgctgtatttgtcatcttgtttgatgatgtagcggccgcggtgccggtcgtggctggctatggcttagg

SEQ ID NO: 4189 - DNA, 8461 bp, Unknown
  16S sequences of unknown bacteria
ccgccgcctgcggcggcgggggctgcgccccatcctgccctccgcacccgccagcaaaaaagagccgcccttcagcagcctctttcccgcgccgcttaccccagcagcgccacgataatggaattactcagcaaaaagccccggtcggtcagcgcgatacgctcctcatccgcccgcagcagccccgccttttgcagcggctccgcccgccgcagcagggcggcatagtcctgcccgtagcgggccgccagcaccggggtcagtccctccgccagccgcagagaaagcatcagcgcttcctcccagtccccaccggggccgtcatccagcggcagccgccacacatcctccgccgcgaggaactgcgtcatgtcctcacggaaacggaaccgccgcccctcatggtagctggccgcccccggtccaatgcccaggtactcacccagctgccagtacacggtgttgtgccggctctcatagccaggctgcgccgcgttgctgatctcataatgccgcagccccgcctgttccatcaccttatagtaggccaggtagcactccgctgctgtgtcctcatcgggacagcgctgtgccattcccatccggtcaaaggctgtccccggctcaattttcaacagataggaggaaagatgcggcacccccagcgaaaggccgtattccgccagcctcaccgcctttttgggggtctgtcccggcgtcgccagcataaaatccgccgagatattctggaagccagctgcctttgccatcgccaccgccgcttcgccctccgctgcggtgtggccgcgtcccagcagacgcagcatctcatcctcgcagtcctgcaggccaaaagagatgcggttaaagcccgcttcccgcagttcttccagcagcttcggcgtcacggttcccgggttcgcttccaccgtgatttcgacatccgccgccaccggccgtcggcggcgtaccgcctccagcacagcgataagccccgttcccagcagcgtcggcgtccctccgccaaagtagacagtctgtatttcatggccctccagcggggcggtttccactgcctgcaccagtgccgtggtgtacggctcccgcagggttagtgggcacccgctgtaaaagccgcagtacccgcaccggctgcggcagaacggcacatggaaatataggcttatcggcttcatcccggcatctcccccacaattctctgcagcaccccatcgggcgcgcctccgctcttcagggccgaccctccgtttcacttcgggcagcccttttccgctgcggcgcgccctctccgggtcgccgccctgtaaactgctcctattttaccacatctgttttcattgtgccactccccattcttgtttttccctcgcctttgtgctataataaattgttaatttgtatctatcaaccggaggaacgccatgagctatcaggaccacatccgcaatttctgcatcatcgcccatatcgatcacggcaagagcaccctcgccgaccgcatcttggaatccaccgaagcggtggccaagcgggatatggaggatcagatcctggataatatggagctggagcgggagcgcggtatcaccatcaaggcccgcgccgtcgcgctggattataaagccgataacggcgaaacctatcacttcaatctcattgatacccccggccatgtcgatttccactacgaggtcagccggtcgctggccgcctgcgagggcgccattctcgtcgtcgatgcctcccagggcatcgaagcgcagacgcttgccaattgctacctggcggtggatcacgggctggagatcctccccgtcgtcaataagattgacctgcctgccgccgatcccgagcgggtctgccacgagatcgaggatgtcatcggcatccccgccatggatgccccccgcatctccgccaaaaacggtgtcaatatccacgaggtgctggagcgcatcgtcaccgatatccccgccccccagggcgatgcggaagcccccctgcaggccctcatcttcgatagcgtctacgatagctaccggggcgtcatcgtctatcttcgtgtgatgcagggcaccctgcgcaccggcatggctgtccgccttatgagcaccggcgcccagttcaatgtggtggaatgtggcgtcatgggcgctaccaatcttgtcccccgcgatcaaatctccgccggtgaggtcggttatttcaccgccagcatcaagacagtggccgatacccgcgtgggcgataccgtcaccggggccgaaaaccccgccccccagccgctgcccggctaccgcagcgtcaatcccatggtgttctgcggcatttatccggcggatggcgccaagtaccccgacctgcgggaagcgctggaaaagctccagctcaatgacgccgccctctcctacgagccggaaacctccgccgccttgggctttggcttccgctgcggcttccttggccttctgcacatggagatcatccaggagcggctggagcgggaattcaatctcgatctcatcaccaccgcccccagcgttatctaccacctcaccctcaccgatggcaccaagctcgccatcgataaccccaccaattatcccgatccctccaccatcgcagaagcggaggagccgtatgtcaaggccagcatcttcaccccgccggagtacatcggcgctttgatggatctctgccagcagcgccgcggcatctataaggataccaagtacctcgatcccacccgcgtggaactgcactacgatctccccctggccgagatcatctacgacttcttcgatgccctcaagagccgcagccgcggctacgccagcttggattacgagctttcggattaccggcccagccgcctggtcaagctggatatcctcctgaacggcgaaatggtggatgccctcagcttcatcgtctttgccgataacgcctacccccgtgcccgccgtctggccgaaaagctcaaggatcacattccacggcagctgttcgagatccccattcaggcggctgtcggcggcaagatcatcgcccgcgaaacggtaaaggccatgcgcaaggatgttctggccaagtgctacggcggcgatatcacccgcaaaaagaagctcctcgaaaagcagaaggagggcaaaaaacgcatgcgtcagctgggcagcgtggaagtcccccaggaagccttcatggccgtcctcaagctggacgaataattttccgccttgttcccctgtcccgatttctctcggggcaggggtttctttttctcctccttcgccagcctctgccggaccatagcctcatcgggcgcagcccgctccggctccgccggagcaaagcaggctccgcctgctttcgccgcctgcggcggcggggctgcgccctcccacttccccactcaccccatcagaccacccgctatctccctcttacaccccgtctcccggcgggctcgcttcgctcgccccctttgtcctttctccccaaatttccgccccgcaccgcctgattcttgctcatttttccacaaattccttatctcccgaatttatctcactaaattttccgtcaatttttgtcctcttttcacaaatttacggatggaaaaagaaaaaatcttgcaatcctgtcgggccgatgatattctaaaaccagtaaagagaaaagagaatattgcaattactgagtatcgcgcgggttcgcccgccatgagtaagccttacataaccagtaacgagcagagagtagattccgctatgggatgtccttcccatagtgcgtgtttgctctctttttgttttatccaccgggttcggccggccgggtgggtagcgccccaaagaaagacaatagataatgtgatattcacaggaggttgtttgaatggattatttacagatcgccaatagctggccggtatggctgtgcgcaggtgcctgcgtcgccttcatcgtggttcaggctgtcgctttcgccaaactgtgctacaaaaacgccccgctggtcggcctttccaaagctgattgctccaagagcttcaagtgcggcatggtcactgccatcggcccgtccctgtcctgcttcatcggcgccatcagcatgatcaccgttgtcggcggccctcttgcctggatgcgcctttccatgatcggcgcggcgcccaccgagctgaccgccgctaccaccggtgccgctgcctacggcgtggagctgggcggcgccggctatgatatctacgctatggccaattcctggctcaccatggccctcaatggctgcggctggctgctggtcgttgtgctgctcactccccgcatggaaagcctccgtcaaaaggtcggcggcggcgatgaagtctggctgggccttatcacctgctccgcttccattggtctgttcggctacatggcttctcagtactacaataagatcgttgtcgatcccgctcaggcttggtcctgcatcgccggcaccgttgtcatggtcgcctgcgtcaagttcagcaagaagatgccctggctcaaggaatacggccttggcattgccatcgtaataggcattgtcgtcggcgcccttgtgcggtaatcgaaaaggaggaacgaaataatggatcagtacgcaaagagttttaccaaaccgtccattcgcatcggtaccattaccgtgcttctggccatgcttggcagcttcttccccaatatctacctttacctggctcacggcgtttggccggatgcctcccatatgttctctgcctggggcagcgttgccatggcgttcggcgccttctacctggtggagcccatctcctacttcccggtattcgggcccaccggcacctacatcggcatcctctccggcaatatctctcagatccgtctgcccgcggcttccaccgcgcaggatgttctgggtgtcgagccctcctcccataagggcgaggtcgttggtatcctggccatctgcggctcggtcgttaccaatatcctgttcctcaccgttgccgttgtcgccggctccaccctgctcgccttcctgccggagtccgtcacctccgccatggcaaactacattctgccctctctgtttggtgcctgcttcgcctccatggctgttaaaaagctcaagatcgccctgtacgcgctgcccatggccatcatcctgcgcctgcttggtgttccggcctggatcaccatcgtttgctgcatcttcggcaccattctcatcacctacttcctctacaagaagaaactgatcaaataactttcgctggttaattttataaattgacaagccattatcccgcattttacactgaaaagaggtaatctatcatgactatgaaagaaagactgcgttcccgcgttgcggaactgacctccatcatcggcgtttccggccatgaatgggatgttgccaagtacatcttcgatgccatcaaggacgatgtcgataccatcgagcagctgcccaacggcatcatcgtcgccaccaagaagggcgcccatcccggcccccgtgttatggtctccgcccatatggatgaagtcggctacgaagtgaagtccgtcagcccccaaggctacctgtacttcgatcagatcggcggcgccaccatcgcctgcctgcccggccgccgcgtgctggtcaagggtgaaaagggcgtagtcaagggcgtagtcggcatccgcgccggccacctcctcacccccgagcagatcgccaaggctcagaccgtcacccagagctatgttgatatctgcgttggcagccgtgaggaagccgaggccctcggcatccatgccggcgcccagatcgtccctgattctcccctggagtccattggccccgatggcgattacatctgcacccgcgccgctgactgccgcgccctctgcgctgttatcatcgagaccctgaaggaactcaaggccgaggatatccacggcgaagttgttgctgctttcaatatcatcgaagagaccaccgtcaagggcattgccgccgcgaccaataagtacccctgcgagtacggcctgttcctggataccatcccctgcggcgatgttcccgatgtcgatttcggcaaggagctgcccgttgccctcaagaagggccctgtcctgctgcacagccagctgttcatgggtctgggcctgcgcgctggcagccatcccaagctcgttgaggccgtccgcaacgcggccgaaaagaccggtgccaatcaccaggaattcgcctttaacggtgccggttatgtcaccgatgccgtaggcgctgttcttaccggcatggctgttgtctccctggcgctgccccgccgttattcccactctcccgtggagctgttccacatgaacgatatctgcgatacccaaaagaccgttgaagaattcctcaagaatgaagtggatctcggccttctccacaaataattcccgcccataagggcacaccagtattactcacccaggtataagccaaaataaagccgaacgatcccgggggagcattgtctctcccgggtcgcagcggatagcagagaatggaggatagaggcagtatgaactacgagaattacatctaccagcagcccatcgatcccgcacggcaggccatcctgcttgccatgacccaaagcatggagcaagagaaagaaatgatccgggagctgcaaggcatgggcgtcaaatgcgtcaccaccatggcggctggattcaatttcgacattagccccaagctgatcaacaatttggtgggtgcttgcctcaatgcgaacatcattgagaagaaaaaagcccacatccacccggtggtgcacgccctgcatgaggccatggatgccgcccgtatcacccgggaaatctcgcagaactgtcgtctcaaggttggtgttgttagatatgaggaccagatctctatcagcatctacggtgatattgccattcatgagctttccgcccacaaaaccgtcggcgtcggcttccagattcttggagagtaaaatccttttctgaatttggagatctttctgcatgaaaaagagtttgctgctttgtattattgcggccatcggctttggcgttgcgcccacttttattcagcttgcaattcagtccggggtctcacaaacctcctgcgtccttttcaataacatcctgttgatgctggtctgcctcgtcatgtgcctggccgggcatcacagtctgtgcatccccgccaaaaaggtgctgcccctcctgctaatgggcgcctgcggtatgggctttaccgtactcctgctctctctcagctaccagtacatcgcagtgggcaccgccaccgttatcaattttttgtatccgcccattgttacggtagcctgtgccatttttatgcaccgtcgtctgggccgctcggcctatcttgccatcctgctctccatcctagggctgctgtttatctcggtcatcggtaccggggtctccagcttccagcccgcggggttcatcctggcactggcctcggcctttacctactcgttctacatttttggcaatgaatacttcggcatcggcgagtacccggtctggagcgccgtcttctacatggctgccgcctcggcatgtgtctttattgtcatcaatgccgtaaccggccagttcaccctgcccgccggcggggccgccatgggctatgcctttggcgcagccgtcatcacctcgctcagcttcctgctgctcaatatcggcatcgccggggccggcgcagcgcaggcctccttcgctaccctcatcgagccggtagcgtccgtgatctgcggcgtcatcgtactgaatgagaaggtcacgctctttaccatcatcggcatcgtgctcattctgctgtcggtctgggtcaattccatgcacacccatgaaaaagcccctgcccgtgaaaaagcccccgccaaataattcccgaaagtgagggatcgccatggaatcgcaaaaagaacaagccctgcatcccctgcttctgccgctctgtgtgctggtctgcggcggcgccatgatcggcgttttccgcctgctgggcaaattggatgactccgtcctgtacggagccgccctgggctgcggcatctgcatcctcaatctgtttctgctgcgtttcaccatgaaccgcgcggcagccgccgcctctccccagaccgcccagcagatcgccaaggccagcgtaccgccccggctgctgctcatctgcgtggcgttctatcttggcttcaccctgccagtcttcaatcccatcgccgtggtagtgccgttcgcgttcccccggctttccgccctgctgctgcagggggtggccccctccttccgcttcctccgcaataaggccgccgatgtcaagcaggcccttgaggatgaagacttctgaacgctctgcccgatcggcgggaactttc

SEQ ID NO: 4190 - DNA, 4181 bp, Unknown
  16S sequences of unknown bacteria
ctgctgccggacggaacttctcccgtgccttcacaggtcgcgcagacaaactcggtctcttcccccgtgctgtaatctgcgacggtaacggtcccagcgccttcgcattcgtcgcaggtctgcatccggacggtatcgcgattcgagacgccgccgatgacgattacgcaaacgatggccagcagtaggatcagaacgatccaattctttttcttcattctctccactcctaataacaaaaaattgagccatgacagatgcatgactcaatacgaaccaaaggaaaagcccgaacccgggcgacgcgatacgcgatccgcaatggccatgacagcgctccacacaaaaacctgtgcgacagtccggcagatcttatctgccggcccggcgaccgcgcacccaggcaggaacgcgacacctcggcggctgaccctttctgcccgctggctgcctggccaatttcggggcatactcatgtaaaccgcgcctctatcataacttttcacgtttattataggggctttccgccttttgtcaacaggttttttgctttttataaaaatattttagaaaaattcggaaaattctgcgcagtttctcccgccggtgcatagattactgcaggagggatgcagatgaacgactattattttaccttccgctccatcaccaccgcgcagaccggctcggtcgcgctgcacgatgcgggcctgcgccatgtcctcctgcggacgccgaaggccatggcgcggcagggctgcggctatagtctgcgcgtcaccgccgcccgggcggcgctggcggcccagtgcctgcggcaggcgggagcctcgtaccagcggatctatcagcaagccgcccccggggacgcaccggtggaggtggtcctgtgatctattttgacgccgccgcgacgacgttagaaaagccgccgcaggtggaacgggccgtccgccaggcgatgcaccgctgcgccagccccagccgcggcggctacgcagcggcaatggcggcggacgagacgctcttttcctgtcgccaggctgccgctgcgctctttgacgcggaagcagagcaggtcgtcttcacgatgaacgcgacccacggactgaacatcgccatttcctcgctgctgggtcccggacgccgggccgtcatctccggctttgagcacaacgccgtcacccggcctctggccgccctgggggccgaggtcacgccggtgggcggggcgctcttccagccatcagactttttgacccgtctggaggcggcgctgcgccagccctgcgacgcggtgatctgcacacacgtttccaatgtcttcggctaccggctgccagtcgaagaagtcgcggccctgtgccgggcgcggcgcgtgcccctggtcatcgacgcggcccaatcggcaggctgcctgccgatttccctgcaaaagaccggggctgcgtttatcgccatgcccgggcataagcgtctgtgtcgcagtcggcgagcatgggggcgggtgcttaaaagcaattgcattttatgtcagaaactccaattccaacgtaaacggtgcatcccggctgggtcgggcgtagcgaatctgggccaggatggaagcaaaaaactgccgcagcgccccggcatcctgcgccgggtcctgcagcgctgcccgcagctgtgcccggggcaggggagcgggggcgggcggctccagttcgcgctgggcccggtcgagggcctgcagcgccgccgcgatctcctcccgccgccgggcaaactccgcgggcgtatagatgcgttgctccaagcgggtgaaaatctctgcctcctgcgcctgcagcgcccgctgccgcgctgccagctgccgggccagctgccactgccccgcgtccggcggcggggcggggaagaggagcgcggggcattgggcctcgatggcggcagccagcgcccccagcagcaccgaagccttgaccccggcgcagcggcatgcattggggctccggtgggaaaaccagcggtcgacgtgcgcggcgcgtcgggccgtcttatattgcagcgccgcgccgcagaccgcgcaccgcagcagtccggccaggggatcgcgcagcgtctgcccgctggggacaggggccgcgcgatgccgcgccgcggcctgctgccagaggtcctccgagataagcggcggatgcttccccggcgcggttagaatttcctccggcggcgctttgcgcgcccggaggcgaaattggcaggccgcctcgtcaaattccttgcgctggcgataggtaccgtagtggacgcggccgagatagacatcgttgtggagaatttttgccacgctggtggggggccatcgggtgcagcccgtggccgtccggcagcccagggccgtcaagcgccgggcaatctccgggcagctgcaaccggcggcgtaccactggaagatcagccggacgaccggcgcatccccattggggaccagtgtccggtcccggcggccccgacagaaaatgtcgtaaccaaatggagcacagggcggcagataattccccgccccgacggattgccgcacccccgcctgcatccgccgtttgatggtcttatactcgcgccggctcataaacagaccaaattcgaagtactcttcatcaaattcattgtctgggtcgtaggttttcgccggggtgacaatgcgggtaccgctgcattgaaacgcttcagcgacgaccccttggtccttcgtatcgccccgggccagtcgctccagctctacgaccagaaccccctgatactgccctcgctgcaccgcctgcagcagccgctgcatctcaggacgggccgcgatggaatccccggagacgacctcccggtagacggtcccaatctcgagaccctgctgctgcgcaagctgctgcagccgttgctcgtggcgcgccagcgtttcctcgaccgactccctggcggcgtccttcctcgattttcgcagatacattgcgtaggctttttccataaaacgcctcctcaaaaaacgccttcccatggggcccgtgcggccccacttccagggtatgcgaaaagcagacgcaaaaaaaccagcccggcacagcggccggctgggacatgctatccatataaagattgtgttaagaaagaaaacggaaaaggattccccttgtcagggcagcagtaattgtgctatactgtcctcaagagagaattgttggaaatggggattctgcacaatttcacctccatagaatcagcaattttgaccagaagtattttaaaaacgaaatgattttcccaccacacggcgcgttttccagcgtggtccgcgcggcctacagggggatacgtgatggaacaaagtgagttaaaggcgctgctgcagatcatggatgcggcgcaaaagcaggagttgctggcggtgctcagggccgtgacagcttgtagcgaatgtaatccagaatttcttcttgcttctccggcggcaattggctgaacagctgcaggatctcctgatccggctgcccggtttgcggcggctgcagcgtgtctgactcgcccagcagatagagcaggtcgacctgtaatcggtgggcatagtctgccgcgacggagattttcggcgtccgctggccgttttcatagcgacagatgacctgttttgaggtgccaagcaggtcggccatctcctgcagtgtatagtggcgcgcctcccggaccgcacgcaggcgggtcgcaaagctttctttttgcaatggatcatccccctttttgggagatggtatcacaagaaaacgtcaattgcaagctgaaattgcaagattttttgcaaaatcgtccactacatattgacaaaatgcttcgcacatgatacgatatcgttgctgcatgtttatattttgcccggcacgcagaggcgctttctttttttgctggtctgtcaccaaatgggcaactatcggatgacaaacgggtcaccttggcaagcgcaccagtagaaagtacgcaagaggtccaaaggatacattataatatgtatactatactgttccgcacccctccggcatatccggcggtctgccgcataggaatcgtctgggggtgatgcaatgcaggacgaggcacgcagcctgctctggcaggacggggcctatgaagcacgggtcacctggcagcaggaa

SEQ ID NO: 4191 - DNA, 6078 bp, Unknown
  16S sequences of unknown bacteria
cctacggtgcgatcttatcagagaacctttgaacttctgcaaaagcgtttgcataaggctctccttttcataaattttttattgacagcaacagtataaacctgtataatagttttgtcaagtacgcacttttatgcaatatactatcttaaagtatagtataaggagaacggtatgcaagacagaaaacgctgtatagcaaacgaaaaattagagacgacggggtttgcttataccctgtcgctcatcagcggcaaatataagatgacgatactttacacgctcatggagttcggtacggtacgattcaacgaactcaaacggtatatatcgtcaatcacatataaaactctttccgttgcgctgaaagaattggaagcggacggacttgttcatcgcaaggagtatccgcagataccgccgaaagttgaatattctcttacgaaacggggaaagtcgcttatgcccattctcgacggcttgtgcgaatggggcgataaaaacaggttataatttctgtactaatttcaagaatctgttgaggagaatagacacattttagtagggcaaaagagtgccagtattatcttcccccgtactcatggtactataatatatattttgacttattctcacaatttattttatcctatcaaacacagccgaaatatcctcaccaaaagagagcgtctttgcggcgttttcggggatagcttcggggtattgtgtattcatgcggacaagaaatgcccctttattttcatacaccatccgctcaaaaggaaagcggataatcgtcggcgtattgtatccgacgccgagctccaatagcacggtgtttttgccgcacgccctgtcataaaaatcttcatagcgtttttttgccgcataccatgttctgtcctgcacgaaatacaaatctttacggatattgacctccatctcgccgccgcacacggggcatttggggacgagcgcagaaggaacgcggcaatctttttgctccgataccattcgacggacaaggttttggttatcgtacagcgtatcgtggcaacccttggcgcattgcagttttccgtagtcaccctgcacggcaaaaatgcgatcttgcgcaaatcccgccttataaaactgcgcatccacgttggtcgtgataacgaaataatccttatctccgacgagttcaaacagggtttgataaagcggcaatgcgggcggctgccagcggttgaggaggatatgccgcgaccaatacgcccatttttcttcctgcgttttgaaaggatagaacgccgccgaatacatatctgtaaggtcgtatcgtttaataaaatcgccgaaatttgccgtaaagcgttcccctgaataggtcagccccgctgcggacgaaagtcccgaaccgccgccgacgatcacacattcggcggcttgtatcagcgaatgcaacttatcgatcctgttttgtaagctctctttcataaagcgcttcatcctccttcaaaaacacgtttaatatgattttcagcgagctgcccgtcgcttttttccattccttcaccgtccgcacggcaagtcggcaggcttcgtctttcggataacgatattctcccgtggaaatacagcaaaaggcgagcgttgaaagtttcatctccgccgcttcattcaggcaggaaagatagcagtttgcaaggtcgtgccgattttgtccggtcacactgccatagacgatcggaccgacggtatgaaagatatagcgcgaaggcaggttgtaagcctttgttactttaacttgcccgttcggctcccatttacctttcatgagcttatcgcaatccagccgcacctgtattcccgcagcggagtggatgacgttgtcgatacagttatgaagcggatgaaaacagccgaggagcgccgaattgcaagcgtcgacgatggcatccgcatttagccgcgtgatgtcgccccgccaaagcgcgatgccgccatcataatccaatccgttcacatcgacgataccgcgctcttttgtcctttgcgagagatattcgtcctgcaagcgcaaaaattcttccgttacgggcataggcgggcgtacattgcagagcgcgcggaaaaagtccggcttttgttcttccgaaaggggcgaaaccgcttcgctgcgctccgcacagagaacttgtatcaatctgtcgagaattttgttttgcgtcataactttacctcctttccacggctcccgcgggacagacatcataacaattcccgcaatgcagacaatgttcctgcaggatagaggcgggaagcgtttccgcttcaatgcaactttgcggacatacggcaagacacttgccgcagccgatacacttttccgtgatcacatacctgccattcggcataacggtttctccaaaggaaaaagcaaaacgctcgataggttttttagaaagcgaaaaccactcgccgctgccgcgataaagaataaatgccgtaaggtttttacgggataccccggtcgggtagatctcatacatatacggatttttttcgagaagcagcaaaagtttttgcctgtcacattctcgcacggcgccgcggacagaaacggcaatgcgcgtcatcgtactttcgccttttatacctgtcagtgcaacataggggcgggttttcagccgcgaatacaagctctttcctttcgcggtcaaaaagtatagtccgtcagcctcgaagtccataatgtcgatggcgcaagtcacgggtttcccgtcgtcgtccgtcgtcgccataatgaccgtgtgtatatgctcgtatagaaatttaaatattttcgtcttgttcatatcctatcttttcatacagcgtaagcgcgaccaaatagatcgcgctcgcggattataggttaccatatatcacttcccgatgacggaaaaacgcttctgaatgttattcgcgttttcgatctcgtcgatcatggcgatggcgtaatcggcatagctgatacggctctcgcccctgtcattgacgaaatattcctcgcctccgagaaggtattcgcctgttctttcgccgtccgcaacaaagtcgcccgcgggagagagatatgtccactgcacgtcggagcggccgcgaagctcggcaagtgcttcgcccatattgtttgccagcggcttgaacacgtcggggaagctttccaaatccttgacctgcacggtgtgttcggggttgacatacagacttcccgcgccgcccacgataagcagtcgaactttcgttccgctcaaaatatcgcaaagatgtttgagcgacgtcttgtggagaggaagcgtttcggaagtccatgcgccaaatgcgtcgataacgacatcgaacccgatgagatcttcgcgcgccagatcgaacagatctttgactactgtctttgccttggcgttttcaaccttatcgcttccgcgcacaaatcccgttacctcatacccgcgggagaccgcctcgttcaccaacaacttgccctgcttgcctgccgcacaaatgacagctacttttttcatgataaaaacctccaaaaaattttttgctttcgtaacctttccgattacggacacagtatatcaaacattaaaaaatttttctcggaagttactttttaattatcggataatagatttgttacttagtttcctttttaaactattgactttttcagatggttttgctataatgaaagaaaaaaggagcgtatatcatgctgacaaaagaagaattacccgaatgtcccgtagcaacgaccgtacagcttatcggaaacaaatggaaacttttgattttacgcaacctcatatacaacggagcacaacggttcaccgattttcccaagaccattcccggcatcagcaaaaaggtgctgacggataacttgcgtgcgctggaaagcgacggactcatcgaacgcgaagtatttgcagaagttcctccgcgcgtcgtctattctttgtccgaactcggaaagacattaaagcccatcctcgacgccatgttcgattggggaacggattacaaaaacagtctgtaagcttttggttataaaaaatcagctcaaaccgactttaccgccaaaaggatatttattacaggcattatcggtgttgaaagacttcgcttttctttgttcgtccctttaatacaaaacaaaaggcccgacgcataagcgtcgggccttcttttttctcgaaattattcggcagcggcagtatccgcgacgggataaacgctgaccttctttctgtccttgccccatctttcataccgaacgacgccgtccaccagcgcgaagagcgtgtcgtcgctgccgatgcctacgttggtacccgggtggaatttcgtccctctctgacggacgagaatatttcccgcgagaacggtctgaccgtcgccgcgcttgggcccgagtcttttggcttcgctgtctctcccgttatgggaagaaccggtaccttttttatgagcgaataaactgatgaaaatcatttttatttctccttttttcagatttttctcccgcgaatccccgcggaagccttgcagctcaaagctcgattttttcgattttgactgcggtgaagggctgtctgtggccctgcttcttacgctcgttcttcttggccttatacttaaagacgataatcttcttggccttgtcctgcttgacgaccgtagcggtgaccttgactgcggctgcttccgcgcccgttctgataccgtttccgtcggaaaccatcagcgtgttgaaggaaacgctttcgccctcttttgccgaaagtttttcgacacggacgacatcgccctccgccaccttatactgtttgtttccgttctcgatgatagcgtacatgattttacctcctctttccagtctcgaagaacccgaggcggccgcctttccgaattttttggcgacgcttaaaaaagcccgtttctgtcggctcgttttatactatatcacacaccgaaagcataagtcaagcgtttttctctttttttcgcatatttcacgagaaaaagcaaaaacttatggaaaaggagacttttctatggaaataaaaaagagcgaagaaattttagcggaaatttacagaaactgtcagctcgccctcgaatccatttccgacattctgcccgaggtcgaggacgaagaactcaaaaccgaaatcatgcgccagcatgaagaatacgaaaaaatctgcggcaaagccgcctgtctcgcacgggataaggcgctcgaactcaaagagcccaaccccatgaaaaaagccatgatgtggggctctatcaaaatgaataccctcaccgacaactcccgcgcccatatcgcggaaatgatgattcaaggcaccgtcatgggaatcacctccctcaaaaccactctcagcgaaaaacccgaaaacgacgaccccgaaatcatctctctcctcgaacagctcatcgagctcgaagaaggctttgaagaaaaactcaaaacctttctttgaaaatgtttcttcctcctccgctcccgcgggggagcttttctttttataatttctcaatatttataaaaatacataaaatttccgaaaaccacaaataaaaattcaccctccccccgttttatgcaaaaaatatgctgaaacgcttgacatttcctccgtttgtgatataatagaggtagtagaaaggcgctcttaaacgccgaaggagggaacatgagaagaaaaattttaaccgcgttgttgacaacgttagccgcgacggcgtgcgcgctcagccttgcggcgtgtaaaaccgacccgacggacagtcaaagcccgagcggtcagacgagctcatccgacatatcggcgcccgccgacagcagcgccccgcaatggggagacgtctacaccgtcgaagccgcttatgaaaaagcgtccgagctcggatatgccggctcgctggaagaatttatccaaatgatcagcggcaaggacgggcaagacggtaaagacggcgcggacggtaaagacggcgtggacggtaaagacggcgtggacggtaaagacg

SEQ ID NO: 4192 - DNA, 22919 bp, Unknown
  16S sequences of unknown bacteria
ggacgacgtaccacctttgtaggggcgaccattggtcgcccgctttcgagggtttatatctaccttcatcccgacgcttgagcgatgcgtttgagcgggcgaccaatggtcgcccctacgggattgtgcgcgacgtttgttttagagataaccgttcgtttgagcgaaatccttcgtctgagagataatcatctgcatgagaatgataattatgaacaaattctgaaatatacaaggggggacgccatgacccaaatttcgtgcattttcccattttcgtgcatagaatccagaatgtcatgccgggcgatatctttttttgacttatattgtgaacaaaaactgaataatagaaataatagaggggggtggtatttgcccccgtctgtcatgccaatatgccagaaaacaagagaccgccgcgaaacggcagtccctcgctctcatatgagcctcagcagattataaacgacggcggacacaacccacgccgtaccgagctgcatacacacggttccgagagtgaacttccagcttccgctctctctcctgattgctccgatcgtcgcgacgcaggggacgtacagcaggacgaagatcatcatcgcgtaagcgttcgcccaggtgaagcccattcctccgagcacgcccgagagagccgccattccctcagccgacgcggcgttcgcgacgccgaacagcaccgacatgctcgacacgacgacctccttcgcggcgacgccggatatcagagcgactattatctgccagtacccaagcccggtcggtttcatgaccggcacgaggaacctcgccgcgatagccgcgaagctgtccgacatatcccccgaggcgagcccgtgcggtccgagattcagcaggaaccagagaactatcgacgcgaggaatatcgtcgttcccgcctttgtcaggtagtccttgaccttttcccagacgtagatgaatatcgtgtgcgggttcggcgtcttgtactcgggaagctcgatgaggagcgtgtgcgtgtcgtactttttcgtgagctttgagacgatgagcgcgacgactatcgccatcacaagcccgatgagatacatggagaacgccgccggagccgcgaacttcccgaagaacatacccgaaatcagcaggtaaaccggcagtctcgccgagcaggacatgaacggcgtcacaaacattgtcttcagcctgtcgcgcctgtcctcgagcgcccttgacgccatgaccgcgggaacagtgcacccgaagccgagaagcatcggaatgaacgcccgtcccgaaagcccgatcttccccatcagcccgtccatgacgtaggcgacgcgcgacatatacccgctgtcctcgagaatggcgagcgcgaagaagagtatgacgatgttcggcagaaacgtgagaatcccgccgacgccagcgatgattccgtcgacaatgaggctgtgaatgaagctcccgacgcccatcatgtcaagcccgcggctgacgacgccggacagagccccgagccccatctcgaagtaacctttgagaaaatccccgacagtgaaggtcagagtgaagacaagcgccattatggcgaggaatatcggcatcccgaagatcctgtgagtgagcacgcggtcgaccttgtctgtgaacgcgcttgtctcgtcacggcgcatcaggacttccccgacgacctcctctatgaagtcgtacttttcgtttatcatccggctttcggtctcgtccgacacgaagcgctccgggttgtcgatcgggtactgttttatgatgtctccgtcgttctcgaggtactttatcgcgtgccagcggacgtttctgatatccggatactctgaggtcaggattccttcgagctccgctatagtcttttcggttttgtccgagtagacgagggcgtgttctttatgtaaatccgcgttttcaccgactttgtggtgatgctcgaggggatggctcgccttcgggtcggcgtgatggagggcggcgtgcatcagggtgtcgagaccggttttctttctggcgctgaccgggattaccgggattccgagcatttcctgcatacggtgaatgtcgatttccatgccgcgctcctctattatgtccatcatgttgagagccatgacgaccggctttccgagctcgatgagctggagtgtgaggtagaggttccgctcaagcgcggaggcgtccgccacgtcgattatcacgtctacatcgggcgagagtatgcactgcctcgagacgcgctcttccatcgtgtaggacgtgagcgagtaggttccgggcagatcggtcagggtgaagtcgcagttctggaatctgtagtgtccttccttcttctcgactgtgacgccgggccagttggcgactttgaggttcgcgccggtgtaggcgttgaagagggtggtcttgccgcagttggggttgcctataaaggcggcggagatgtgagtggggtttccggattcgaggatggtgtcaggcattgtttgtctctccttccggttttgttggtatgacgtcgattccgtcggcgatctccttaccgaaggcgaagcgtgtgccgcggagctttacaatcacggcgccggagcgcttcttgttcaagagagtgagaggagtgcccatagtgagcccgagcatcccgaggcggcgtgccgtgtcgtgccggagattgataccggaggcgaggcaggttctgtttattttcatgtcgcgcagtgtcataagtaagcctttctgtgttagttcagtctaacaatattagtatacactaactttgtccgcttgtcaagtgtgaaaagcaaacaataatatccgtcttgacaaaacggcgtttatgtgatataatagagaaaaaaaggaaagcaggtgtcagaaaatggcatttctgaacgtatatttcttctccgaggtactcggcaagcaggtgcagatgaatgcgatactcccgcagcgctcgcggggacagatcgggcttgactcgatatccgagaaggcggagacctacccgacgctgtatcttctgcacggtatgagcggcgaccacacgatatgggagcgcagaacgtcgattgagcgttacgcgtccgagaaggggatagctgtcgtgatgccggacggcgatctctcgtggtacacggatatgaagcacgggcagaactatttcacgttcatggcggacgagcttccggcggtctgccgcgatttcttcccgaagatgtcgccacggcgcgaggacacgtttgtcgcgggtctgtctatgggcggatacggagcgttcaagttaggactgaggtgtccggagacgttctcgtgcgcggcgtcgctgtcgggcgcgcttgatttcgggacgttctacgacaggacgaagccgggcttcgcggagcttatcgcgggcgaccatgacaccgagtttgtcggcagtgacaacgaccttttcgccgtcgctgagagactcataaagagcggacgccccctgccgaagctctggcagtggtgcggcacggaggacttcctcatcggcgacaacagaagaatgcgcgaccatctgctgaacctcgggtacgacctcacctatcaggagagcgaaggaaatcacaactgggcttgctgggacaagtggatacaggcgattctggagtggctgccgattaagaagtgagcgggagaattcgcggataaaaacagatgaacatggctgtccgaggtggtgaatttcgtagcgaccacacgccgatggtacgacaagggggaaacctctgagagacgcaggagactgctacgcctgccggataaccgtttatacgacttcccgctggtttcagtggggagttgtttttttctttctcgtgtgaaccgaatcccatccccggcgactatacgtgtgaaaaggaggtataaacatggacgatatcctgaagtattacgactacataagacggctcgcgatgtcgcgtactgacgacgcggatgatgttgtgtcagagacgtttctcgcggcgtattcgtttctctcgcgcggcggggtgatagagcatccgaagacatggctctcgaataccttctttcacaaactgaacgattccctgagacggaaataccgcatgccggtgacagtcagtcccgacgagacagccgaaccggaggacgaaccggaaagcgacgccgcggagcatatccgccgcgagataaactatctcacagagcagacgcgcgaggtcatcatcgattactactacaacaatagcagcgtcgaggacatagcgtcgcggctgaacatcccggcaggcacggtaaagagccgtctcttcgcgggtcgtgaaaagatacggaaaggatttgacacgatgaacgaaacaaaacacagcctcgccggaaggctcgacacatggtacgacggcagatgtggaataacagaaccgaacgcgctgatacaaggcgaccttatcgtccagaaccttctggcgctcgcctacgagagacctctgaccgttccggagctcgcggacatgatcggcattccgaccgtctacatcgagccgatagtgaaaaggctcgtcgacgcggagcttatgaccatgtcaaacggcagggtcgcgaccggcttcatcatctaccgcccggaggatttcgagggaagattcgcgtcggagcggagttttataacagagcggttcgagcgtttctggtcggtgatctctgacggcgtcgcgggaatgaaagagcttgaggaccggttcgacgagcgccggaaaaactcactcgagcggtattttgtgatgacggtgctgcaaaatttccagatggtttcaaagccggaaagaccggaaaggcgcgacggcggagcatggaatatctgcgggaattacctgcccgccgggtatgtgacgagcgggcgggagaagcgtgagaacgagtatctgatatacggcggacaccggataagctgtgagaccgatgagaacgggaagatgatgctatgtgagttcgacacgtcgctctgggacaatccgcacaggtttaacgctgtcggcgagaagctgtattttgacggcgggatgttaaggtttctcaggtgtatcgacagaaagctgccgctcgggaaggaggttccggacgcgataatcgagaggataccggagcttatctgcaacaccggtctgctcgtccgggacagaaacgagctgagcctcgggataccgtcgctgtccccggaggaatacgaaaggcttcgcggtaagatatccgactgcggagagagactgaaagtagagctcgggaaagagtatcatgagtttctccgcgggcagaagattccggttccgaagcggcttgcggggatatcggaggtatatcgctattacccggcgacgcggcatatcgtgatgcttgtggtccgcgaggcttatgagaggggactgcatatgaagggcgttgattactgctgcccgccggtcgtgttcgtccgcggctgacataatacctgacagctccattccgggggctgtctttttttgcacggatatttatataaaataacgcactattaactacttgtaacattcccccaaaatcacttgacaatccctgactttagcgttaaaatatatattggtatagtatcctgatacttggtatctgtatgctttgccgccgggtgttgtaaatgcccgtttactatgaagcaaaagaggtaatcttttatgtcagaagaaacaaagaacaccgaaaaaggcggaatttccgtcgagatcgagcatatattcccgataatcaagaagtggctgtactcggagaaggagatcttcctgcgcgagatagtctcgaacgcctgcgacgccgtcacgaagctgaagcgtctgtcctccctcggtgaggtcaagggactcgaggacgagaagtacaggataaccgtcacggtcgacaaggcggcgcgcaccctcaccgtctcggataacggcatcggcatgaccgaggaagaggtcagaaagtacatctgccagatagctctctccggcgcgcttgacttcatccagaagtacgagggacaggacggcaagtccgacccgacgaaggacggcatcatcggtcacttcggtctcggattctattccgcctttatggtcagcgacaccgttgacgtgataaccagatcgtggcagtcggacagcgcggtcaagtgggtgtgcaccgagtcgggcgattatgagataacgaaggactactaccgcgccgagcgcggcaccgacgtcgtcatgcacatcatgaaggacgaggacgagttcctcgaggagaaccgtatccgtgagattctcgacaagtactgctcgttcatgccggtcgagatatacctcgacgttgtaaagcccgaggaagagaagaaggaagacgacaaggacgaaaaggcggaggacaagaccgagccgaagccgataaacgatatccatccgctctggctgaagaacccgtccgagtgcaccgacgaggagtacgacgagttctatcataaggtcttccacgattatcgcgagccgctgttccatatccatataaacgccgattacccgctgaatttccgcggcatactttacttccctcgcctcgcgcatgagtatgacagcctcgagggacaggtgaagctgtactataatcaggtgtttgtcgcggacaatatcaaggaggtcattccggagttcttacttatgctgaagggcgtgcttgactgccccgagctcccgctgaacgtttcgagaagctatctccagaacagcgggtatgtcgcgaagatttcggcgcatatcgtgaagaaggtcgcggacaagctgacgtcgatgttcaacactgagcgcgagtcctatgagaagctgtgggacgatctgaagactttcgtcgagtacggctgtatgcgtgatcataagttctatgaccgcgtgaaggatacggtgctttataagacgaccgacggaaagtacgtgacgcttccggagtatcttgagaaggcgaaggagaagcacgagaacacggtatactatacggcggataagacggcgcaggcgcagtatatttcgatgttcgcggacgaggggattgaggttgtggtgcttgataagctgattgacactcagttcataaatctgcttgagagcgagaattccggcgtgaagttcgtgcgtattgacgctgacgtggctggcgcgctgaaggcggacggtaccgctgaggagaatgctaagctcgctgatttgttcaggaaggtgagcggggataaggagcttaaggtgaagtttgagctgctgaagaatgagaagatcccggcggtgctgaatatatccgagcagtcgcggcgtatggacgatatgatgaagatgtatcgtatggcgggcaatgacgcgggggacatgaagttcccgaccgacgcgacacttgtggtgaacgcgaacagcccgcttataaagcatcttgaatccgagacggacgacgtgaagggcgagaggatcgcaaagcagatttatacgctggcattgttgtcccagcgtcagttgacggcggacgagctgaaggcgttccttgccgacagtttcgatatgcttgagacgtattgattttgaagtagtgtaatcttagcgcagaaaccttccatttaagtttgtataaagcttgaggtgggaagggggtgcagggggaggggagacccttctcgaagggtctcttctccccctgcaagctaacgtatagcagtgaggagcagttatggcgtccgttacaggcgagaaaataaagatatcggttttcggagagtcgcatggcgatgcgattggtgttgtcatcgacggttttccggcgggtatgaagatcgacatggatatggtcgggagtcagatggcgcgcagggctcctggcggggagttgtctacggcgcggagtgaggcggatgagcctaggattgtgagtggcgtgtcggatgggtacagtaatgggtatccgatatgtgctatgattatgaatacgagtcagcggtcgtcggattataagaatgtgaaggagaggctgcctcgtccgagtcacgcggattatccggctatggtgaagtacgggaagtgtgtggagctgagcggcggcgggcatttttcggggcggctgacggcgcctgtggtgttcgcgggggcgctttgtatgcagtttttgtcctctaaatacgggattgagacggcggcgcatctcaggcagatacttaacgtgactgatacgcggttcggggctggtgttacggcgtctgagcttcgggagatgaggtcgcgggagtttccgacgatagacaggatgacggctgaggcgttcaggacgattatcgggtcggctaaggggcgcggggattcggtcggagctgtgattgagtgcgctgtggcgtcggattgcgggataccggtcggcgtcggggagcatatgtttgacagcgttgaggctaagatttcgtctttgatgttcgggataccgggggtcaagggcgttgagttcggcgcggggtttgatttttgccggatgtacgggtcggaggcgaatgatgcttatgagtaccgtgacgggcgcgtcgtgacaaaaactgataactgcggcggtgtcgcgggcgggatgactaccgggatgccggtgatattttcggtcgctatgaagcctacaccatctatatttgtcgagcaggatacggttgatcttaataagaagactgacgctaagcttacgataaagggcaggcatgatccgtgcatagcgctgagggcggtgccggtggttgagtcggcggcggcgattgccatggctgatctgatacttgacagcgaggggagaaagctttgatggaccgggagacagaggcgctgaataaagtcgttacggataacctcgcggcgcttgacgcggagaatgacgcggggattgagagcagggtggcgtttcttgccgaccgcgcggcgctgatcgcgcggagcgaggcgctcggcgaggggaggagcgcggacttcgaggggatgttcgcttcccgcactgaaacggatacgcctcatgtgccggagaggatcgcgaaatacctgaccggttatcgcggggcgcttgaaaagctcgataagctgacggtctgcggtttcctcgctgacaggtatcagagcggcggaactctcccgagaaaggctgaggacgaggcggctccgaagatagcttatcttaagaacgcttacgccgacgacgcgttcaggcgcttttcggaggtgtttgaagagccgaccgtgacttacgcggcagacttcacggctgtgtgcgaggaggtttattacgggcgggcggatatgtgcatactgccgcttgacagctcgcgcgacgctaagctcatcagtttttatcggctgatcggcaagtatgagctgaggattgtgatgtcctgcgacgttccatccggggacggggtcatgacgagatacgcgctgctcagaaaatcggcgtttctgccgtctgaaaagcaggataagaagggcgagctgttctttgagttcagctttgtcccggacgagagcagcgctttatgcgacgttctgacggcggcggctgactgcgggctgaggctctataaggtcgacgctctgccgctgacttatactgacagtgagtttttgtatgacgtgatactgaggtgtccggagacgccggaggtgttcgcgctgtatatgagcctcgcggtgccgcagtatgagctgctcggcgtttaccgccatatgggtgcgctctgatggggaattacatggattttctcgacacgctcgagggaaaaagaagagttgtctcgctgttcgagccgttcgtgccgcgcggcatcgcgacgaagcttatctggcgctctggtgaacagctgtgggacactactgagcatcgggtcatgacgctctgcgatctgtacgcctatctgagggcggacaccgtgacatatgacctgcgcgacggcggaacggatgagcttgaaaggctgtgtgagtacgtcggataccttccggacggcatgaagttcgtcgttatatcggacgatgatgaaacacttgaaatggcgtcggagtgcgaaaatatctgcgccgcggcgtccttcacggcgaagagcggcaggctcccgatgatacgcctgtcgcgggacagtggtgtcgattcggtcataaaagccgccatcgacggatgtaaaggaatatacctgccggaaatcacggatgatatattaaccacagcggacaagcaccacatatcactgctcggcggaacaggaacggcgcttctgaataccgaccgtccgacagatatccacgaaagggtagccgggatgataagccgcggagcgcttctgacgggaagcggcggcttcggggacgagataagctatctcggctatatctcgatgctcggcgcctataaccgcgcgagatgaacacaataacatacaatgaaggagagtaacatggagacggtaacctacaaaactcagggaacctgttcaaaggcgatagaaatcgcggtaaacggcgacaccatcgagagcgtgaagttcctcggcggatgtcccggcaacacgcagggagtagcggctctctgccgcgggatgaaggtcgacgaggctatagagaggctgaagggcataaaatgcggcttcaagccgacgtcatgtccggatcagctggcgctcgcccttgagagcatgaaagcgaaagtctgagccgcatataaaaaatacgaaggagaacgataaaaagatgacatacagagaaaattacgagcgctggctctccagcgacaaagtcgacgaggcgacgaaagccgagctgagggcaatcgcggacaacgacgaggagatcagattccgtttcgtgaaggatctcgagttcggaaccggcggactcagaggcacgatggtggctggcacaaacgctatgaacgtctacaccgtggcgcacgcgacacagggtctctccgacctcataaacaaggaaggcaaggctgaaatgggcgtcgccgtcggctgtgactcgagaaacaactcgcgtctcttcgccgagaccgccgcgagagttctcgccgctaacggcataaaggttcaccttttcccggagatcgagccgacgccggtgctctccttcgctgtccgtgagcttcactgcatagcgggcataaacatcacagcgtcccacaacccgaagcagtacaacggctacaaggcgtactgggacgacggcgcgcagctcccgccggaccacgcgaagaccgtctccgaattcatagccgccgcggatatcttcgacgacgtgaagatgataacgctcgacgagggcataaagtccgggctcatcacctatatcggaaacgacctcatcgagacctacctctcgaaagtcatcgccgaagccgtcaaccccgacgtaatcgcgaaggtggcggacgacctgaagattgtctacacacctctccacggcaccggcagagttctcgttccggaagtcctgaagagagtcggactgaagaacatctacccggtcgaggagcagatgatccccgacggcaacttcccgaccgtctccttcccgaaccccgaatatccggcggtattcgaactcggcataaagctcgcagaaaaaatcggaagcgacctcataatcgcgaccgatcccgacgccgacagaatgggcatcatgtcccgcgacaagaccggcaaattcgtctgcctgacaggaaatcaggtaggcgcgctcctcctcgactacatcatcaaagcgtatgagaccaccggcatgcccgaaaacccctacgccgtcaaaacgatagtcacgaccgaaatcgtgaccgaaatctgccgccgccacaatatccgcctcttcaacgtcctcaccggcttcaaattcatcggcgaggtcatcaagaaatacgaaaccaccggccacgacacctacatcttcggcttcgaagaaagctacggctacctcaagggaacctacgcccgcgacaaagacgccgtcgtcgccaccatgctcctctgcgaaatggcggcatactacaagacaaagaacatgaccctccgcgacgccctcgacgaactctacgaaacctacggcaactacggcgaaggcgcggcaaacatctacatggaaggtctcgacggcctcgaaaaaatgcagaacctcatggaccgcctcagaaacaacccgccgaaagaactcgccggctaccgcgtaatccaattccgcgactacgaaaaggacaccatcctcgacgttgacaccggcaaagtcacccccacaggtctccccatctccaacgtcctctacttccgcaccgaacccggcgacaacatcataatccgcccctccggaaccgaacccaaaatcaagacctacatcctcgtgaacggcaaagatcaggacgaagtaaaggctaagatcgacgcctacagcaaggttactgaaacttggaccgaataaaatcctattgacacaagcaaatccccctcacccacaaacgggcaagggggattcttttttatccgaacatatctatcagccggaaaacctcacacacggcagacgaaagattccgccgggcattctcaggcttcatcgcttcctcgagacaaacagctccccgctgtatcggaaaatacgcgcctatcccgagctcacggcacttctcggctccgtcgcctatgcacccggcgaacgccacgcacggttttccgtaccttttcgcgagcgacgagaccgccgtcggaccctttcccatcgcgctctgagcgtcaagcctaccctcaccggtgacaacgatatcagcgtccctgacagcgtcacaaagcccggtagcgtcaattatcagccccgcgcccggaaccagctcgccgcgcagaaacgtcctcacggcaaacccaagcccgccggcggcgccgcttcccggaaactccgggtcagcgtccggaaacacatcacgcgtcaacccggcaaaccgcccgagccatccgtccatcacgggtatatcagcgtcccgcgcccccttctgaggcgcgaaaacagcactgcaaccatcctcgccgcacagcggattgtcaacgtcgcaagccgccctgaaccggcactcacaaagctccggcgtgacacctgaaacgtcgattgtttcaagctccgacagacccttcgcgccggaagataccggctttctgtcccggttcagaaacccgaacccgagcgcggacagcatcccgatccctccgtcattagtggcactcccgccgagaccgatcacaaaatcgcgtattccgtcgcctatagccgcgcggatgacctcgccgagaccataagtcgaagcgaccatcgggtctctctcactgtccgacagcagggtaagccccgccgcggaagccgtctcgattacagccgttctgtgcccgccatgcgtgataacgccgtaaacagcgtcgatctcccgtccgagcgggtcgtgcgctttgacaattctcagctcctcctcacggcacagagccctgaccgtcccttctccgccgtcggcgagggctttcacgatgacctccgcgtccggaacagcctctgtcacgcccgcccggacagcctccccggcttcaggcgaggtgagactgcccttgaacgagtcgaggcaggcgagaacacggagatttctttttttatttttcaagtctgacagacacgatctcgaagccgcgcagctctgtatttatcttaccgtcgacaacttcaagctcacggatcgggttctcctgaagatcgcagagatatgccttcgagaacttaaggtcggtcgagagggaaacgcgggtcttgatatttttgcactcgtagagtctgatgatattcgcttttccgtcctccgattccttgacagtctcgcagacgacgttgccgcgtccggtgtcgaccgcgctgaaacgctccggaatgaccgacttctcgccctcagccctgattgccgtgagcgggtagttgagcgcgtaagcggtgcggacggtgtcgctctccctgagagttcccttgtgcgggcagatcgagtaggtgaaccttatctcgccctgatcggcgttctcagccggatatgtcggtgagcgcaggagcgagagggttatgacgccgtcatgtatgtcgtgaccgtacttgcagtcattgacgatcgatacgccgtagccgccgtccgagagatcggcgtacttctgcgcgcagacctcgaacttcgccgcgtcccagctggtgttcttgtgggtcgggcgctcgattgtgccgaactggatctcgtaggtcgccttgtctgagttgatgtcgaccgggaaagcggtcttgatcatctgatggtgctggtgccagtcgaccaccgtctcgaagtcgattctcatctcgtcgtcgtagaaccacatgatctggttgactgtcgactgcatatacgggcgaacgacacggataccgcgtcttgcgccgtcctcgatgatctccgccgagtcaagcgtcgtgagagtcttgtacttgtcaagctcgtagttctgccattcccaagcgtcgtaggtgtccgggtagtcggcgtaaagcctcagctcgttcgcgaccgcgccatccgagagcacctcgcggtcctccgccttgtcgtagagggagattatctggtacttgtcgtcgaacttcacgatgagtctgttcgtctcgacggtgttgccttcgatctttatagagttcgtgccgacaaagtcgtttgtgacataatagcccttggatgggagatcattcacgatcttcgtcgttccatcgaccttgacgtatcccttgccgccgaaggagtgcgggttgaacactacatagcctttattcttatcgacagccgccgcgatatccgcgtgagccttgtcgactacgctgtgtccgatcttcttgatctcggcgtagtcgatgtcgcactggtcatagacctcacggatggacgagccggggataatgtcgtggaactggttcgtgaggatcatgtgccagccgcggtcgagctccgccttcgggaacggaatatcacggagttccttgtcgagaacgctcataagctccgcgtcgaggtataaaaattcgctctggcggttgtttctcttgttcttcgagatcgaagtgtaagtgccgcggtggaactcgaggtataattcacctctccatttcggaaggagcgggttgttctctattctcttctcaagtctcgagaggaagtttccggcgaagtctatcttcatcagcggcgcgccggggatgcccttttcggttctgcgcgccatctcgaggtgttccgcggtcggtcctccgccgccgtctccgaagccgaaggtgaggatcgcctcgttgttcagctccttctgctgatagcggttccatgtgccggcgaccattctcgctccggtgttaccgacatatgtcgtgtaatttgtcggctcgccgtgtccctgatcctggggggtgaggaagtaggtgttgatctcggtgccgtcgatgcccgcccacgagaacgtgtcgtacggcatcttgttggtctcgttccagctgatcttcgaggtgacgaaccagtcgacgccgctctttttcagtatctgcgggagagccgcggagtaaccgaacacgtccgggagccacagcacgcggttctcgaccccgaactcctcgcggaagaatttcttgccgtagagcacctgtctgacaaggctctcgccggaggtcaggttgcagtcagcctcgacccacatagcgccctcgggctcccagcggccttccttcaccatcttctttatgtcttcgtaaagctccggagcctcttccttgacgtcctgatagaggagcggctgggaggacatgaacttatactccggatagcgcttcatcagctctataacggtagcgaacgatctctgtgccttctcgcgggtctgcctgagtgtccagagccacgcgcagtcgatgtgtgtgtgaccgatgccgaccgtcgtcggggcgtcgagtccgcgctcctttgagcagtacctgccgtagaactcggtctccatgaagtttgccgcgtcctttattgattccctgaactcgtcgcttccgatctcatagagctcgaggcgggagaccgcggcgtcaagatatttcacgatgttcgcgtattcggaggtgttgtggtcgagataatcgagcatctcgaagggggtgcggatgtcgtagtaaagctgttcggcgtagtcgtcgcggtttctgagctcagcgaagaagcgcgcgtgttcgatcttcgcgcctgtgtagccgtaaatgtagcagtcgtagtcgaccgtgtcattgtcaagggtgacatagaggtggttggtgtcaagtccctgtctgagctttccgtttatgtacgccatgaactgcgggttgccggcgtcccatccggtgaggtcggtgcggaggacgagctcggtcgtctttcccctcatctcctccggtacggtgaaggtgaagtggaaccacgcgtgggtgtcccatccctcgccccagacatcgccggagttaaaaggtctgaaatctccctcgggagggatcttcgtgccctccttgtaggggcaggggagaattgttatgccgtcaatagcgcgtccgttgagcgtgcgcgcctcgtctatgatgccgagataccggcggatctttcggagttgtttttccatcggaaaattcctttctgaaataatatcaggtgtgaaggctgtgccttgactcaattatacacgaacgcgcggtaaaagtcaacagatatccgcgaatatttcacatatgtgcaacaaatttgcactcccggcatatatgtgacgaacaaattaaattctgcttatatcacttgattatatcggaaaaatgtgatacaatatagtaagcgcggtaaatcgcggattatttgctgaaagaagtatgatatgaaagaacaatatctcgaatgcggcaggataaccagcacgcacggtgtgcgcggagcggtcatgatagagtcatggtgcgacagcccggaaatcctctgcggcgtcaccaagctctggtataagaaaaaggacgaatacatccccctcgaggtgacgaaggcgtctgtacacaagggaagagttctcgcgcagttctacggcatagactcaatcgaggaggcgagccttcttaaaaactgcgtcgtttacgccgaccgggaggatcttccggtcggggaggacagggtcttcgtcgcggatatgctcggtctgccggtcattgacgcgtcgaccgggaacactctcggcgtgctcgaggactatatcgagaacccggcgaacgacctcttttcggtgagaacccccgacggacgcgaggttctcgtgccggtggtcgacgagttcatagaccatgtcgacgacgaaaaggtgtatctctcgccgatacccggtatgtttgacgacggtgacgacactgacggcgacgatgataatgacgacgacggcggagagagcgaagacgatgcgctttgacattatgaccctcttcccggaggtcgttgacatgatgctcggctcgtccataatcggcagggcacggcagggcgggcttatcgaggttcgtactcacaatatacgcgactattcgaaggacaagcaccaccgcgtcgacgacacgccctacggcggcggaaagggaatgctcatggcggcgccgccgatatgcgactgctatgacgccatcgtcgcggagcagggagacgacgatataaagcgccgggtcatctatatgtccccgcgcgggaaggttctgacacagaagagagccttcgagctgacggaatacgacaatattgtgatactctgcggtcactatgagggcgtcgacgagagggcgatcgaggagattgtcgacgaggagatgtcaatcggcgactatgtgctgaccggcggggagcttccggcgtgcgttctggtcgactgcgtgtcaaggatgatagacggcgttctcgctgaagaggattgctggaagaaagagagcatcgcgtccggaatgctcgagtacccgcagtacacccgcccggtcgagttccgcggaaggaaggtgccggaggtgctgctttccggtcatcacgcgaatatcgagcggtggaggctgtcagaggctcttaagaagacgatcgacgcccgccccgacctgcttgagggcgagagctcacggatcaccgatattccggggaaaaagactggtgcgcccgatgaaaaataaggaaacacggaacaaatccggctccggagccgtcagaacagtcgggataatgatgggagcgacggtcatctcgaagctcctcggtatgctccgcggagtgctgcaaacgagggcttggggaaccaccccgcaggcgaacgctttcacggcggcgtcgaagctgccgctggcggtattcgatatgttcctgtcggcggcggtgctcgggtgcttcatcccggtttataacagccttgttaagaaagacgggctgtcggacgagacggatatgcgcgaggctgaccggttcgcgtccgggttcctgaccttcataatcgctgtctgcgggctggcggcgctgctcgggatcatattcgcggagccgcttctgaggctcatgacggcgggacttgacgcggagacgttcgcgctcgcggtgacgctgacgagaatgatgttcccgatgatgatcttcaccggcgcggcttacacgctcgtcggggtgcttcaatcgaagggctcgttcgtcgcgcccgctatgataagcgcgatatcgaacgcgggggttgtcatatatctcgcggtcgtgaaccctctgctcggggacaagggcatttacgggctcgccgcggcttatacgttcgcgtggctgatacagcttctgacgctcgtcgcgccgcttaaaaagctcgggttttcctacagaccgagacttgatctgaaggacccgccgctgataaaggcgcttaagatggctccgccgataatggcgggctcgtggctctcgccgatgggcgtcctgctcgggcagtatttcgcggcgcaggtggcggtcaggacggcggtttcgggagctacaacggtgtttgactgcgcgaacaacatctatgtgatgattgccgggacgctgacatattcgatatgcaactacacgtttccgaagctctcacggctcgcgggaaacgacgggaatggctttgccgcgacgatacgcggcgggcttgtctcggctctctatatcgcggtgccgttcatggcggcggcgctggtgctgaccggcgagggcgtctccgtgctctacaagagaggagctttcaccgcggaggacgcgaaaaataccgctatggcgctcaggcccatgctcgccgcgatgccgtttttctgcgtgacagagctgttctcgagggttttctactcgaagaatcaggttaagataccgatgttcgcggcggtcgcgggaatagcggcgaacgctctcactggaagtgttctcgtgaggacaggcatcggaagtgtcgcggcggtcggcgcggcgaacggcgtcgggcagttcgtatcggcgctgatactcttcgttttcgcggtgaaaaggataccggggcttatcgataagggacttgtgcgcgacacgctcgggatacttttcggcggagtcgtcgtgttcgccgtatcggcggtcatgtcgaggcttgtctcaagcgaaccttatacggcgtcgttcattacaaatgtcgttaaggcggtcgtgatattcgcgccgtcggctgtgctgtatcttgtgctcacgaagctcgcgcgtatcgggcttttcgggaagaacagactatgacgcgttacgcggtctccgggcactgaccgctcagaaaaaacaagtgccggaaaggatgaatgcagatttgaaaaatgaaaacacaggcgcgggaaagcgtcggctcagcctcgggtcgctgatcacgggctcggtgataatctcgtttctcatgaagatagcggggatcatatactcacgcctcgcggacggcttcttcggcaggatattcaccgcgtacgaccgcgagaacgaggcggtcaaaagcagcgccgccgcagggcttctgaccgggcgctacaggacggcggaggagcgcgcctcgagacaggcgaagccgataaagcaccggatagccgaaggcttcgagaacagcgtgatactcggcaggatccgcggctggctgaggggaatgctcgcgtgccagataaaggtgtacgggctgttcctgttctcgttcgcgctttacaccatgataatctatgtcgcgaagctgtttctttttaagaacgccgaggtagacatcggcgtcatcgtgacgctgacactgaccgtcatcgcgtcggtcgctatgatctcgtcgagacacactctcgccggggctctgatgggcagcggggcggcgagcttcttcctcttcaaggtcgtcgggctgaggcgcgggactttcgagaaggcgggagaagccgagggacgctacaacgtcgcgtttatcgccgggcttatattcgggatcgcgtcgtatttcgtcagcccggtcatgatactcgtcggtctcggcggaattatcgccgcttatctcgtgcttatcagtcccgagttcggcgttcttatgatgatcgtgctgataccggtcgcgccgacgatggggcttgtcgccggggtcttatacacggcgttctgctatctgctgaagctcgtgtgcggcaagaggtcgctgaaattcgacctgctcgacgggaccgtgttcatattcatgctcctgatgatcggcggcggagttgtcgcggtttcgggtggaagtctcaagcctatgatggtctatgtcgcgttcatggtcgggtacttcctcgtcgtgaaccttatccgctcgcgcgagtggctgacaagatgcttctgcggggcgatagcggcgtgcacctttaccgcgctctacggtctgtaccagaacttcttcggcacggtcgagaagacctggcaggactccgagatgttcgacgagatatccggacgagtggtctcaacctttgagaacccgaacgtcttagctgagtacctcatcatggtgcttcccgttatactcgcggctttcttcatcgtgaaatcggcgggaggaaagttcctgctcgccgtttcgttcgcggcgacggcggggtgtctcgtctatacctggtcgcgcggggcttggctcgggataatgatcggaatgctcatattcctgctcatgtactcgaagaacacgctgacggtgcttctgttcggcgccttcgggattccgttcctgccgttcgttctgccggacagcatcatacagcgcttcacgagtatcggaaacgtcggggacagctcgacctcctaccgcgtgtatatctgggacggagtgctcaaaatgctgaaggattattttccgaccggaatcggcatcgggaccgcgtcgttcagcaaggtctatccgtactacgcgctgtcgggcatcgagacggctccgcactcgcacaacctgtatctccagataacgaccgagatcggcatcgtggggcttatcgtgttcgtcgcggcgatgttcttcttcgctcagggggcgttcacgctgaacctgaacgagcagaggaaggcgaagcatatgtcctcggcggtattctgcgggatactcgcggtgctggcgcaggggatgaccgactatatatggtataattaccgcgtgttcttcatgttctggctgatgctggggctcggcgcggcggtgcgcagggtgcttgagagcacggcgcaggagatgtattactgattcggaggaagtcatggcacaaaagaaacgtaaattcaactttattgaccttataatagtgctcctgatcgtcggcgtcatcggcgcggcggcgtatatcttcggggcgaagaagctctcgggcggctctgacatggtgaatgtcgagtacgtgctcgagttcaggcaggtgcgggacgagtttctcgactgcttcgagaccggcgttaatgccgtcgacgcggcgaagaagtaccgtctcggcgaggtgacagcggtcgagtcgagcgcgtccatctacacgggcaacgatcttatcgacggaaagctcgtctatcacaactacccggagcactccgacgtgaggatgacggtgaagtcgacggcggcgatcgactcgaagggaatgtatatccttgacggcggctaccgcatatcggtcggttcggtcgtctacgtgcgcacgccggggtataccggaacgtcctactgcatatcgataaacagaacggagaagtgaaatgggagcggaaaacacagcaaagacgcgtaagagccgcatgaggctcaacataatcgactttctcataatcatagtcctgatcggcgccgtcgtcggtatcgcgatgcgcttcgggctcgtcgagagggtgacgaatcaggcggggatgaccggggcgagaatatcctttctgatacgcgacataaacgagggctcgctcgactatttcggcatcggggacaccttctacgacaaggagcacgactgcctgctcggcacgctcgagtcgagacagttcatgtattccgaggcgttcataacgaacgagcgcggcgagatcatcaagacgaactcggagaacaagcgctatgacgtgcgcggggcggtcatcggaagcggtacgttcacggacgacggtttcctgctcgacggagtgaactatgtcgcgccgggctcgaccatacacgtccagagccgggacctcgacgtcatcctgaccgtgaccgccgtggagcgcgtcacggtcaggatgacgtcgag

SEQ ID NO: 4193 - DNA, 8361 bp, Unknown
  16S sequences of unknown bacteria
gttgcatatacaaagcctctctttcttcgccaaaaccattatatcatatttctggagaaaaaacattgtctggaaaaaattacgccgctaatgcgggcattcctcccacgacttatagaagtctgggcttcctgccctgcggcgttggtgaataggttttaattattggagattcaaagtccggaagctgtgtactgattatgcgttcttctgcacgaggaactataatatcacccacacctatatcaatattaaatggcacccgcacattttttatttgtgcgataatctgtgtactgatgccatgatactttctctgcggagaaatttcctcaaagctttttgcagacatctcaatataatcattgcctgtcggtgtatcaataattttgtaaatcaaatctttcacattatccatggaatttgaatatcctcgaagcaggaaatcaacatcaatagtggctctgctttcaaagtttgtaagagtataaataaacaagccaccctttaataccagagagtcaccatatccagacttcgaaagtttccttagaaattcttcctgcacaaataactgcagacactgctgataactgacgcctaaagccctcgctttatttttgagctttgccaaaacagaggctgctatatctgccattacaaccacactccaatcaaatcttttactcgtttctgaactctcaatacctttgcgtactgcataaggctggaaatattcttcttagaatctttaacataattctgaattgctttgttaaaaatttccttgtccattttattcatattacgcagaacatcacaaatagtacggtcacgatcataaatacgtattttttcaaaatcaattttaccgctggtttctccaagagaaagcaacgaaggctcaacccgataagcctttataaatggataatctattttcaggcgctgtctggaagcatttttatcaatagcaatattccattcagcaggatttctatcactgtatttataatagaagagagctgtttccatacaaagcacagcatcgggaaacaatctgtttattatcactacctcactgtttccataatcctcaatccaatgataatagcctcgcctgattttttctatcaggcctttttccagcaattcctgaatatctctgtaatacagcttgtccttattcaactgagctgtagtcattatatagtcatatttcgcaaaactctgtctgatattttctatatctttttttgaaagcataatatcactcctgtactaaactgcacctgttttattcatcactggtgtgatttagtacattataattgctttttattataaagtcaattgtataaaatcataccattccaaatttgttaataggtatagtttagtaccgaacaacactttctaatacaaatagggcttcttattcaagtataccaaaaagcatattttaattcaatatgtatatcaatttgttaaaaggctgcgccttatatcagcacaggctttattatctacttcccaagttcatcaagagttttaaagctgtagccaagctgttcccactctgtaagcagttcatcaagtatatcgctgttggttttagaggtcgaatgaagcagcacgatggctccgttatgaagcctttttgtcagtttttcgtctgccgttgcttttgtaggctggtcgttttcgtaccagtcaacataggcaagactccagaacaccgtagtatatcccagctcttttgccatactcagattgctctcactatacttgccctgcggcggtctgtagaacttcttcatatcgcttcccacagcctctttatatgctgtttccagcttgccaagctctattttaaaagcttctttgtccgatatggctgacatatccggatgagtaaatgtatgattacctactatatgcccttcctttgccattctctttacaagctccggtttatctctgaccaggtttcccactacaaaaaacgccgcctttatattatgttttttaagcacattaagtatatgctccgtatatccgttgtcatatcctgcatcaaaggtcagatatattgatttttcttcgggatttcccacataatatgcattgaatttttttagatagtcggcggttgcattgcctacaggcagtcctccctcactctgaaagctcaatccccagttgccatccgcagaggccgcctcggagctttgcttttccattgccccctttatatatacacttccgtagccgagaacacacagagtcagtactcctgcaagtatttttctcagcgctttttttccgataaatacagacattaaaaatcaccacccgtatatgtatacttggtggtgatgttatttattcttttttttgatacagctctccaaatgctgctccgccgattatgaggaaagctccgataatctgaataacgctcattctctcgcctaaagcaatcgccgcaatcagaagcgatgaaacagggtctatatagctgcacatggcaacactctgtcccggcagtacctgcattgaggaaaaatagaaataaaggactatccctgtatgcactacacctacgattataaggcagacaagtcctgcgccctgaggcatcacccacgctccttcgtgatttattaccgcatacggcgctactacaatacctgcggcaaacaactgtacaatagtaatctgtatacctgtaaagccgcctttaagctgcttgttcagaatcgttacacacgcataaaacagggctgcaagaagtccgaataatacgcccttaaggggctgactgcctcccgacagcgagcctgttatcataaacattcctgccattgcggcagctatgcctgcaattcttgctgctgtaagcttctcacccagtaccagaggtgacagaactgtaattattacaggagcgcagtaatatgatactgtcgccatacttaccgtcgtgtatttatatgcttcaaacaggaacacccagttaaaacccataacagcgcctgatatgaaaagtattgcgatatctcttcgggcagctgccctgtctgtgatgccgcccgtcctgtactcacccgacacaaaatatataactgcaagagttacaaatccgagtattactcttgccagcactatttcaccgctggcaaggggtatctgctttacaagaggccctaaggtcccccagataatcatagcaagaacaagctgtatatatgcttttttcttcatggtctatcttgtattctgctgttcaaccagtcttacggagctgtatctttctcttaatacaggcttttcgattttgcctgtaggatttctaggcacatcagcaaatatgattttgtgaggtcttttgtatctaggcaggtcgaggcagaattcattgatatcctcttcagtacattccgctccttctttgagttcgattatagctgctgcgatttcacccagtctgtcatcaggaagccctattacagcagcatccttgatgttttcgttctttctgaggaaatcctctatctgaacaggatacaggttttcgccgcccgatattattacgtcttttttgcggtcaacgaggaacaggaagccgtcctcatcttcatatgccatatcgcctgtcataagccatccgtcataaagtgtttctcttgtggctttttcgtcgttaaagtagcacttcataactccggggcctttgactgcaagctctccgacctcacctttttttacaagtcctcttgcatcatctactattttgacttcccatccgaagcctgccttgcctatagctcctaccttgtgtatgttttcaactccaagatgaacacagcccggtcctgtggactcactcagaccgtagtttgtatcatactgatgcttaggaaaatatgacttccatctcttaatcagactaggcggtacaggctgcgctcctatatgcataagtctgagctggtcaagctcatagttttcaagcttgatatcacctctgtcaagagcatctaatatatcctggcaccacggaaccagaagccacagtattgtgcatttttcctctgaaatggctttcattatccattccggttttgtgcctttgagaagcacagccttgcctcccaccagcagacttccgaaccagtgcatttttgcccctgtatgatacagaggaggtatgcacaggaacacatcatctctggtctgtgagtggtggttctgctctaccctgcatgagtgcatcaggcttctgtgggcgtgaagtatagcctttggaaagcctgtggttcccgatgagaaatatatggctgcatcatcagagtccttgatatctatctgaggtgttcttgatgagcagtattcaataagctcatcatagctttctgcaaatgacggacagtcctctcctgcatacagcatgagttttacttttggcatacggtcacagatttcttccatacggcctgtgaattccggcccgaatactataccgtcaacctctgccagcttgcagcagtatttgatttcatctgccgtatatctgaagttaagcggtactgcaatggctcctgttttcaggataccgaagtatataggaagccattcgatgcagttcataagaagtattgcaatcttgtcgccttttttgactcctcttgaaagaagaagatttgcaaatctgttggcctgtacattgaattctccccatgtaatctccttgcgaaatctcgctctgcttgtagactctatcagagagtattctctccatgtcattctgggtttgtcgtcatctcccggatttaattccacaaggcttacatcatttttaaaaagcgtagcattatgctctaagatatctgtaattggcatttctgatttcctttctgatgatttatttaaaaactgtgtctataaattcactgtcgaatttctttgtaaagctgcttactatcggcacgattacaaatgataccgccatagccagcactccaagtcccgcagcattgcctaccgctgcaggaaatccgctgctgcatgtaattacaactgtcggaattgcaacggtcaggaagccgcctatcatacccgcaaaggctcccgctttcgtagttcctcttgagaaaattccccatacatacggtcctatgaagcagcctgcaacaactccccatgaaaagctcattatattaactataattgatatgttaagtgttgcaaatataaatgagcatgctataaatacaaggcagagtattcttgtcataagcatctgaggcttgccgccgaagccttttttaatctgcggcgccaggtctaccgaaatggcagatgaagatgacagtactatgcctgacagtgttgacattgatgctgaaaacagcaatataattataactgctaaaatgataattgtaaatgtcccgccgccaagtgctttaattaacatctgcggaattactccgtcatagccggcctcgggaagtgtgtttccgagtataagtcttgaacaggaacctgctgtgtatgcgcctgcgcctataacgaagcaaaacagtgttgaaactattgtagcctgcttgatagccttgccctctttgacagcgtagtatttggtaaccatctgcggaagtccccatacgccaaaacttgtaagaagtatattggtgcagaggaatttccagctgtctgcgccccatatgcttgtaagctgggctcctgttattccgtctccgttgtctgtaatctgtgaaagtcttgaaagcccttctgcaagacctcccacctcgtctgtgttaagcagcgcgcctatcataaatatgatacctgccaccattataattccctgtatgaagtctgtaaggcttgacgccgtgtagccccccagtaccagataaacggctgtaagtacggctatggcaagcatgcaccagtttactgaaattgacgggaacactgtgttgaacataaatccaagtcccttgtatactgctgccgagtacggtacaaggaatatgaatattatcagcgccgcaaccaccttcataacggttgagctgtaccttgaaccgaagaactccggcattgtttttgaattaagcgtatgggtcatacgtcttgtgcgctttgccataagcagccacgaaagcagacagcccagcactgcgttgcctatgcctatccatatactgcctatacctatgtcccagccgtgcttgcctgcatatcctacaaatattacagccgagaaatatgctgtgccgtatgagaaagctgacacccagccgcttacgtttcttcctcccagtaaaaatccgtcaaggttttttacctttttgaagcttgttactcctatgcctatcattccgagtgcaaacagcacaaacgcaatgacggtcactgtctgaatcagttttagattttccattctgctctcctctctagtccgttctgttaagtgctcagaaagcagcacaaaataaataaaccgccctctaaacagagggcggagattaacttcgcggtaccacctcattcatcgtttcctcacgaaaacgaccttaacaggtacgacattatcactaatggttatacccttgtgctgtaacgggcactcccgtcgtagcctacttgcatatgctttcggtacgcagctccgagatgtattcacaaaaagtaactatgcgcctttcacctgccggcagctctctgtctcagtctccttaatgctactggttctcttcacagccttgtctttttcaattatgttagcattatatcgcttatatcagaccttgtcaacaacattttgtgacaaattacaaaaaaatatttacccgtttatatcatcttaacaatttcattcattccatatatctttgaagcacttcacatcattttcactcatactgcctctgtagactttcataatccgccccttatacacggaaaacagtacggtcatatcctccctttctccctcaaaggctatatcgcaggcaaaagcctctcctccctgaagcctgaatataatatgataaaagtgtctgcctgccacaagttcctgtctgatatcatagccgtcatattcaaatgaattaagcacctttatcaatttatctaccttatctgcctccgttataactattctgccgctgctccagatatccggcactgcctgaatttccacggaggaaacagcctctgcatctgctctgattatatcatttccgtaggctctgtccgccagcaccagtacaatcacaatgaaacatattacaaggaaaattcccatactgcgaagtgatttcatatttctctcctcccgtacctgttttttctcataatccaatttatatactatgcgcctgatatgatagtaacagctgccgcttgtttgcagcagctgttacgctgtcttttaattaatacgaattacctgctccatattctgcttccgtatccgcactgtttgagttcagtctgcgctatcagagtctttccgtcatatacaagcaccttagccttgtagtagtacttagtacctttcctgcccttggtattgatatacacactgctcttctttgtaatctttgcagtatactttgaagccttctctgttgatctgtagaacttatacttaacagtatatcccatagcctttgcttccttaatcaggctgtttgagttcttaacacccgtaatcttaaccttaatgctcttctttgttgtctttgaagtagttgctttaagcttagcttccctgattaaggaatttatcttatcagcattctgcttatctatgatcttctctgcatccgttttttctactaccgcaaaggttgagaaatgtgaggttgtgaatttaattaagcggtctgctcctgctgtttccacagtatgatttaatatctcacatatacctttgtcattgatatggataataactatatccttgcctttaagcttctcaggcacaggcagtgtaatgtgagccctgccgcccctgaagtcgtggatatacttgccgcttatgatcgctccaaagtcaaatatatgccctctgtcaccgattatatcaagtacagacttctgggcttccttgagctgtgtattttcattcacaacaagtcttacagtatcaccctcagcctctgctgccatggtttcaagggttttgttgtctaaagtaacctgaccaatgtcggttttaattactaaatctgcttctgtgtcctttgcaatggactctactgcttttttagggatttcaatttcaatctgccctgccttgtttccgttatctgatttaacagtgatttccactgt

SEQ ID NO: 4194 - DNA, 32759 bp, Unknown
  16S sequences of unknown bacteria
aaatagaatctattttattttattgtattgtggtacttatgtcaactgtccatgccatggaaaggcccgttttccttaaattcttatagtttaaatacaaaatcaacttgattttgtaaaaaccattgattatcataagtataaatatattttatcggaaaagaggcagcattttatggttaaaaagaagaaaaagaaaattgacaaacgaacatggatgattcgtattgttgcaatgggttgcgcattattgatgttagctaccgttattattgccgctcttttctccttttaataaataaaaagggtccgtatgattttaataaaagcaaaaaacagcattactttattaataatatttatgaataggaacatgtaccatggaatacagaagatttgaaaatacgattattgcacgcattgataaaggggaagagatactggaacaagtaaaaataattgcactaacagaaaatattcgattggcaagtgttcaagcattaggtgcagttggcaaatttacggtaggtgtattccaaacagaacaaaaaatttatcagtccaatgaatttcaaggtgattttgaaattgtatctttagttggcacaattaatacgatgaaccatgaattttattgccatttacatatgagtgcgggaaatgagaaaggtcaagtgtttggaggacatctgaatcaggctatcgtcagtgcaacttgtgagatggtaatctctattgtaaacggtgatgtggacagatgctacagtgatgagataggtttaaatttgtttgattttagccgttaaatagattgatagaaaaaagggaggaggattttctctcttttttctatgtcaaggtatttcatctttattagaatgtttctctttcccggtaacattgaaagtgatatttacaaataaatagcgatttgctatttgtgacagggatatattgaatgacagtcaccaatagattatagggtgtccctgtcgctgctacgctttgttaaattgggattaaaatgacattcggtttttaaatgaactctaaattatttttaacgtaatatttacaaaagggctgtaaactaaactcatcttaacaaacagatgaggagaaagaaaaatgagaaaaacgaaaatcaaaagaattgtgacagctgtacttgcttctgctctcatggtttctacagcagcattatttgcaggttgtgggtctactgataccggaacatccggaggcggcagtaccgcagaaagttctttaagcggaaagcttactttaaatggttctacatctatggcaactgtttgccaagctttgggtgaagtgttccatgagcaaaatccaggtgttacagtcgagaaaagcggaaccggttccggcgatgcttccaaagctgtacttgccggcactgctttgattggcgacctttcccgcgaattaaaagacagtgaaaatccggaccaatttgaagtagttcaaattgcaactgacggtattgcaattgcagtacataaagacaatccggtaagtgatttaacacaagagcaaattgcgaaaatctttacaggcgaaattaccaactggagcgaagttggcggacaagaccaagcaattaccgtattgggccgtgaggcttcttccggaaccagagatggctttgaggctatcttcggtgtagaaggtgaagcaaaatatgcagcagagttgacatcaacaggtgaagtattaaaccgtgtagcaagcgaccctgcagcagttggttacatctctttggcatcagtatccccatctatcaaagctgtaaaagttgacggtgttgaggctacagatgaaaatatcgtaaatggcacttataaagtatccagaccattcattcaaatttataaaaaaggtactgacagtgaacttgtaaaagcttggtttgattttgtaaaatctgacgaaggcaaacaagtaattgaagatgttggactaattccggcagaataattcaaagaaatattcttttacttactacattttccctaaaatagatcaacaaaaatcccctttccaatgtattatcatacttggagaggggatttttgtatgcaaattattcttttccaaataatctttgcgcataatatacagaacccatggcatctttggaataaaagtctgcatgtatcatatccgcatattcttgtgttaatacagcgcctcctaccattactttgacacaaggagctttttcttttaataatcgtatggtttcttccatatttacaacagtggttgtcatcaaagcgctgagacctaccagctgaacattttgttctatggcggtatctacaaccaaacttgggtcgacatcttttccaaggtcaatgacatcgtagctgtagttttccaaaagtacttttacaatgttttttccaatgtcgtgaatatcaccttttacggttgccagaataattttttctcctttttcctgaacagtaccgcttttttcaaaatgtactttaattgcttcaaaagcagctttggcagcttcggcgctcatcaacaattgaggaaggaacagtgtgccttgttcaaattctttgcctacaacgtccagagcaggtaccaacagtttgttgataatttccaacggttccgttgtttttaacaattcttgcgcagctgcatgtgcgctttcttttagtcccttgataacggcttgatccagaggcatatcggcgccggcaggagcagccgtttctgttgtttgtccggaataaacagagatatattccatacattgtttgtcaacaccgcttagtgcacagtaggagtaatatgctttcatcataccttgtgaaccgggattcataatagccgcgcttaatccgttttgcatagccatggtaaaaaatgcagcattgatgttttctcgttggggcaatccaaaagaaatgttggaaacacccaaagaagtataagctcccaattcatcgcgaatgagctgcaatgcttttaatgttacggcagccgcttcttgttcagcgctgatggtcatggcaagtacgtcaaatatcaaatctgtttttggaataccgtatgtttcagctgtagcaatgattttttttgcaacttccaaacgtccttctgcggtagggggaatgccgttttcatctaaggttaaggcgattacaacaccaccgtatttttttacaagcgggaacacttcatgcatggagtgttcttttccgtttacagagttaattaacggttttccgttataaatacgcatggctttttccattgcaattgggtctgtggtatcaatttgtaatggaaggtcaattacactttggatttctttgattgcgtcctgcatcaactgtacctcgtcaatttcaggtaggcctacgtttacatccaatacatgcgcgccgttttgctgctgggtgataccttcttttaaaatataatccatatcatggtcacgcagtgcttgcttaaaacgagatttacccgttggattgatgcgttctcctatgatgattggacggggaccaaactgaacggtatgagtataggaagaaatgacggtaaggttctttttctctattggaacaggcataatacccttacatactttgatggtttccgcaagatgtgcaggggtggttccgcagcagccgccgataatccaagcgccttccattacaatatcgagcatctcttttgcgaattcttcaggatttacatcatatacggtttgtccgtttacatttttgggcagacctgcatttggattcacaataataggcgtggagcagcaggctgtcagctctttcataaacgctttcatttgtgttggaccaagtccgcagttaaagccgattccatctacgccaagcccctccagcaatgctactgccgcaggaatatctccgcctgtcagcagttttgcattttcatcaaaggtcatggtaacaaatacaggtaattttgtattttcttttaccgccagtacagctgcttttacttcatgtgtatcactcatggtttcaatcagagctacatcggctcctgcttgctcgcccaccatagccatttctttaaatgcttcgtatgctccgtcaaattccaaatctcccaatgggcgaagcagtttgcctgttggaccaatatccatagcaaccaacccatgaccgttttcgtttactgcttgttttgcaatggaaactgctttttcaatcaattcttttgctgtgtaaccgctgtcttccattttaatggagtttgcgccaaatgtatttgttttgacaatatcgcatcctgcttttaaatattcccgatgtacatttaaaatgaattcaggtttttctacgttccagacttcaggcaattctcccggggcaagtccattttgctgtaaaatggaacccatgccgccctcaaagaaaataatacgttttccaagttgctttaaaatatccatggtcattcttcctttctaaacggacaattttttgcctgacaagtcatgcatcttgcaatatggcaggttgtggattcttctgtcaatccaataacagcggttacggatttacttggcgccaaaataagactgtccatgacagtaagaccaatgcgtttttggcagtttaagacacccagtaagtctttttgataggtaagaggaaaatctccatagccgggactgaaacgaggacgtaaataaagtccttgtttacctgcttcttctttcatgaaatcctgctgctcatcacagtatgcctcaatcacggtagcggcacaagcttgcagaataacagctttgctcatatccagcttgttgtatttttgaatcagcaagtctgtttgtgcgccaagtgtagcagcaaaaatggctgcttctttgcagccgttaatatgctgagacaaatttttactttgaatggaaatggagccgatggttaccatatgattttcaccaaaagtaacaggaaaaatttgataaatacattttggcgagatgattctcagtagttcggcaagacaagattcaatgctgtttgtaacaatctcatcggcaggttttccgcggtatcccaaatagcgcagtatttctttgcgactgatatccattacgtaattcattctccttagaccggaacagcagctgtacgcttgtccaaaatttcagttagatttgaaacaatggtttcggcaatgtccggtttgttcatagtatataaatgaatggcttttacaccgttggcaatcaaatcaatgatttgttctgtggcataagcaattcctgcttgtttcattgcaagcggactgtcgccaaatttttcgaccatagcgcccaaacgttccggcaaatatgttccggaaagctgacaaatacgcttaatttggctgctgttggttacaggcatgattcccgcaacaatgggaacatggattcctttggccaaagttttatacaaaaaattgtataaaatttggttatcaaaaaacatttgtgtggttaaaaaatcgcagccgcagtctactttttgtttgagatggtcaatatcatccattttgcggttgcattcgatatgcccttcgggatagcatgctgcgcctacgcaaaaatccccttgagatttgatatcttctatcaattgatatgcatagcgataatctttcacagcgtcttccggattcatgccttgagggacatcaccgcgcagggccagtatattggtaatgcgcttgtcctttaattgatgcaatgtagaggcaatatcagatttggcagatgctacgcaagtaagatgcgccagcgccggaatttgatactgtgtttgaatatggtctgcaatttcaatggtacgcttggaattgctgccgcctgcaccgtatgtaacgctgataaagtcaggattggttttggcaattcctttgattacacttttacattcatccaatgggatatgtggttttggaggaaaaatttcgcaggaaaaagtgacggaattttgttcaatcaaatcaattattttcatatgtgataaatcctctctgaaggatattttatggttataaaatcattttagaatcggtaatattataccaaaaaaaaagatggaataaaacccaaatcaatgagatgtttggattttttccatctaaagtgtatttaagaaataggatagaatgatttgagaaaatataagggggctattctcgttaaagttttgtaaatgcttgtgtcaaatcttcaataatgtcatcaatatgttcaataccaatagagaggcgtactgtgttaggggaaatatcacaggcttttaattcctctgcatttaattgagaatgggttgtgcttgcaggatggatgaccaaagattttgcatccgccacatttgcaagaagagagaaaatttcaagggagtcaataaagcgttttgcctcttgttctcctcctttgatttcaaatgtgaagatagagccggcgccttttgggaagtattgctgatataagtcataatatttgctgtcaggcaaagatggatggttgacgcgttctacttggggatgttgtttcaaaaactcaaccactttcagcgcattttccgtatggcgttctacacgaagggaaagcgtttccaatccttgaatgaataggaaagagtggaatggactcaaggttgcaccggtatcccgaagcaaattggtgcggatacgggtgatataagctgccgcacctacatcttttgcaaagttaatgccatgataactgtcgcaaggctgggacagtcccgggaatttatctgaattccaatcaaacttgccggcatctacaatcacaccgcccaatgcagctccgtgaccgccaataaatttggttgcggaatgtaccacaatgtcagcgccgtgttcaatgggacggaataggtaaggggttgcaaatgtgttgtcaataatcagaggaatgccatgtttatgggcaatatctgctactgcttttacatcaataatgctggaatttggattgcccagagattcaataaaaatcaatttagtattttcctgaatggcatcttcaaaattttgtacggtatcagggtcaacaaaggttgtggtaatgttatcctcaggcaatgtatgggcaaataaattataagtgcccccatatagagtagaagctgctacaatgtggtcgcctgcgcgggcaatattttttactgcgtatgtaatggctgcagaaccggaagcagttgccagcgcggcaataccgccttccaaagcggcaatacgtttttcaaatacatctgtagtagggttcatcaatcgactgtaaatattgccgccttcacttaacccaaatcgacctgcagcttggtcacagtctttaaatacatatgaagtggtttgatagattggaaccgcacgggcatctgttgcagaatcaggggtttcttgaccaatatgtaattgttgtgtttcaaatctccaatttttgttgctcataataatatactcactttctatttattttttatcgtatgaaatatgagcgtcacattcggtcgactgcgctgcaacagcgaaaccgtattgtaatagttttgattggcataactgcgcctccaattaatttgtataattcatatcgaattagtaatgtttttgttactgttattctactccgtaaatttacagatgtcaatagaaaacttcaaatattttgcagataaattgccaataatcgcttgttatcagctttatttataacccgtaatagccacagacaatatatccctgaattatatgttaattcagggatatatcttgcatttatgtttggttagaaataaaaaaagacgcttcaaacagaagtgtcttttgcatgaatcatacagttaagataacatttttttcatatcctggtcataacacggagcaatttcttcatctccgtattccgcatgatatttttccactaaatcagcaagtgtaatattgtccactacattttgaacagcctcgtgtatttgacgccacacatccaatgtaatgcaagcgttagagcgagggcaggtatttgtttcatagtctaagcaaggaacaggagaaagagtaccctccattacgtttaaaatcataccgacggtgtaatctttcggttctcttgaaagacggtagccgccgtttgcccctctggcactttttacaaagccggccttacaaagctggttaataatttgttccaggtatttatcagatatttcttgccttgttgaaatattttttatgctgatataattgtccttaccgttcacggcaagatccaacataaggcgaagagcatatctacctttggtagaaattctcatatgtactccttcctaatcaagttacaatgattgaagttgaactttatataataatatatcatttataaaatacatttatttaacttgatattatacaataattcttccatttcgtccatagtaaaaataggtattattcgggaatcccaaatttatttgacgattctcgttgatttcctacagaactgcaggaaaaactttatacacaattgcaccgtatttgccttgcctttctgcaatacattatgttatgctaaaagtacatcttatctggaagatgattctgaaagagcagatgatgttgcaaaaaagaatcgttctgatatatacaagggttcgtcccaagtaagaaggcggtcaaatcgttacgaatttaagacacctcaaacaaattttttgtttggaaggtgtgtttcgtgtatgactcttataccgcttttggtatgagagtcttttttgtttacatcatatcagaaaagaaaggattgggttaaatggaaaccagaatcgggttaattggcattattgtggaggatttaaacgcaacagaaaagttaaatcaaatattacatgattatggcccttatatcatcggcagaatgggtttgcctcatcgtgagaaaaaactgagcattatcagtgtagtagtagatgcccccaataatgtgattagtgcgttatccggaaaactgggaatgattaaagggattaccgtaaagaccatttactctaaaacatccgaaggataacaggtatctgcagaagaggagtgtatgtttatgtatgatgtaaaatcaagagtagctacagagtttattgacaataaggaaattttagatacgattgcatatgcaaaacaaaacaagagtaatcgtaaattaattgagcagctgattcacagggcaaaagattgtaaagggcttactcatagagaagcagccgtactgttagaatgtgaccaagctgatttaaacgagcagatgtttcatcttgcaaaacaaatcaaacaaaaattatacggcaaccgtattgttatgtttgcgccgctgtatttgtccaattattgtgtcaacggatgtacctattgtccttatcattataagaataaaacgatttgcagaaaaaaattgacgcaagaggaaattcgcagggaagtcattgcattgcaggatatgggtcacaaacgtttggctttggaagctggagaagatcctgtgaataatcctctggaatatattttggaaagcattgaaaccatctacagcattcagcataaaaacggcgctatccgcagggtaaatgtaaatattgcggcaaccacagtagaaaactataaaaagttaagagatgcaggcattggaacttacattttgtttcaggaaacctaccataaagaaaattatgagaaactgcatccgacaggtccaaagcataattatgcctatcatacggaagcaatggacagagcaatggaagccggcatcgacgatgtgggaatcggcgttttatttggcttgaatatgtatcgttatgattttgtgggtttgctgatgcatgcggaacatttggaggctgccatgggtgtaggtccccataccatcagcgtgcctcgtatccgtcctgcagatgatattgacgcggaagattttaaagatgcaatcagcgatgaaatttttgagaaaattgtagcagtgctccgcattgcggtgccatatacaggtatgattatttccacaagggaatctcaaaaaacaagagaacgcgttttggatttgggtgtttctcagctaagcggcggttcacgtaccagtgtaggaggatatgcggaagaagagccggaagaagaaaattctgcacagtttgacttaaatgatacaagaactttggaccagattgtaaactggttattggacggaggatttattccaagtttttgtaccgcgtgttaccgtgaaggtagaacaggggatcgttttatgcagcttgtgaaatcaggacaaattgcaaactgctgtcagccaaatgcacttatgacattaaaagaatacttggaggactatgccagcgatgacacaagaagaaaaggtgagcgcgctattttggaggaattgaatcatattggcagcgataaagtgcggcaaattacagtcaaccgtttggaattaatgaaagagggaaaacgtgatttccgtttttgaaggaaaacaggaaaggggacattttcatgagtttggtaaatactccttctggaaacagactgcacattggtatttttggaaagcgcaacagtggaaaatcttctttgctcaatgccattacaggacaggagattgccttggtcagtgaggtaaaaggaactacaacagaccccgtatcaaaagcgatggaaatacatccgattgggccgtgcttgctgattgatacagcaggatttgatgatacgggcgacttaggcaatatgcgtattgaaaagacgaaagcagtattggacaaaacagatgtggctgttgtagtattttcagatatgcaaatggaattggaaacacaatggattgctatgctaagacagcgtaaaattccaatacttgctgttgtcaatcaagttgaccgtattgagcaggtacaggaaatcaaacgtcaaattgagcagcggttttctctcactcccttattggtcagtgcaaaagaaaaaacgggaatttcacaaatgaaacatgaaattctgcgtctgatgcctcccgattttgaggcgcaaagcttaacaggccccttggtgcaacctgaagatgtagtgctcttggtaatgccgcaggataaacaggctccaaaaggaaggctgattttgccccaagtacaaaccattcgggatttactggataatcattgtgtggtgatgtgtgttaccacggaacaattgtccaccgcgctgcaggcgcttgcaaaaccgccaaaattaatcattacagattcccaggcatttgcacaggtttaccctttgaagcccgccgaaacattgctgacatccttttctatattgctggcagcatataaaggggatttatctgcttttgtgaagggagccaatgcgttggattctctcacagatgacagtcatgtgttaattgcggaagcctgtacccatgcaccgcttcaggaggatatcgggagagtaaaaattcccaatatgctgcggaaaaagtatggagaacatttacaggtgaccgtggtgagcggctctcaatttcctaaagatttaagcgagtatcaattaatcattcattgcggggcgtgtatgtttaatcgtaaacatgtgttaacacgtgtggaacaagccgagcaacaaggcgttcccattaccaattacggcgtggtgcttgcaaaactgacaggaattttagaccgaatatctatgcagtaatttgtaaatgaatcgtttagaatgcaatgataaatgaaatatccgaatttggattgttataactttatttagaatattgacaatttctataggtttggtataatacacaaagttagcttgaactaactttgtgtaggaggacttcatggttattacaatcattaatcacagcatcgttttcattttaatactactgtttctgttatgtacgttagaacctgtaaaaagattgcagctgaatccaaagtttagattcttaaaagttatcacgaggtatcactcaatatatgcttggctgcttcttattctttctttgatacatggccttcttgcagaaaaaacttctgcatccatcagtggaaaaatggtatggatgattttgcttttattaattgtttttgcatattttaggaaaaagatgccgccttctgtatggaaaacaatacatatttccttttccgtaatgctgacaataggaatcattgcccatatcacacatgctgtttttatataattcatggattgtataaaatggtagtagtaatcagcatgtattactttttttaggataaaaaatatgttttatggcttgacaaaattctgagtaaggaatattatttaaagtaatagatgaaatgcattgaaagggaagtcatacagagggcttgtgtcagagagctgtcgggtggtgtgagacagtacaagttctgtatggaatcacccttgagcaggcggctgaaccggaaagaagtaagctgagcccggtttcttaccgttatcaaagcatgcattgttagatgcagtgagtgattgtcttttgacaataaattgagtggtaccgcggagtttagtcttcgtctctatttttgtgatagaggcgagggctttttttatactgtaaacttctcactgccctatcaatatcacttgtgtgatattaatctagtacatcatgtaaaggagattgctaccatgaaattaacaggtgcacaaatcattatggaatgcttattggaacagcatgtagacaccgtattcggatatccgggcggtgctgttttaaatatttacgatgcgctttacgaatacagcgaccgtatcaatcacatttgtaccgcgcatgaacaaggtgctgcgcatgcggcagatggttatgctcgttccagcggaaaaacaggtgtttgtattgctacgtcaggtccgggagctaccaatttggtaaccggtattgcaaccgcctatatggattctattccaatggttgccattacaggtaatgtaaatttaaacttattaggtttagacagctttcaggaagtagatattacaggcgttaccatgccgattacaaaacataactttattgtaaagaaaattgaatacttggcagataccattcgtcaggcatttcgtattgcacaggaaggcagaaaaggtcctgtattaattgatgttccaaaagacattacaggacaactgtatgaattcactcctgcaacaaaagcattggatgaagcacagcaggaagcaatgcatttaccaatcagcaaaaagccggtagaggtaaaagaatccaaaatagaacgcgcattggagttgatttccaaaagtgaacgtccctttgtttatacaggcggtggtttgcttgcggcagaggcctgcaatgagctgaaaactttagtagaaaaaatagatgcgccggtttcttgttcgttgatgtgtcaaggaggatttgaccaggcagatgaccgttatatgggtatgcttggcatgcatggaacaaaaacagcggcagaggcgctaaagcattgcgatttatttttagcagtaggcacacgtttttctgaccgtgtcatttgtaatgcaaatttgtttgcacgccattgcccaattattcaaattgatattgacccggcagaatttaataaaaatattgatgttactctaaagttaggcggagatgccaagcagattttatctttgctcaatgaaaagttggagcagcagaatcataaagaatggattgaacaaatcaaagcttggaagaaagaatatccgttgagacaagaagcaattgacccaaatggcgtaacacctcaaatgttgtttgatgctttgaatgaactgaccaaatcagaagcgattattgcaacagaagtaggtcaacatcaaatgtgggctgcacagttttatgaattccgtcatccgagacaatttattacatcaggcggactgggcaccatgggctttggtcttggggccgctatgggtgcccaggtagcaaatcctgataaaaaggttatcaatattgcaggagacggcagtttccatatgaactgtaatgaactttccaccttggcaaaatatcaaattccgatgatggagctggttgtggataactctgtgctgggcatggtacgccaatggcagaaattgttttatgacaatcgtttttctcaaacaacacaggataagaaaaccgactttgtaaaattagccgaagcatttggagtaaaagcatttgaaatccataccaaggatgagctgattcctgtactgaaagaggcactcggtttgaaagagcctgttttggttgcttgtcatattcatcgtgattttaacgtattgccaatggttcctgccggtgcttctgcagaagaaccaatactggaaatgtaagaaagagaggtcgccataatgaatcatactgaagaaaaagattatatcttatccgtactggcacaaaaccatgcaggcgtcctgcttcgcattgcaggcttattcagccgccgctgctacaatatcaaaagcattgtagcagcgcaaacggaagataataacagatccagaattttaattgttgtacagggggatgaccgtattgtacggcaggtggataaacaattgagtaaactggtggaaattgagcaagtgactgtactcaacgataacgaggcggttgtaagagaacacttattgataaaattggagcgcagcgatatgacctccaatcaattggttgcaattgcaaatgtattccatgcaaatattttaaatgtttcctctaccgatatgattgtagaactcacaggaactccttccacactggattcttttgtggaatgctgtaaaccatatcatattgtaaagattttacgtacgggtactatggcaatggaaaaataatagcagtaacaaaacggaacactgcaaaagggagaatgatgatatgcttacactagacaaaatataccatgcggcctacgtattgcgggacgtagtgcgaaagacagatttgattctggccccccatttaaacccggattgcgaactgtatttaaaaacagaaaatctgcaaacaaccggttcgtttaaagtgcgcggtgcatactataaaatttcacagctttccgacgaggaaaaatcaaaaggcgttattgcctgttcagcaggaaaccatgcacagggggttgccttggcagctgccaaacatggaatgaaagccttaatttgcattccggacggcgctcctatttcaaaagtggaagcaacaaaacgttatggagcagatgtttgccttgtcaaaggtgtatacgatgacgcctatcaaaaagcctgtgaattgcagcaggaaagcggaagtacctttattcatccgtttaatgatgaagatgtgattgccggtcaaggtagcattggtttagaattattggaccaattgccggaattggatgccgtaattgtgcctattggcggaggcgggttaatcggcggcgttgcatttgcaattaaatcgctgcgtccggaatgtaaggtatacggtgtgcaggcagtaggcgcgccttctatgtataattctgtaagacatcatcacgtagaaacattagattatgtttctaccattgcagacggtattgcagtgaaacagccgggagatttaacatacgatttatgtgaaaaatatgtagacgaaattgtcaccgtaacagatgatgaaatctccacagcgattttaatgttaattgaacaacaaaaactgattgccgaaggcgcaggtgcagttgcggttgcagcggcgttgtttaataaagtagacgtcaaaggcaaaaaagtagcatgtcttgtctcaggcggcaacattgatgttaccattttgtcccgtgtgatttcccgtggtttgctaaaaacagggcgctctgccgatattactattgaactggtggataaaccgggtcaattgagtgatgtatcacgaattattgcggagacaggcggaaacgtagtggctgtacatcatgacagaagcggtgaaaatacaaatgtaaacggctgttatttacatttggtaatggaaaccagagaccatgcgcatattttggaaattgaaaacgctctgaccaatcagggttataaaattataggaagagagagacgatgtatatgttaaaaaaagtaagtacagaaaaagctcccgcagcaatcggaccatattctcaggcagttgtaaacggaaatatgctgtataccagcggacaaattccgattattccggaaaccggtgaattggtacaggggaacattaccgcgcaggcagagcaggtgatgaaaaatctaaacgcagtgctggaggctgcaggtaccacatttgcaaatgtgattaaaacaacttgttttttggcagacatgaatgatttttctgcttttaatgcagtatatgagacgtattttacggagaaaccggctcgttcttgtgtagctgtaaaacagttgcccaaaaatgcattggtagaagttgagctgattgcatccatatcataaaaaaagctgtctgatttcagacagctttttttatgatgaaagacagtctacgcttgaataaagtatagcgatatggtatactttaaaatatgtgaattttaagggaggtttgattatgcctgcattggaagcgaaaaagaatatctactgggtaggcgtgttagataaagaattgcgcaattttgatattattatgcatacagattacggtactacgtataactcttatttggtaagaggcagcgaaaaaacagttttgtttgatacagtaaaagaaccgttttttgaagagcatctcgaacatattcgtcaagtatgcgatccctctgaaattgattatattgtagtaaaccatacggaacctgaccatagcggaagtattttaaagctgttggaatatgcgccgaatgcaaaggtagttgctggaaaagtagcgctgaattacttgagcgaaatattcaacgccccttttccttctatcatggtaacagaaaaagatacccttgatattggaggtatgacccttcagtttatcagcgcgccaatgcttcattggccggacagcacttatacatatattcctcaggcaaaagcactgtttacatgtgacagttttgggtgtcattttgcagatgaacgtgtgtttaacgacctgattgatacagatttttcagaatcctatcaatattactacgataatattataggaccatatgcacacccaagtatggcaaatgcgttaaagaaaattgagcctttggaaatagagttgattgccaatgggcatggtcctgttttgcgcaaagatattcctcattatatcgaattatatcaaaaatggtctgctcctgttgtgagagaaaacaagcaagtagtcatagcatatgcctcctgttatggatataccaaaatgctggcagaaaaaattgcagaaggaattcgtcatgcaggtattgataatttaaaagtattggatttagaaacaacagatttggaggaagcaggtaaacaactgcagcaggcggacggatttctattggggtcgcccactttggtggcggatgcattacctcctgtgtggcagatgcttacttacatcaaccctattatccagaaggggcgttttgcgggggcgtttggttcttatgcatggggaggagaagcagtaccgaatttgctgcatagaatggaaaagttaaatttgaaactgccggtggaaggttaccgtgtcaagttaaaaccaagtgatgaacaattgcaagaagcttttgtatatggagaaaattttgcaaaagcaatgctggaataaggggaacctcatagtcgataaaaagaactgcaaatttgcagttctttttttgtctgttgtatccaatagcaaatagaacatcatagtgctgtcttttcatggatatcatacaaaaatttctactgtcttgtcagctgtattgacatatagttgcggttgtgcaatactggtatacataagtttaaatcctaccaatatgctgtggcgggaatcccaagaaatggagttgtattgtatgcaagcgttgaaggaacgaatccaaaagttaaaaaaagagcgtgacgcagttattttagcgcacttttatgttgacggctcggtacaggaaattgccgattatgttggcgactcttactatttaagtaaaaaagcatctgaaagtccatgtaaaaccattttgttttgcggtgtggaatttatgggggaaagtgcaaaaattttaaatcccgaaaaaactgtgattatggcagatgtggaagcagactgtcccatggcacatatggtaacgcctgatgatattaaaaaagtaagagaagcttatgacgatttgtccgtagtatgctatatcaactctaccgcacaaacaaaagcttattccgatgtttgtgttacttcttccaatgcggaaagaattgtaaaggcactggaacaaaaaaatatcttttttattccggacggaaatttagggcgtaatcttgcagcaaaaattcctgagaagaatttcatctttcatacaggctattgctgtgtgcatcaagacattatggcttaccatgtacaagatgccatgaaagaatatcccgatgcaaaggtgttggtgcatccggagtgcagtccggatgtggtagctttggcagactatgcaggaagtacttcgggaatcttagagtatgcaaccaaaagtgacgcacaggaatttattatttgtaccgaaacaggaatcttctacaatttgcaaaaggcaaatcccgacaagaagttttatgcggtgaaaaagcaccaagtttgtgacgatatgaaaaaaattacactagagaaagtggagcttgcgcttaagcaaggtgttccaatggaacttgatgaaaatttgatgaaaaaagcagaaggtgcattaaagcagatgcatcaaattgcgcaataagagagaagggcaagtatggaacatcaagcagatgttatcatagtgggaacaggcgtggcagggcttttttgtgcgttacagctgccaaaagaattacatattttgatgataacaaaagacaaagcggaacacagtgattcttatttggcacagggcggaatttccaccttgagaactccggaagattacgacagctattttgaagataccatgcgtgcaggtcattataaaaacaatccggactctgttgatgttatgattcggtcttctccgcagattattcaaaatctgattgattttggtgtggaatttgaacgtacatcagatggactgtcctataccagggaaggcgcccattccacattccgtattttacatcataaagatattacaggttacgagattaccagtaaattaatggcacaagtgcagcagcgtccctatatccagattgaagaatacacttctatggttgatattatagaacaaaatcacgtatgtacaggagtggttgtaagaaccaaagacggacagatacagcctatatatgcaaaatcagtggtacttgctacaggtgggctgggtggtttgttccaaaattctaccaactatccccatattacgggggacgctttggcaattgcattaaaacatcacattgcattacaggatatcaattatatccaaattcatcctactaccttatattctgagaaaaaaggccgcagctttttaatttcagaatcagtcaggggagaaggcgctgtcttgctcaatgaaaagggagaacgttttgtcgacgaactgctgcccagagacgtggtcacaaaagcaatcaaagacgagatgaaaaaaacgaatgccaaatttgtgtacttatccatggaacatatgggagcagatgtgataaaaaaacgttttcccaatatttatgaatattgtcttgcgcaaggctacgatattacaaaggaacccattcccgttactcccgctcagcattattttatgggcggcattcaggtagatttaaacagtaaaacagatatggattgtttgtatgccataggtgaaacaggctgcaacggcgtacacggagccaaccgtttggccagcaattctttattggaaagtttggtatttgcaaagagagctgctttgcatattgcagagaatatgtcaaaagaaatgccgccatctcaaccaattgatgtgcagccgtatcaagatgcggaattattaaaacaacaatataaacaatgtatcttaaatgaaattaaaagaaaggaccgtgcattttatgatcaatggtgtcacgatgaaaatacttgcagatgattacattttacgtgcactgcaagaagatgtaaccagtgaagatgtgacgacaaatgcagttatgcctatgccaaaacagggcaaagcgcagttgatttgtaaagaaacaggtatcattgcaggactaactatctttgaacgtgtctttcagcttcttgacagcaagagtgaatttaccggcttttttcaagatggagatgtggtaaaaaagggagatatcgtaggtgaaatcaaaggcgatatacgcgttttgcttacgggagaacgtactgcattaaattatttacagcgtatgagtggtattgctaccatcacaaatgaaatggcaaaagaattgcaggggaccaaaacaaaattgctggataccagaaagacaactcctaatatgcgtccttttgaaaaatatgctgttaccgtagggggaggctataatcatagatataacctctcagatggtattttgattaaagataaccatattggtgcagccggcagcataacaaaagccattcaaatggcaaaagagtatgctccgtttgttcgtaaaatcgaagtggaagtagaaacacttgcaatgctggacgaagcattgcaagcaggagccgatattattatgctggataatatggacattgaaacgatgaaagaagcagtaaaacgaactgcaggccgagcggaaacagaatgctcaggcaatgtgacaaaatcccgactcaaagaaatttctgcaattggggtagattatgtttcgtgcggtgctttgacccattctgctccaattttggatttttccctgaaaaatttgtcgcccatagaataggagtcatacatatggaaggtgatgcaagacgtcaggaattattacggttaatttccaaaagtcaaaaacccatttcaggaacagagctggctcaaacattacatgtgagccgtcaggttattgtacaagatgttgctttattgagagcaagcaaataccctatttttgcaacaaaccgtggttatgtcttgctacaagacgatacccaccatgtcacaagggttatcagagtaaaacacaatagccatcaaattgaggaagagctaaatgtcatcgtagattgtggtgcccgcgtgctggatgtaaccgtagagcatgagatatacggtatcatacgagcagatttaaaagtggcttccaggcaggaagtaaagctgtttttaaaggatttatacgaaaaccagacaaaaccactaacagacttaacaaacggaattcattcccataccattgaggcaaagtcggaagaaattttggatttagtggaaaaaactctgaaggaaaaaggatttttatatttataatatttggaagcagtaaaatgtatacagattttactgctattattataactgtctattgtttaagttgtataaaaaataacaaagattgtctattttttatctattattgacaatgtgtacggatatggtatactaaatacatcaatttaatgaataaaatttcatgcggattttagacgcttgaaacaggaggaatgtattatgtcagaaagattttatatgccatcaatgagtttaatgggggcagggtgtattgaggaagtaccggccgaaatcaaagagcttggtttaaccaaagcacttatcgttacggataaagtgttaaatcaaattggtctggtgggagagctaacaaaactgttagagcaaaatggtattcaatacgcaatttatgacggagtacaaccaaatccgactgttgcaaatgtaaataacggtttagctatgctcaaagaagaaaattgcgacttcgtaatttcttttggcggtggttcttctcatgactgctgtaaaggtattgccttgcttgcaaccaacggaggagtcattggagactatgaaggtgtaaaccgttccaaaaaaccgcagctgccaatgattgcagtgaacacaaccgcaggtacagccagtgaaatgactattttctgtatcatcactgatgaagaacgtcacgtaaaaatggctttggtagataaaaatatgactccgattattgcagtcaatgatgcaaacttaatgttgaatattccaaaggcactgacagcagcaacaggtatggacgcattgacccatgctgtagaagcatatgtttctaccaatgcaactcctgttacagatgcttgtgcacaaaaggcaattgaattaatcacaaagtatttaagaactgcagtgcatgaaggaaaaaatgtagaagcaagagaaaatatggcttatgctgagtatttggcaggtatggcattcaataatgcttctttgggttatgtacatgcaatggctcaccaattgggtggtatgtttgatttacctcatggtgtatgtaatgcagttttgctgcctcatgtacaggaatataatgcacaagttgcagcaggaagattgagggacattgcaaaattcatgggtgcagatgtagaaggattaagcgagcaagaaggtgcaagaaaagcaattgacttgattaaagaactgtcaaaagatgttgaaattccttccggtttggacgaattaaacgttcctgaggatgcttttgacgaacttgcaaccaatgcactaaaagatgcttgtggttttaccaatccaaagcaagctactcatgaagaaattgtagctattttcagagctgcacgttaaacataaaaaagaatcagttttacataaagaacgcctattcatttgaataggcgttctttatgtaaaaggaaaaagattgttctaaatgaatcatagaaattgctgcaaactatcaaagtgatagtacaaaggaaaaaattacatcaataaaataacagggcagaagagattttaccagatacgtctgaaatcaaaggtagaacctttaaaatcgaaataactttggaaaatggaacagataaaaatattcaaccggtaataaaaacgcaaagatgaaatacgaaaaataaattatgtaatgctattaaatccggcgtagttgcgctcgagacaatcgtaagaccaactgtctagcaatgatatatcaaagagtaaagctcaataaccaaatcttatctactttatagataagatttggttattgatgtattgccaagatagaatacgaggaaactatattatcttttcatttgttttcttccatttcgataaggtatagcagcatacattaacaggtgataatacaatcaattttacatgattttgataaatatgaaagtgaatattttataagtataaaaaacaatttaggtttcgtgatagatgaaacatattcgttttcacattgtatcatttttgtttgaatacacagttggtcaaatgtttactgtgttttacaaagaagcctatattggcattaagatatttttgagagacgatatttagggtgttgcctattgattttaggagcgctgtttttaagtaatattcccagtacaaatttgaaaacatgggttggtttgcatgcagtaaattacggaattccacatgttttttttcatatgggttatattagtaattgacacaaaaataaaatggtggtatagtatgaacaacaccccctgaggggtggggtgataagaggtgaaaatatatgaagcaaaaatttcaagtaacaggtatgacttgctctgcatgctctgctacagtagaacgaaatgtaaaaaagttggagggcgtaaaagaagtcactgtgaatcttttgtccaattctatggttgtttcttatgatgaagacaaagtaaataaccaaacaattatagatacagtggtaaaggctggatatcaagctgctttagagcaaaaaaataatcagaaaaaagcatctgccacaccgaacatttcacctgtggaacaagatattaaaaatatgaaattcagattgattttatcttttgtatttttaataccgctgatgtatatttctatggggcatatgtttggtgctccattacccaactttttgacaggtaatgaaaatgcattgtcattcgctttgactcaatttttattaacattgcctgttgtttatgtaaaccgaaaatattttcaggcgggttttaaaaatttagtaaagcttcatccaaatatggattccttaattgcaattggttcttctgccgctttgatttacggtgtattcgcaatttatcaaataggaatcgggttaggctatcaagatatggaaacggttcatcactatactatggatttgtattttgagtcttccgcaatgatattggctttaattacgcttggtaaatttttagaaacaaaatctaaaggcaaaacctcagaggcaattacaaagctattgcatttagcgccaaaaacagcaacggtcattcgtaacggagaagagcaggagattcctgtggaagaagttgtggtaggggaccgcattgtgattaagccgggacaaagcattcctgttgacggcgtcatcatagagggtagttcttctgttgaccaatctgcgttaacgggtgaaagtatccctgtcgaaaaaaatgttggagataaagtcattgccgcatctgtcaataaaatgggttctttccatatggaggcccaaaaggttggagatgataccacgttggctcaaattatccaattggttgaggatgcaaatgcttcaaaagctcccattgctaaattagcagataaaatcagcggtatttttgttcccgtagtcattaccattgctgtaattgctaccattgtatggctgattttggggtatccgtttgagtttgcactttctatcggtattgccgtattggttatctcttgtccgtgtgcacttggtttggccacacctgtagccatcatggtaggaacaggaaaaggtgcggagtatggtattttaattaaatcggcagaagctttggaagtggctcatagtgtgaaaacggttgtattggataagacgggtaccattacagaaggaaaaccgaaggtaacggatgttgtaccttctgagtatatatccgaacaagaattattgtctgtggcggcttccatggaaaaaccgtccgaacatccattggcggatgcaatcgtagcgtatgcacaagagaaaaaagtgggttttcttccaacagagcattttaaggcagtgtcagggcaaggaattactgcttctatgaatggaactgagtattatgcaggtaatatttcatttatcagccaatatgtagatgtgggaagttttgaggaactcagcaacacatttgctgatcaagggaagacgccgctttattttgcagacagcaatcatatcttaggggtaattgctgtagcagacgtagtaaagccgaccagcgcagaggcaatttcacaactgaaagatatgcacattgatgttgtcatgttaacaggcgaccataagaaaaccgcgcaggccattcaaaaacagctgggaattgaccgagtggtagcagaggtattgcctcaagataaggaacgagaaatacgcgcattgcaggaaggcggtcacaaagttgctatggttggagacggtatcaatgacgctccggcacttgcaagagcagacgttggtattgcaatcggcgcaggtacggatattgcgattgaatcggctgatattgtgctgatgaaaaatagcttattggatgtggtaacagcaattcgtttaagtaaagcaaccattcgtaatatcaaagagaatttattttgggcctttttttataacagcattggaattccgttggctgcgggtgtgtttttctctttgcttggctggaaattgaatcctatgtttggggctgcggcaatgagcttgagttccgtatgcgttgtattaaatgcattgagattgaaattctttaaaccacgccatatgacgagtgcatcagaaaatttgcaagataatacagaaacatgtcctattcaaacggtggcagaacggtcggcttctccgactgtttcacaaatagaaaataatcagacaaaagatgaaggagagaaacaagttatgacaaaaattatgaatatcaatggtatgagctgcgggcattgtaaagcaaccgtagaaaaaattttaaatggatttgacggtgtacatgcaactgtagatttagataaaaaatgcgcagtgatggaagtaagcggaccaattgatgaaaaagcgatgatggatgcagtaaatgaggccggatttgaggccgtttctgtggaataaacagaatcgttattcatataaggtaggtaagaaaaatgaaggctgataaagaaaaggtagctcttttgctaaaaacagcaagaggacaattggacggtttattaaagatggtagaagatgaccgttattgtatggatatctccaatcaattgttggctacccaagcaattttaaaaaaagcaaacagagaagtggtacaggcgcatttaggcagttgtgtacgcgatgcatttgagaaagggaacgaagaagaaaaaattactgagattatggatttgttggataaaatggcaaaataaacagcagggcttcaaaaagaagccctgctgtttttatagaataagggagggaatctgcataaggaaaagtcataaaaaatctcattcttcatttgaaggagttttctttatataaaggaaagtataggtataaaataaaatgaatttttgttaaaaattatgaaaagaaaaatgtttattgatacagcgaaaaataaatagtttcatttgttacaatatggttttgagaaatatgagagccaatcgtttcctctctgtgttttgcagcataataaaagctaaggtaaactgtaatactggttactacgactaatgcgattaaaatacataaaaagacagccggttttttcatctttttaatttcctttttaatctgttaaaatcagtgcatagtaaaatactgctaataaccagaatgaaactggcaaagctaaaatagattaaggtttttttcatgttgtatccctccctttgcctatattgtattacattatgctgctaacagaaatcgattcatcttacattaaacttacagttttgtaagttgaaccataaatgagagagattggcatagacaagggctttcttgacttttgcagaaaaatattttatcattgacctcacaaatatgaatcatataaggagtatcaactatggagttaaaaagagttgcggcgattcacgatatttcagggtttggtaaatgctcattaacggtagcattgcctattatttccgctgcaggcattgaaaccagtgtaatccctacggcggtgttatctacgcatacaggaggatttacggggtttacataccgtgacttaacggaagacattatgcccattgtagatcactggaaaacattggacattacctttgacggtatttataccggatttttaggttcctttgagcaagtgcatttaatagagcaaaccattgataaactgaaaacagaaaaaactgttgtagtaattgatcccgttatggcagataatggagaactatatgcaattttttcaaaagagttcccgaaggagatggcaaaactttgcaaaaaggcagatttgctgattccgaacttaacagaagcatccttgctgttggaagaaccttatatggcagatggcacctatacacaaactgacattgaaggattactgaagcgtttatctgatttatgtcaaggggatgtggtgcttacaggtatttcgtttgagcctgaaaaacttggcgctgctgtttacgaaagaaaaactgacaagattgcatatgcattcacacaaagaattgaaggttattatcatggtacaggtgatgtgtttgccagcgcggtgacgtccggtgtgttaaacggatttacgcttgctcaatctgcacaaatagcggtagattttacagcagctgccattttacgcaccaaaaatgcaggaacagacattcgtttcggcgtgaattttgaacaagaaattccttctttcttaaaggccctaaaattggtataaatcttctttttctattcataattatttttaatctgttattaaaaatttcatgattttagttttttgatttgttataatactggtaaactgattaaaagaggtatgctaataactatgatggatagaatcgcaagatttttatacgggagatatggttcagaccagctcaacattgcactgattattttttcgttggtgatatccatagtcatgcgctttacacctgtttggtatttgggatatttatgctatatcccgcttggctttagtgttttcaggatgctttcccgaaatattgaagcaagaagaaaagaaaatttgatgtttttaaaaattgtttggccatttaaaaactggactcaatataccagcagaaaagtaaaagataaaacccataaatattataaatgtcctaaatgcaaagctgttttgcgtgttccaaaaggacgcggcaaaattcagattacctgcacaaaatgcaaacatgagtttatcaagaaaacttaagggagattgatttatgagattatctgaagaagagcgcgcgtattttaaggcttgttctgatgaattgcttgagcatcatttggtgcaaagtatgagcagatatgaacagcatggtactaccaatcggctggatcatagtgttcaggtagcacaatacagttattgggtcagcaaaaaattaaagttaaaattggatcaaaaaagtttgattcgaggcgctttgctccatgatttctttttatatgactggcgtacgggcacagaccatgaaggagcccacgcatttactcatccggaaaccgctttgagtaatgcaattgaacattttgaaatcaatgaaaaagaagcagatatcattttaaatcatatgtggcctttgaccattacaaaaatgccgagttgcaaagaaagttttcttgtaagcgctatggataaatattgttcgctgaaggaaaactttaaccgggtcaaaaaagtcaaatggattccgcaatttgcaaaataacaaaaaatccgtatcaaaacgatacggattttttatatttacaaataagttaccaatagcgtataatgacagtatcatgttggggcaaaggagaaccattcaatgttaaagggaaagaaactgctaattacgggagggacaggttcttttggaaatgcagtgttaaaacgctttttagatacagaggtggaagaaatccgtattttttccagagatgaaaaaaagcaggtagacatgcgccgtgtatatcaaaacgataaaatacaatattatattggtgatgtacgcgatttaaacagtattcgccaagcgatgtatgatattgactatgtgttccatgcagcagcgctcaaacaagtgccaaactgcgaattttttcctcttgaagccgtaaagacaaatgttttgggaacagataacgtactgactgccgcaattgattcaggagtgaaaaaagtaatttgcctttctacagataaggctgcatatcccgtcaatgcaatgggtgcttcaaaggcgcttatggaaaaagtattcattgccagagcaagaaccgtatcacctgacagaactttaatttgtggtacacgttatggaaatgttatgtgctccagaggctctgtgataccattgtttatcgaacaaatcaaagcaggtaaaccattgacggttaccaatcccaatatgacacgctttatgatgagtttggaagaagctgttgatttggtattgtttacctttgtacatgcacaatcaggggatattatggtacaaaaagcgcctgcatgcaccattggaatattggctcaggcattgcaggagttgtttggcgtgaaaaatgaaatacaagtaataggtgtacgtcacggtgaaaagctgtatgaaacattattgacgaaagaagaatgtatcaatgcggtagatatgggtaatttttatcgtgttcctatggacaaaagaaagctgaattatactcgttatcagatggaagaaagacaagaaaagccgcttatgttggaggaatttaactctaacaatacggtacagctaacagtagcgcaggtaaaggaatatttgttaaaattatcatttgtacaggaagagttgaaaaattggagttctgacaaaagataaattttatacaaatagtattaaaatggataaatatatgaaatgtaaaaatcgctatgcacagtaaaatcattgcatagcgatttttgttattttattgaaacagttatgatatgtgaattggaaatatagtttcacaaaatatttccataaggtacttgcttgtgacgcggcgtaatgttttatactataataaagaggtgatttcaatatgaagaaaaacaaagcgattcctcagggttacatgacagtaggagaagttgccaagaaaatgaacgtttctgtacgcaccttgcagtattacgacaaagaaggtttatttacgccatcggcagagagtgaggggggacggcgactttatacggataaggatatgattcagctgcaccaaatattatctttaaaacatttgggtttttcattgggggatattaaaaatcgtttgatatctcttgatactccggatgaggttgcgcgagtcctctcagaacaagcggcagttgtgagagataaaattgaatgtttatctcagtctttaaaagagctggaagccctgaaagaagaagtgcttcaaatgcaatcggtcaattttaaaaaatatgcggatattatcgtcaacctgcaaatgaaaaatgatttttattggctcatcaaacattttgacgatacaatgcttgaccatatacgcaatcgttttgataaggaaagcgggcttacatttatcaaacactttacaaaattgcaagataaagtattgcagtatcaaaaagaacaggtgcctcccgaaagtgaaaaagggcagcagattgcaaaagaattttggggaatgattatggaattcacagacggagatatgagtatgctgccccagttaatggatgttggaactgtagaggacccaaacggtcaatggcagaaaaaacaaatggatgtaaatgcatttatggagcctgctttagagatttattttaagaatttgggtatcaatccgtttcaggagggacagccgtgagccatgcaattgaaatttgcggattacaaaaatcttatgggaatcatattgtcttacatgatatttcttgctgtatcttgcagggagaaatttttggattattgggtgtaaacggttcaggtaaaaccacagcattggaatgcattgaaggattgcgcagatatgacaaaggcgacattaccgtaaacggtaaagtaggcattcaacttcagttagcgtcgttacctgcgcatatcaaacccatggaagcacttcaattggccgcaaaatggaaccaaacggataaagatgatgaaatgattggggcgctcggtattgagcaattatcaaaaaaacaatatacggaattgtccaccggacaaaaacgaagattgcaccttgcattggctttggtcggccagcctgaaattctttttttggacgaaccaacagcaggattagatgtgcaaggaaaaatctcactgcatcatcatatacgaatgctgaaagaacaggggaagacaatcgtattagccagccacgatatggcggaagtggaaagtttgtgcgaccgtatcgctattttacatgaaggcaggattgccttttgcggcacggtagaacaactgacagaaaaaataggaaagcgttatcatcttttcataaaaaccaatcaaggagaccaaaactttgtggttgataatataggggatgctctaatcaccctattggaagagtaccgtcagaaaggtattaccatactggatattcagatagacaggggaacattggagcagcactttattcaatttgtagagggagatggaaaatgaaagcattgctatatggaattgcattacagtggaagttggacataagaagcaagacgctgctgattacctgctatatggttcctcttttatttttcgctatcatgggagggatttttacttctatcatgccggaatcaaaagataccttagttcccgctatgacagtgatgggggcatccatgggcgcattaattggtttaccgccgtctttggtagaaatatatggcagtggtatgaaaaaagtttataaagcaaacgggatacctgtctattttggattgctcacaaccactttctctgcaatgattcacttattgctcatgtctgttatgatatacgcaattgctccgt

SEQ ID NO: 4195 - DNA, 9164 bp, Unknown
  16S sequences of unknown bacteria
ctgccgttggctgttggagcaatgggaatcggtacttttttaggcgggtatgtttctgcccgaatcgtggaaaaaaaaggcctgttgtgcggctttttgaccgggcttttgtattattttattttgactggcatttctttggccgtgatgcatttttctctggatgcgtctcaggcggtgaagatgggggtcgctttcattgcagcttgcatcggaggtgttttgggcgtaaacggaaagggcagaagaaaagcctgatgccaaaaagcacagggaaagtaaatcaatggttgacaaaagcggcgcagccttcaaaggctgcgccgctttttgcttgatcaatttgtgttggacaatattttgatatagatgttaaaagccctccaagtgaaaagtactttgcaacttcaaaagaaagacaggggaagctttggaaagaggaaaagcgtgctgttgttttgctgctattggattggccggcgttttggagctacatggattgcatggccctccaaatcctccagcgcttccgttactgcttctgtaaaagttggatggggacgaattacctgccgcatttgccgtacggttagctgattgacaatagcctgtgaaaattcgctgataagatcggttgcccgggcacacatcagctgtgcgccgagaagaacgccagtttctgaatggcagactactttgataaatccccggtcttttccttcgatcaatgtttttccgttagcagtcatcataaactttccggtttttacggaaattccctgttcttttgcctcgtcggcggtaaggccaacactggcgatctccggatcggtataaatgcaggcaggaaccagcgacagatcaacagaaggcgtgtgccctgctatgcgctctgccacggcaattccctgggcagaagccaaatgcgccagctgaatatgggaagttacatctccaatagcccagatttgttccagagaagtagagaaatcttcttttgtgacaatacggccgcgttccatttctggggcaattcccggaccgaataagctttctgtataaggccggcggccgatggagatcagtacgccctgcgtccggacaaattcctgctgatcccctttcgaaaactggcagcaaagcattccgccgtctgtcgtgatttcttcaactgtagcgctagtatggatggaaataccgcgtttctttaaaatcatcccaagattttgggaaacttcccgatccatcgtgggcagaatccgttcctttgcttctataatagtcacttcacatccaaggcggtgatagaaggttgcaaattcaaccccaattacgccgcccccgatgataaccaagcttttataatcgacgggatctccttccagcacctcatcgctggttacaacgccgggtaggtttaatcccgagataggaggacgagcaggaaccgaacctgttgcaatcagaatattgtcagcagtgacccggccattgtcagagccggttacagaaatttcgtgaggagccagaatggttgcggtaccgcgaagcaaatcaattttgttagccttaaaaagttgctcgacacctccgcgtaactgtaagacgattttgagctttcggtcgtggatacgccccatatggtagcttacttcgggaatgtccagccccagctcttgggcgttttgggcctgatggtaaatatctgcggcgtgcaaaagtgctttggtggggatacacccccgattcagacaagtgccgcctacgtcccggttttcgattacgacagttttaagacccagctgagccgcacggatagcggctacatatccgccgggtcctgcaccgattaccgccagttgataatgattcatttgttttcgcctccttctgcttgctgcgaaccattccgcagcagcgtttgcagatctgaaatcattgtagcatattgcggtgtttgcgccaagggggacaacgcatctgccactagggagaatgaaaaggggagatcccgtaaataagagggcagcttttctataaaatctgtatccatagcgtcggaataaatttgaacgtcaatgatttttccgctgtttatctcaaatcgaagctgtatttcgccccaggaaaaacgatctgccagttcaaaagaaaaaggaatttcccgcccaagtctccactgccaggaggcaaaagacgctgagattttccgaacttcttcccagtctaccgattcggaaggaagaatttgagcggtaaggccgtaagtctcttcaaacgcgtgaaaaagtgcgtcagaaaggctatccactgtgatggaagggcagagcgattgcaggttaaccacgcgggatttgaccgacgagacgcctttggcctgcaattttttggcagaagcggtaaggtaacgggccatttgttctgtgtccacatggacaagcagcgtaccgtgatgacagctgatgccttttgatttttgaaatgcattgccagaaaatttttttccatctatcgtgatgtcatttcttccgtttttctgcgcgtccagtccgaatgttttgactgcacggcaaatcacctctagctgccggctgacattgtaatccccggacggtgcaacaaaggtgaaattgaggtttcccagatcgtggaagaccgctccgccgccggaaggacggcgcgccaaaaatccgttttcctgctctaatagctccacattgcattcctgccatgcgttttggtttttaccgatcacgactgtgcgttgattttgccataggtagaaaatgcaggtttctggtggacagtgctgcaaaaaataagattccactgccaaattatcgtaaggattggttccggttcccctgtaaaattgtagattgccaatcatagtatattgcccctctaacaaaagcagcgcacctgaattttttcaggcacgcgctttttgttttgttaaaatagatagcgaagctttggatttcgcgctgcgccgacttcatccaaacggcgaacagccgtatgatgaggcgcctcgtgcagagactgtggatccgtttttgctgtttcgtataaacggcggaacacctcgatcgcctcatccagcgtttctttggattctgtttcggtgggttccaccatcagggcctcgtgtacaatcagtgggaagtacatggttggcggatgaatcccgttgtccaaaagacctttggcgatatccatggcagaaataccggtttcttttttcaacggttccagcgacataacaaattcatgcatacaccgttcctgataggctatcgtatacagatcatccaattttttcatcatgtaattggcgttcagtacagcgttttgtgcggcttcccgaataccttcggcgcccaatgttagaatataggacaatgccttgaccactacagtaaagtttccgtaaaaagacttcacctgtccaatgctgtgttccggcttttcgaaatgataccgattctgctgtttttttaccactggcccgggcagaaaaggagcaagcagggatttgcagccaaccggaccgctgccaggacccccaccgccatggggtgtggagaacgttttatgcaggttcagatgtacgacatcaaagcccatatcgccaggccgggacactcccataaccgcattgaggtttgcaccatcataataattgagcccgccagcgtcgtggacaattctggtgatttccagaatatttttatcaaacaggccaacagtattggggttggtcagcatgagacccgcagtatcatcgccaacggcagctttgagtttttccagatctacacagccgtcttcccgagaagggatgctgacgacggtaaatccagccattgtcgcactggccgggttggtaccgtgggcggaatcaggaacaatgatttttgtgcgtttttgatccccccggtgtttgtgataggctttgatcagcaaaagacccgtaaattcaccatgggcacccgccgccggctgaaaggtcatggcgtccataccagtaatttcacacaaagcttgttccgcttggaagagaacctgcatggctccttgcacagtgtgttccggctgcaagggatgaatagcggtaaatccgggcagcgatgtaagttcctcattgatttttggattgtatttcatggtgcaggaacccagcggataaaatccgttgtttacaccgtacgtgcggccagccagcgccgtataatggcggctgatgtcattttcagacagctgcggcaagcgcggggctttttttcggctaaaggtttccggcaaatcgggaacagaaacgtcgcattccggcaggatcgaacagccgcgtccgggaacgctggtctcaaaaatcagattcatgcgccgcacacctcctttatgattgcaatggcctgatccacttcttctttgctgttttgctcagtaacacaccatagcacacaaccggagaaatctccatccagcggcaggccgccgagaatgccgtgttgttccagcgcgtccatcactttcggtacatcaggacattgagcaacgaactcgtggaagaactcgccggtgaagcgaagctggcagccaggaatctcagacatttttgccgcgaaatagtgtgccttggcaaaagactgttctgctgctttttggaggccttccgctcccatagcggccaaatagaccgaagcagtcaaagcgcacaaagcctgattggagcagatgttactggaagctttttcccgacggatatgttgttctctggcctgcaacgttagaacataggcgcgttttccgtccacatcggtggtttctcctacaattcggccagggatttttcgcagaagtgcgttggtgcaggccatgaatcccaaataaggtccgccaaaggatagagaaagtcccaaaggctgcccgtctccgaccgcgatatctgcaccatattctgccggcgttttgagcattcccaagctgatggggttacagctcataatgtatttggcgcctgccgaatggatcgcctcagccgccgtttcggcatcttccagcaagccgtagtagttaggttgctgcagcagcacacaactgacactgttgtctaaaagagaaaaaagcttgtccagatcggtcttgccgtctttcatcggaatgatttctaccggtgtaccggccccttcgcagtaagtttttacggtctgaatcaagtcgggatgtgcggccgcggagatcagcgcctttgtgcgtttacggtcgcggcacatagcaacagcttcggctgctgcggtcgcaccgtcgtaaaccgatgcattggaaacatccatcccagtcagctcacagatcatggtctgatattcaaaaatagactggagtacgccttggctgatttccgcctgataaggggtatatgcagttacaaattcttctttggatacaacctgttttacgattgccggaatatagtggcgatacgcgccggcaccacgcagcacggtggaaaacaccgtgttgtgcgcagccattttttccacagtccggcggacttccaactctgaaagtccgctgggaaggtgcagcggccggtccaacaatatctgccgaggcagatgaccgaacaaatcttccatggacgcgcatcctactgcttccagcatctcccggcgttgtgccggagtagaaggtacgtaggagcccataatgtttattcctcctcacatacggcgatataggcgtcggcatccaaaaggtcttccaggccggaaacatcggtcaattttgcgatccaagtgccatagggatctttattgattgcttcgggcgtgtccagcagaatttcgttgacttcagttacggtgccgtttactggcgcataaacatcggaaacagccttgacggattccacatcacacagcgtgtcttcagcggcaaagctatccccaactgcgggcaggttgacaaagaccagatctcccagatcactctgtgctttgtcactcagaccaaccagaacagagccgtcatccagctttttgacccattcatgagatttggtatacagaagttccttcggtacgttcattgcaaactctcctttttatttatgattggatttattcctagtatgcacgttttcgtgctcctaaagcgatgcgttatctgattcattgccataaagaatgtcgatgacctcgccgatatacatgcggtgaggtgcttcggtttgataataagtatcaaccgcatcttgggggatctgttccagatccagatcctgccagtagatttttttacagattagcgtggctgatgcttgcgaaaaagtcacgccgtgttcaaccggtttgggagtcagactggtaagagagattttgtcgccgtcccgcccggacttgctgccaagaatccccagatcctttttatatgcctctggaaaaaagctgacagtaaaatactcatttttctccagaaactgataggtgtaacggatcggtttgacgtatactgttgcaaccgggcggctccataaagttcccagtccgccccagctgatggtcatcgtattataatggttcaaggtgccggcggtaaccagcgcccattgtttatcaaaaatatggaaagcatccacctgaaacaactccatattaaccccctttttgctgttttaacttaaaatagattatttggattttttataaaagggaagagggacaatctcggcggcaattttgcgtccacgcacatcaatttccacagcggtgccaatttcaggggacggagactccaccagtgccatcgcaatagcatagcccagataaggacaatgggttccagaagtagtagcgccgattttttgtccgttccaatagacatcgcagtgctctcttgcaataccgcgcccggtgattttaaggccaatacgagtacgtttcggttcggctttttcctccaacgcttttttgccgataaaatcctcttttcccatcttaacataacttcccagtccagtttccaaaggagtgacattttcatccatttcatgcccgtataacggcattgctgcttccagacgcagggtgtcccgcgctcctaagccacaggggatcaatccctcgtcttcgccggctttgagcaacgcattccaaagctttggagcatcagcaggatcacaataacattcatatccgctttctcctgtgtagccggtggtggaaacgatacaggatatgccatcgactaggacaggatctcgaaaagtgtagaatttaacaggaagttcctgcccaccggtaagcttagacaggattttgaccgaagcggggccctgcaaagcaatttgtgctacccgatcagaaatatcctcgagtttaacgtcaccaaacaggtgtgatttcatccattcaacatctttatgccgattggaggcgttgacaaccaccagatatttttcttggttgtaacggtaaacaatcagatcgtccaccacgccgccgtcctcatagcacatggggctgtatcgaacttttccgtcggtcatgctggtaaaatcattggtaaataggttttggatattggcaaaagcgtcagggccagtgatcaagacctctcccatgtgggagacatcaaacagtccagcgtggtcgcgtactgccatgtgctcggcaattacgccggttgggtattgtacgggaagaagatacccggcaaaaggtacaatttttcctccgcctgctacatggcagtcgtacaatggggtttttaactccatgaaaaatacactcctttcaaatgaaacataaagattgacaaagaatctgcaaaaatcaaaaaacgcgtgaaagcagaagccttcacacgtctctgtcttggtgcctgagagattccttcctcttatgctgcaaaggggaagttgcttcttcggcgcattgctgctttccagaggttcgtccaaatccggtccttttgcctgagagtatttccgtctttaccccttcggcgctatataggatagtctctcccgaatccttcaaccgaacgaattattttgatttctatttgcagtatagctgaaaaaacaaatactgtcaaacgaatttttgtcgttttttgcgccgttgccaatgacaggcaaatcggataaaataatagcaggaaagcgggtgtgttaaaatggaacttgcagatacaatcgttttttttgtggaaatcgtaggtacggtggcgtttgctttgtctggggcggtgatggcggtacaaaggcggatggacatttttggtgttttggttctgggagtctgtactgccgttggcggcggtataattcgagatattctgttgggtattacgccaccgaataccttccgaaacccggtatacgcgttggtagcagcgcttgcatcggcgcttattttctttgtcgggaaaagtgagccggaaatcatcatcagcaaccgtattcaaaatttcgccttgtttaattttctggatgccatgggccttgggattttcacggttgtcgggattaacacggcgattaatgcgggatttgaagacaacgcatttttgcagatttttgtcggagtgaccaccggtgtgggcgggggaattctgcgggatatgctggcgggcgttacgccgattgtgctgcgaaaacaggtatatgcatctgcagcttttgtaggagcggtgctgtatgcttgttcttacccctttatcaatcattggaccgcaatgcttttaggtgccgccgttgtggttatcatccgaatgctggctgccaagtatctgtggaatctgccggtagcgatccctgaagactggccgccaaaagaatagaaaatgctgaaagttattatatgagaggaaaaaatgagcgcattcgattataaaaaagagtataaacagctgtaccagcccaaaaacaaaccggaactgatccaagtgccgccgatgcaatttgtagcagtggaaggaaaaggaaatcccaacgaggagaatggagcatatgctgatgcgctggcgttgctgtatgctatttcttttaccgttaaaatgagccatttgggttctaaaaaaatcgagggctattttccttgtgtagctgtctcttatacacatctccgagcccacgagaccgtactagatctcgt

SEQ ID NO: 4196 - DNA, 32759 bp, Unknown
  16S sequences of unknown bacteria
tccaaatccatcttttctttgatatatgggtttccggttgaaagcattttcagctctgcataggagagcgccgtttcgtctatatcctcgcaagaccggacgggggatttacccgtcataatctgcgaagcaaatttctgcttgccctctacaagctgccaacaatatgcgtcaaaggtttcctccgtcacatatcggtaaaggccaacttttgagttttcgttgccctgccgcaccgttctgcctgcccgctgttccagatccgaaggccgccacgggcagtcaagatcgtgggaagcaatcagcttattttgaacattggtgcctgcgcccatcttctgcgtggaaccgagaaggattcgcacttcgccccggcgaacctttttgaatagttcctgtttcttcacttcggtatctgcctcgtgaataaacttgatttctgattcggggataccacgcccgatgagctttttgcgaatatccgtgtagaccgaaaattcactttcaccctttggggtggaaaggtcgcaaaagagaagctgcgtagattttttatcagcagtttcttcccaaatgtggtagacctcctgcacacaggcattgactttgctgccctcttcatcgggcagtaaggggttcatcattctctgatcgagggcaagctttctgccgtcgttggtcactttgagcatattgtcaacgcttgcatttaccccgccgtcccgtattttttcagcccgttccgcaagggaggcaaccatatccttttgaatttgagagggcttgacggcgatgttgtggtattccacttccggcacgggcaaatgaagcatatccgccgtttgaatgtccgcaacctctttgaacattgccatcagctcggggagattgttaaatcttgcaaagcgtgtctttgcccggtatcctgttccttcaggggttaattccacggctgtaacggtttcaccgaagctggaagcccacgaatcaaaatgctgtaaatcgtgttcttgcagggttcgatactgcaaatagcgctgaatggtatagagttctaccatactgtttgaaatcggcgtacctgtcgcaaagactgtgccacgtcctccggtgatctcgtccaagtagcggcacttcataaataagtcgctcgatttttgtgcctccgtctgagcaataccgcccacatttctcattttcgtatagagaaacaggttcttgtaatagtggctctcgtcgatgaaaatacggtcaacgccgagttcttcaaaggtaactacatcatcctttctcgattggtcgtttagtttttccagttttacggtaagggatttcttggtcttttcaagctgtttgaccgagaacctgctgcccttattccgctttatatccgtaatcccggcgacaatatcgtcaagctgctgctgtaaaacggctctttgccgttctatgctcatcgggattttttcaaattggctgtgtccgatgataattgcgtcgtagtcgcccgtggcgattctgccgcaaaaccgtttgcggtttttcatctcaaaatcttttttcgttgctactaaaatattggcggcaggatagagctgcaagaactccgccgcccattgttcggtcaggtggttgggtacgacaaaaagggatttgctgcaaagccccaaccgtttggattccatagcggcggcggtcatttcaaaggttttgcctgcgccaacggcgtgtgccaaaagggtattaccgccgtaaaggatatgggcaaccgcatttttctgatgttccctgagtgtgatttcggggttcattccggtaaaagcaatatggcttccgtcatactcacggggacggatggaattgaatttgtcgttgtagagccgcacaagcttttcccgccttgtgggatcacgccatatccaatcctgaaagccctgcttgatgagttcctgcttcgattgagcgatagccgtttcttttttattgagaaccgctttctttttgccctcatcgtcctcgatataatcgaaaacacggacgtccttcatattcagcgtttcttcaatgattttgtaggcgttgactcgctgtgttccataggtgttgtaggctttcaggttgcttcggtcggaagattttccttcgacattccattcacccgtcagcttggagtagtgaaccttgatgttccaccttgcataaacaggggtatccaaaaactcgtagatgaatttctgcacgatttcttcgggcagccaagttgtgccgagctgcacgaaaatctcacttgcggtcaagtccttcggctgtactttttcaagcgcctccacattgaccgtgtaatcttcggggtagacttcggcggattttctcgcccacgcaagtttctggcgcacattcccggagaggtactcgtccgccatcaggtacttttgctcgtcgctgtctccatagccatacattggatttaagaagataacgcctttcaagtcctgatagatttcctgttcggttttgccggagagcgaacacatatattccatatctacaaaggctttttccgccatagacacggcgagcgcttcgcttgcggtatccaccgaagttatgggaatgtgcggtttgatcgtccgcttggtaaaaatatctgccttgcgttccaactctccatcgtcgcccaatatctcgagcgccgagagcaaagagaacgaaccgtcctgcgaaaaggcagaaacattggctcggctgtttatcagcccgtactttttagaaaaggtatcatacagggtgttgagcttctgctgttcggctgtaatctccccatcggggaaatccaaagtctgaatttcaatcaggtttctcacacaatcccgaatggcaatcatacccttaattcgattttcagccgtggcggaacattcgacgggagtcatccgggaattttcacggtaatagattttatcgtctaccaccgtgtaagaaaagttgcgtacattgggatctgcgggaatggaggtatcttcttcctccaattcttcgtctgcttcgtactcggttatctcggcgtggataccggaaatcgcttcttcaagctgttctgcaaggccggtattctcatagggtacgacggtattttcctcgccaaatctgcccgatacggttttccattcgccaagcaccatttcagggtggtctacaaaataggagttcatcttcacaccgttttcatcggtattcagatgtacccactccggctcaatatcgatgagcctgtcccttttttggagaatgagaatatccgaaacaacctctgttccggcgttccccttaaaggtgttgttgggcaagcgaaccgcaccaagcaggtcagctcgctgtgcaatatattttcggattgcggggttttccttatccattgtccccttgctcgtgatgagcgccatcacgccgcccggccttaatttgtctaaggatttcgcaaaaaagtagtcgtggatcaaaaagttgtgtttgttgtaccgcttgtcgttgatccgaatatctccaaacggcacgttgccgattacagcgtcgaagaagctgtcggggatatttgcttcttcaaagggctgtgccgcaatcgaggttttctgataaagctgctgagcgatacccgccgaaatcttgtcgatttccacgccgtacatcttagcgttttgtattgactgcggcagcataccgataaagttgccgatcccgcaggaaggttctaagatattgccctcccgaaagcccatctgctccatcgctttgtagattgcggaaatgacaacgggcggggtgtagaaagcggtcagaacgctgcctttggcgctttcgtactcgtcgggggatagtgcctgatacagttcgataaactcgtccgcccaagaggaattgttttcatcaaaggcttctggaataccgccccaccctacatactgcgataggatttcctgttcttcgggggtggcgaagcggttttcaaactcacactctttcagcacattgattgccgccatatttctgcggaaccgttcttttttccctgcttcgggtatttcgtgggaggcaaggtcaaaggtgtgccgctcagacatcgggatttcagggtgcaaatcaaaggtctgcacccgtgagcgtttcggctgagtaaaggccggggcaaggggtttttcttccggttgttcaggtgcgggtgcttcctgttttgcccgttccacatagagccattcggcagattccttttctgaaacctcttttttcacctgttccagataatcgtttgcctgccattcgctcgtaaattcttcgctgacgccctcatcatcaacatagatttcttcccgtatatcgtcccatacggcatagccctcatcagtttcgatgacgaaaaaccgttcataggattccaccgcactttctgcggcgatttcctccgcctgcctgagcatttcatctgccctgtcctttgcaagatagggcgaatcaatgatttctatgccctgcggcggcggatcaagctcgcctataaaatcctgcggtatggtgttcccgtctttgtctttatacagaacgagggtgaagggaacgccgtaaaaattctcctccttaacatctttttcaagctgatatgggcttgtgtactcaatgctctcccgcaccgaaccgtcggtgtggagatagtcgatcctgccgattggctgcgactgtaccggatcttccttattggtcgagacgatatttcgggtaatgcgctctccgttttccaaagagcagaccgccacatcaaagccccggtcgagcagcatattggtataggtttgcaggctgtgggcaggcaggccgcacatcggcacacgatgttcctcaccgaaacggcgggtagtcagggtaaggccgagtgcttccgatacttgattggcgtcctcctcaaacgcttcatagaaattgccaagctgaaacagaacaatgctgccggggttttcgccctttgcgtcaaggtaatcctgccagatagcagtaacggcgctgtcctcctgcgaaatggcagaagggatatggccattcttttcctgctcggcggcccgttcaatccgggcaatcacatcttcgggcagattctccacatagtagtgaatttccccttcggggctgatatgggcgatattctgataatcgccgtttacttcaacggctcggttccaaacggtaagcccgttgccgagataccccattccaatgtcgtatgatcctttttcttcgggatttgcgttgaaatcttcctctgtgctttccaagccaagatattcactgagtccagcttcttgaattgcgttcacatagtcgtctttgagaatagaatcctctgtaacaaccgccaagactttgcttgccctatcatcttcaaacgaatagtgagggctgatactgcgggaagtcacatagaactttttgatattgccgtcgtaatcctttacggcctgctgaaagtcccgcagatcttccaccgtgaaaatgccctgtgttacccaatacacttcgctgccgtttacaatgtcggcttctttgaagcgcatatgatggggaatgcgtttttcaaattcaacggcgctgaacaggggttccggtgtttcttctgttttttcttcgggtggtaattccttgaccttcaagtggtcgttcatcgggttttcctgcaccctgcggtcaaactcgccccgttctatttctttttgaaataaggggaactgcgtatcgaacagcattacccggttttcgtcaaaggagaggatttcatattcgtccgcacccatatataccgtatcgccaagatgatatacatagcggtcggttgcaacgggttcagcctctaagccgcccgtcatctgcgcttcatagcggtcaatatcatgctcggttatccattctggtttctctggcagaagggcatacagttcccgcattttagcaatctgctgttcgacattttccgcccacaaatgcttttctgcacggttgccgttccctaagaaatactcgcagtccgagcgcagacgggagagcaggcgatattcgttttcaaagttttgcacggcgggttcttcctcttgcggcggcgcagccgagaggatttcccggttttttcgttcttcggcaagctcggcacgacgttcttcctgcttttgcagccaagaggggtaaacctctttttctttcgggttgagataacggtcaaggcggatcagttcagcaatccgcttttcaacctgattccaagtcagattgatatgcggtttctcagcgccaatcccttttgaaatgcgaatccctttcccgtcgtgctgttcatcaatgcctgcgccgacaattacggggtaggaaccgccccaaccgtattcctctttgagaaaatcggcattttcctttgctgacaggcttttttcaaaccgttcgtaaatcctgaacttgccttcggatacgccgcttccacgagtgagaactgcgtcgataatctcctgagaaaaagtaaaggcggaggttttttcctccgcctgcgtttccagtagattcatctgcccgccgattgagggcaggggtttttgtgtgtcccgcagctctccgagcagccgcatagcttcaaaatgttgggcaatcacgccccaatcataaaagctctgcgccgttctgcttaaatagctgccttcccaaagatgaagcacattctgataggttttgtaccccacacgccgcccgtcgttcaatattacttcggtatagtcgttgttgaaaatacccttgatatattcagtacgggcggcattgtcagtgataccctcataaaaagcacgaatttcatcttttgaagccttcaaatgaggggttgtgccgagaatttcccgaatggtatcgtccctgccgaaaaacggcaggcttttatcctcgtgttcccggtcgtagtaatctaagcgaaaatcacttccgctttcacgatctcctgcacccggttccgaagattgttcattccctgcacccatttcatcgtatccgccgctttcaggctctcggtcaagccctcctgcgccgccattttcttcaacagggattcctccatctggagagccgtctgttcggtctgcaccagatgtgcggtcagggtgcagctcgtcagaagattgtaatagaggattcggtgctgttctttcaggtatttcttcctcatctgagcgtacctgcccatcgtcacctccggctgttcgggcattgtcaggtcgggaagattgtagtctccctgcattgtataggtcagttcggccatcgtcaaaactcctttcacttttcttttcagctatattgtaatcggctctgccgtttcctgcaattatgcgattttgcttatcgagagcgagaacagtgcgggagatttcactaagccccatctccgcaatatcgctcgtggcaaagccgagggcattcaaggtttcggacgtgttgaactgcgacacgcctgcaaaaaaaccggagggatagatctccgaagtgtcaatccccaaacgggacatcatcatatatgcgatactgtgggtaacaagttcttcataaagttgcccggattcttcggcggagagataggcaatatcgctgtcgccgccgatctgcataaagtcttgcagataatcgggcaggttatcttcggctgcgtttttagcagcggagaggacggcgcttttcagatcgtccttgttttccaactcaccgaaggtattttcaagggtatcaatgacctcctgctcatactccggtttcatctgccagatgggaaccggacgggaatatttgctctcgtgggtatcggaaatatcaaagtaatgggttaggcgctgtgtgtttctatctgcgtcctcaaagacggcaattccttttgcgccacggtttacccatcgtccaaagctttgattccacctctcaatttccaaaaccgccgttgcgtccggcctctgtgcgtaaatcaaaagctgctcgtcaaagcgaagcctgtaatttcggcaggcagaacgcaaaaaggcttcccaattctctgattccgctaccaccgcattacaggtgcggcggtacagttcagaaatcaggtcatattttcgtgccatcgggggtacacctcctatcgttcatattcttttttcttgggctttttcagaaaaccatccttatcatagctttcgggatttgcggcaggcgtgtgccacccaaacatggaacccaccttcatcgcctctgcctgacctttcgataaaccgagcttttcgttcatctcattcacaagggcgtttgtttcactgggcttgccgccctgaatatccgtgcggtaaaaaccgctttcgccttttttgacaatgccaacgcagttttctgtctgcacgaacacatagcattgctccggcagagaggaacggagggggattactgtattccccgcctgttccattcgctcggcaaattcacagatatgatagaggttgctgccaacctccaaatgatagtcgtcgatatatcggcaagcccggtcaagctgctctccgtcgcttaaagtaatgcggattctatctccgtcagcaagcctgaatttctcgttatagtccgagtcgataaaacggattccttcttttgctttttcaatgtgcttatcgagccactcccgcacatagcagtagcagtaaaaattgtaatctccacgggtgggattgcaccgaatcaggaaggtgtgtttttcggtatcggcacgaaagccatattcggtcgtataactgccctgaaaggcgctgtccggctgattccctgcaaaatgcgccatatcggtacggcttttcagcaatccattctgctcaaaacggagggcgttgattacttcgtccaattcgctcttaaactcatcggttttcagcttctccctgtggtcgaaccaagaggaataaaattcgtttccgcttgaaccgaaatcgccacgcagatacccaatgcttccggtctggccttcaagctgcgtgctttgtgcataggtgtatttgcgctctggaacggtcaatgatctgagttccatttataggccctcctcatcttcacaaggcggctcgagcgtagtggaaaattcgtcctgatagcaaaaggttactgcctgccaaacatcttcctcaaaagcggcccggtaaaagaaatcatcaaaatatggtctaagttttcgcagatcatcacggaatttcataagcaccttttcgtgatcgtcctctgcattgtaggcataatattcgtgatactcgccctttgtcccgacaaaagaacggcagttgtaagagagtgtcccggtcttgtagacatagaagctcataaatccgccatcgcatttcagggtaaatgaaccctgttgatttttcagattgagtacctgattggtatagacattcccaacgtacagttcggagaaaaaatccatcagttcctttgcggcgcaccgcataaattccatttttttcatttctgttatctctccatttcttttgatactctttgtttgggtatataacgtgcctatccttcgttctgctctgattgctgttcatctgcgccacctcccaaataggagaacagcctgttctttgtaacctgttcctgaagctctgtaataaccgtcatatcgggaacagaaatatcggggatctgcaaaatgctctgcaaattgagcgctttcaaatccttttcggttttacagccgaactcgaatagcttttcaagcaccttcattttctgctgcaacggagtgcccgttgttttctttgccgccatattcctttccctccttagcttttagcgtatttcctatatacacgctgcattttgtgccttgccctgcgaacatcgggagaacagccgagagccgggtatttcgcctgaatcttctgtcgtgtccttcggacgctctcaaagcaagggataccgtaagctttgtaattggtcattatatcttcaaagctgaaatacccgatcccgtgggtgtcgtaaatacaagtcttactgacaatcaggtacagcttcatatcgtcgttccgtgtttcggggtactctttgagcgccgcaagcactctgttttctactgtttcaagggttctcattttttggcctcctgtaaaaaagaaaaaggggcggagttttttctccgccccaagtggttattttttcttcctgtttcgtatctgcaaaaagataaagccgcctatgataaaggcgaccaatgcgataccgataatcgctttcagttccatttacttatctcccttcttcttttttcggaaccccaaaatgccgcaggcggtaatgcctgccaccgacagtcccgcaagggcaatccaaagaccgatattgctcgagtctccggttttcggggtatcacgaagttcgttgtgcatttccactaccgtagtcgaacccgtctgtaccgccgcctgtttgtcggcagggaggatatacatagcggaagcggaattgctgatttcagaaatttgatattcgccaatgcggaggttctcgatgaagatctctccatttcggtcagtttcaagggtaacgtcgtagccgttctccccggtaatgcggaaagcaaagccttccaccttcccatcggaggaggtcttgacgattttcaggtttccacgcatagcttcattgacaaagccaacgcccgccttgttttccacctgataggtttttccatcggtgtcgatgaacacctcatacacattttcatcgagaatgaaattctccggcgctttggtttcctttacaaagaagcgcccataaaacaagccggtcatttcatactctccgatttccttttcggtgagtgtgccgagcagttcgtcctctttatcaagctctccgttgtcgttggagtccttatagacctcaaactccgcacccgtcagtttgttatcggggtactcggaatccacctttgtcaaagcaatattgccacggatatattcgttgacgatttctacttcaacaacctgcccgtcctctccaatatctacgctgaacaccgtttcatcaaggacgaacccggtcggctgctcgatttcccgcaggaaccactgcccatagggtacattctcgaaagagaagctgccatcgcccgcagataccgttgtcataatggcgttttcttgggtgaactcgccctcatcggtcttgaacaggccaatcaccgcaccgccgagcgcttcgccgttttcgtctgtctttttgccggaaacagaaccgtaaatcagcttgttttcaatcggcgtaccttcattgacggcgatttcaacctttgcggtatcctgccccgcatatccaaaaacaacggggtacttggtatcgttcaggatatatgcgttgtcggcggcaagttccttcacatagaaactgccgataggcaaatcggttttgacggcagccctgccgttttcatcaagggtgatgatttcaataagtccgtcagccggaatggaagtgccgcttgcgctgataagttcctccgcagcgaacaggccgaagctgatatttttgatttctccgttattaccgattccaaacagttcgtttacttcaagagattttgcaaggctgatttctgccttctgtctctcgttgacaaaggaagtagccgtttcgacaacggcgacattctgccctgcgtagacaagctcgacggagtggatctcatcatttaataccattccataggaagccttgacctcttttacttcaaattttccaagatagagttctttactcttagcgaacccactttggtcggtggtcacggtatcgacaagctcgcccttgctgtatcggagggtgccgtccggggtgataacatcttctgccgcacggatttcataaaccgtgtcgggaagcccctgcatttcataaagcggctgatagatgaccggcagttcttggccactttcgtctgtgccgccgacaaccgaaacgccgaagaatacctcgcccgttttttcaatggtaatggtgcctttctgcggcatattctctttatttacttttatcactgtaaccccgctttcttcggtagagttttcctccgtgatgtcaaaatagaccggagtggaatccagtacatacccataggggctttgcacctcgacgatggagtaccccgaaccgtaaggcagtttttccggtgttacaagcgaaccgcttgcgtcggtatagaacacatcaatcgtggtgggggtaggataggtgaaggtcatcgtcacaaggctgccggagggatcatagatctggaagcccgcccccgcatagggaatggtctttccggtttctgcgtccacctttacaaccttgatatagctttcaaagtttgcattgttcatcaggtatcggtaagtctgcccgtcctgagcgatgaacacatcaaaatcgtccatcagttctcggccttcccaaccggaaacctgatggacggtatagataccgtagggcatttgcttgctctcggcaaaaccattttcatcacaggtcagggtgtccctttcggtttcctttgcgttttcaaaactgccggaggatttcaggtacacctcaaaagcagccccttcttcgggtgtttcaatctgtgtatcgccgttatcggtgtgtttgataatggcgatattgcccttgataatcgtttcaagcacatcatttgcggtttgattatgctcgatggtataaagttccggctctgcacctaccttgtggatagtcggatcaagcaagtacccctcgcttggttcgagttcccggattgtccaatcggaatcacagatatattctttcgtggtaaactgtccgtttttatctgtaaagtattcgtcgatcagttcttcgcctttgaaaatgccgtacttcgcaccgcccaaagtaccatcgccctgcggtgtcccggtttcagaatcgcttttcgtcacggtcacggcaaactttttcaggatattggtgaaattgcgggtagtgacctcattccatttcacaggcgcagtctgcttttcgggaatcacatagcgaattgccgtatcgacttcctcaatggtaaaaggggtagaaccgctaatcagcacatcttcaaatttcgccacaccgttttgatcggtaacggcatattcgtccacttcaataccggaaagcgaagtcccaaaaaggtgaaaggtcacaccttcattcaggttatcctctgaggatttgataacctgaatatcgccacgcttcaagacattattgaaatttaccgttgcggtctgtcctgaaacaaccgtcactcgatgggtttcctgcggttcatagaggtcgtatgactgctcggttacaaggtaaattccgggcattaggttgtcgatggtgatttcgccccggctattcgttttcacggtctggttgattccgttgcctgtaatggtaaaggaaatgttatcgaccttgccatcttcggacgtttttacgattttcgctgaaccataggaaacttcaagcttcaaaaaccctttgaccggatcatttacgctctgggcataggtcacaaggtcttgcactccactgttcgggttatagataccgtcgccccaaacaacaatgccttttctctgcgaatttctcttttctgcggttacggtaacagacgagcttggtgcgctgtccgccgtaataatgagttcatcgccgcttttctcaaaggaaatccccggctcgtttgcagaaaaggtatattcgcttaaaacgccgttggaatcggtaagagtggcagaataattcgtgccattccattcaagctcaatactatccgccctgccgggggtggcgctgcaaaaatcaggcagcatactgtgcttctgaacgcttctctcaatgcgctcatagtggtcgatgacctgagaatacagggggtggtcggtgctgatggaatcgagaacagcgtcgtagccgccggaaccgatattctcaaaagcctcgtttctctcaccgactacggtttcccaaaccaaaatctgagtcgccatcgcttcggcaagggtatctgcgtcacccgcattctgagagcgccaacttgtgctgattgtcccggtatagccatactggaagatacggccaatgaacatcttaatttcatacggggtaatcgtgttgttgaaatcgccggggtagttatcccaaaaatattcatctcgggcggtaaggctgtccccggtttcaaggggtacgccgggttcaatgcagtagcagatattcccggtatacgagttcatcgcatagacggttgtgtatcgggaagaatcggcataccaaccatttcggtaggtcaggctgccgtgtccccacgaattgctgtaattgctatccccatcacgggggaacgaaacaaggaatgcttctgcttcctcgcctgcggcaaaggcggttgtcgagccaatgcccataaaggtggaaaggcacatcacaagggcaaggagagccgacgcacctttcctgaaaatactctttttcattctgtgtaaacctcctaaaatacaaaaagcaccgtacttttcagcacggtgcaattcgtgatattgttttgtttttatgcgtagccgatatacaaatcgaaggtattatttccggtcgcttccgcccacacccacacttcggagatagtttcgtcctttgcgtagcggttcaggcagtcggttatatccctctcgagatatttgctgtgcgaacccgcacccaacggattatcgctgcaatagaccgcttcgtttgatacttcaagcccaacgcttacggcatagttttttgcaaatgaaatccattgttcaatgtcaaaggcaggctcggtttcaacgggcttttcttcttcgggcggttctgtttgaggagggggtgtgatctccggttcaggttctttgctttcagatggctcgggtacgcttggttttaccggcacaacgggttcctgcacgggattgtccgcttcatcaggcagatcggcggggtgcgctgtctgcccggtatcaggaatagcctgtatctgttcggctgtttccgtgctttcctccgtgggcgggattttcttctcgggttcagaatcctgcggctgttcaggcgttgtttcaacctcttgtttttcttctgcggcaggcgcttcggattcgggaaagctttgattatgactctccgaaaaagaaaacggctgcggcttatcttctttcggcaaggtattgttgcagcccgtcagcgcaagcaggatcagaaccgtgaaaaaagcggttatctttgttctcataatcgtttcactcctttgcttttctgccctcattttaatcaaaaagcaggccgcagacaaaggtgcgaaacaaggggtaatcttaaatcataacaagtccctcccaaattcgtgaactgtgcgtttgctttgtagagatagctctaattctacaagatagatttagattagagagatagtttttctttcgggtagtcaggtagtatttcaaggggttggagtgtgaggaaggggaagctcgacatactgcggtttatcggctgtcacgctcggcacggtttcgcaaaaacctgttgtaatgctctaatgccttgcagacatattcctccgtctgattcaggggaaccgttttggggataaggtttcgcaccctgtccccacgcaagacgattttttcccgctgattcggcttttcttcgctcattatggcctgaattacctccggcgttaatttgtcctcctcaaaaaactttcgcatacggattgcttggtcgtgagagggggtacaagaactaaggtcaatttcgtcaactaaatctcgctgacaatcttcactcaaagaagaaatctccacagcaggctttaacgccatttgtaaagagcctttgtctttaataaccgagttatctaccatttcaagcaattcaggcactaattttgtcaaacaaatatagcggcgaactgtttctccgcttatatctgcaatcatatcacgactttttgtgccactcgacttgtgcaacccggttgcacaagttaaatctgttcgtttgccttgccgagccagtgcgttcattcgcattttataggcaaaagctcgttcagatggaagtagctgcgagcgctgaaagttgctctctaccattaaaactgtcgcttcgtcacggtcgaggtctaccacttcacagcgcagcgtttcaaatcccgcaagctcacaagctctttttcttctgtggccggaaatcatttcatacctgccatcttccttctgcctgacggttgcgggggtaatcacgccacgctcttttacgctctccacaagctgaaacatatcctcatcttcccgtacctgaaacgggtggtctggaaaatcgtcaatttcatcaaggggaatatccctgatttttgcgagtttcgcttcgtcccgttcctcctgcgaagaaaacaaatcatcgagagagtgtgtgggaagcgtgaagtcgctctttctgcctgccatcagctaacacctcctttgtgaaattggcgtaagccttagacaccgtgctgtttggctcataggcataaatgcttttcccttttgaagaaacctctgcggcttttacggcgattggaatggcagatcggtatatcttgattctgcttccgaaattgtcccgtagagcgtccacggtgcttttggcgagattggttctcccgtccacaagggttaagaggattccgtcaattttcagatcggcattggtatgccgcctgacatcagcaatcgtctgcaagagctgcgtcattcctttggccgggaggtactgcgcctgcacggggataatcacgctgtctgccgccgtaagtgcgtttaaggtaatcattccgagcgagggcatacagtcgattagaacatagtcgtagctgcccttcacttggttcagataatttttcaaaacggcttcacggctcatcgctgtaacaaggctcatttcaaacgctgataactccaagttcgagggaacaaggtcaacattttctgcgtggtgaagcataccttcaaacgggttgctctctgtgttccgtatgatttcagacagcttgcttgcaagcgtaaccgggagattatcggtatcctgccaaccgaggcaggtcgttaaatcgccctgcggatctgcgtcaatcagtaaaaccttttgtccctgcatagcaaggccaattcccaaattgaccgccgtagtggttttgcctacgccgcctttctgattgcatatcgcaatcgttttgcagtttggcatttttcgctttgcctcctttctcagatttcataaccgcttccattgaaacggctatgtatctgaccgcagtatttgttctcaaccacccctgcggaaagcatttcgctttgtacgggaagcactaaggttacggtttgcgaaaccgtttcatagggatttcacctctgccgggttctccgccagccccgtagggaagtatcattatcattctgactgtccttgccgtctcggtggcaatccgagtttcaggtcgggggttctcgctcactttcatagaaaggtcttggcgtacccaccttcgggctatcatcagaactaacgtccttagtgcctgtatattcaattttcaaggttctctgaagggggaaactccggtttggaatttaaccccttcactaattcccagtggcacccccgttttggtcgggtataaatctaaaaaaaattaaaaaaattttttctcaccttaaaaactgctctcaaaacgcaaaaaaagccgcctgcttctccgtagagaaacaagcggcttgaactgctttctatttagatgtattgtacggtgatccgtttcttccgtgcttttgagattttgatgagaacatcgtctactgcgtccgtgtatctgccttgcgccataaggccgtttttcaggtctatgagcgattgtataacctgagagcgttcctgctcggttaaatagatatggtagtctttctctttcatctcctgcacctccgttctgattttactatacaaaaaatcacaatgctttgcaaaggtgcgcctaaaaataaaagagggttccaaccgtttatagttggaaccccactcttttttagctcattactgcataaccgttggcagttatttcgtccgttgcaaaaggctctcggctcataacgtgttgcaaaagtgttgcaaaaccaatccgccaatttgggaagtgtccgtaaacccgcataaatactgggtttttcggcacctcatagcccgttctgactactcccactcaattgttgcagggggttttgaggtaatatcataaacaatacgatttacatgttttacttcgttgacaatacgattggaaattttcgacagtaaatcatagtcgattcttgcccagtctgctgtcataaaatcagtggtagaaacagctcttaaggcaatcgtgtaatcgtaagttctaaaatcgcccataaccccaacactcttaattccggttagcactgcaaagtattggttcacatcgcgctctaatcctgcattcataatttcttcgcggaaaatagcatcagcatcttttagaatttccagcttttcgtttgtaatttcgccaagtacacgaatagcaagacccggacccggaaatggctgccgccataccaaaggtgcaggaataccaagctcaattcctactttgcgaacttcatctttaaataaatcacgaagtggttcaataattccgctaaaatcaacatcttcaggcaagccgccaacattatgatgacttttaattaccgctgattcacctacaccgctttctactacatcgggatagatggtaccttgacacagataatccacatggcctattttttttgcctcttcttcaaacacacgaataaattcttcgccaatgattttacgttttgtttccgggtcacttacaccagctaacttagaaaggaaacgttcctgtgcattgacacgaattaaattcatatcaaattgtttacggaatacttcctcaacctcgtctccctcgtttttacgcaataaaccgtggtccacaaagatacaggttaaattttttcctatcgccttatgtaccaataaagctgcaactgaagagtctacccctcctgataaagcgcacagcactttcttatctccaatttgctcctttagagattcgatgctcatttttgcaaaggaagccatttcccaatcccctttgcaatcgcatacatgatacaaaaagttttttaatatttgattgcctgcaacagaatgttccacttcaggatgaaattgcagtgcaaatatttttttctcagaatgctccatcgctgcaacaggacagtgagaagtagtagctgtagcagtaaatcctgcaggtaaagcagaaatgtaatctgtatgactcatccatgcaatacttgttttgtcaatatcttgaaataacacagaatcacagtggtaagtcacttctgtattgccgtattcctttacttcactattatctactgtaccacccaaagtagctgcaattaattgtgctccgtaacaaatgcctaaaaccggaatgccaagatgaaataaatttgtatcgcattttggggcattttcagcataaacactgtttggaccaccggaaaaaatgattcccttatacccatttttctgaatttcctcagcggaaatattataaggtttgatttcacagaatacgttgcaatcacgtactctgcgggcaatcagctggctatattgaccaccaaaatccaaaattagaaccgcttcattttttatcatatactttccacctatcttatctattccactgtaacagattttgccagattacgaggtttatcaatgtcacatcctctattatctgctacataataagcaaataactgtaatggcaaaacagccaaagaaggagccatcatgctattgatattaggaatataaaacacttcgtctgtttcgctctcaatgatagttttatcttccgtagtcaaagatagcactgtagcgccgcgtgcttttacctctttgatattgctcatcattttatcaaacaatgcttcatatgttgccaaagacacaaccaaagtaccgtcttctattaaagaaatagaaccatgttttaattcacctgctgcataagcttcagagtgaatataggaaatttcttttaactttaaagaaccttccaaagatagtgcataatcaatatttcttccgataaagaaaatattttcacattgatagtattttgcagcgacagcttgaatctgtttggtatcgctgattgtcttttcaattaatgatggcaatgcttccaaatcagctacataattttgatattcttgcttggaaatagtcccaagcaaatctgccatatacaataccagtaaatataccacacataactgggtactgtaagctttggttgtagcaaccgaaatttcgggacctgcccatgtatataatacatcatcagattcatttgcaatagaactgcctaccacatttacaatggaaagaacacgtgcacccaattttttggcttcgcgaagagctgcaagagtgtccgctgtttctccggactggctgataaccaaaaccaaaacattttcatcaataattgggtcacgatatctgaattcagatgcaatgtcaatttcgacgggaatgcgtactgtcttttcaatcgcgtatttggctactacgcccacatgataagcagaaccgcaggcaacaattacaatcttctttaatttttgaagatcttcttttgttaattttagttcatccaaaacaatttttccatctaccaatcttggagaaatggtgttatgtaccgcttttggctgctccataatttctttgagcataaagtgttcataaccttctttttctgctgcggtgatatcccaatcaatgtgaattttattttttgtaatgatttcctttgcctcgttatatacagtaacgttatcgcgtttaattactgcaatctcattgtcatttaaacgatagatatcccgtgttttatcaataattgccggaatatcggaagcaatgaaattttctccttttccaagtccaataatcaaaggactgtctttacgaacagcatataaggtatcaggatcatctttacaaataatccccaaagcataggcaccttctattttgctcagcactttaataatggtatctaaaatattgccgttatagtaatattccagcaattgggcaactacttccgtatccgtctctgaagcaaaacgtttgcctttattcattaagtaatctctcaaatataagtaattttcaataataccattatggacaactgcaaaagaaccgttttcactgcaatgaggatgagagttaatatcggaaggctcaccatgggtagcccaacgtgtatgaccaattcccaaagttcctgtcatatgattgtcggaagtaagaatatcacatagatttttcaatctgcctttacttttaactacttcaaccgagtgattttggtaaactgcaacgcccgcagaatcatagccgcgatattctaatttttccaggccattgagcagaataggtgtagctttatcgtcacctatataaccaactattccacacattgtaaaccaccatttctccagtagtgcataatagagagatacacaacattactactggaaatgttgtgtatgaataaattatctataaataatatcatcacgagaaggaccgttcgaaatcatgccgaaaggtacgccaatttctttttctgcaaactcaatatactttctgcagttttcagggaggtcttcatattttttaataccacgaatgtcgcatttccatcccggaagtgtttctaaaataggcttgcaacgttttaactgcgctgtggacgggaaatagtcaatacgttttccgtccaactcatacgcaacgcaaacaggaatttcatccaaataacccaacacatccaatactgcaaatgcaactgtggtagcaccttgtacacgacagccataacgtgaagcaaccaaatccaaccatcccattcttctgggacgacctgtagttgcaccaaattctccgccgtcaccgcctctgcgacgcagttcatctgcttcttcgccaaagatttcactgacaaattcacctgcaccaacagcactggaataggccttaaccacagcaataatctctttaatttcatatggaggcaatccggcacctaccgcaccgtaaccagctaaagtagaagaagatgttaccattggataaataccaaaatcagggtctttcaaagcacccaattggccttccaacaaaatatttttaccctcttttactgcttcatacaaatattcaaacgtatcggtaacataaggagcaatcaattccttatattccatgagtttgttgaatacatcgtctactttcaaaggaggctgatgatacaaatgttcgtacaatgtattttttacagccagcacgcgttctatttttttcttcagttcagtttcgtcatcataaagttcgctgatttgaaagccgatttttgcatacttatcagaataaaacggcgcaataccggattttgtagaaccgaatgaattttcagataaacgagcctcttccaatgtatccagttcaatatgatacggcataacaatttgagcacggtctgatattagtatattcggttttggcacatttcgttcttctaaagaagaaagttcttttataaaattttctacactaagtgcaacgccattgccaataatactggtagtatggtcataaaaaataccagatggcaattgatgcaatgcaaattttccgtagttattgataattgtgtgtccggcgttactgccgccttgaaagcgaatgacaatgtcagattgggcagcaatgacgtcagtaattttacctttaccttcgtctccccaattagcaccaacaatagctttaatcataaggatattcaccctccgctgtgccgcctcagcaaataagattgattctacgcggcgatatttcagaatcaattcaatttttaattataccataagaaacattcgttggcaattttcctgtattgatttcaattacaaactaatttccgaatgttggatttcatcgaaatgatatgcttctaaagcaggttttacatattcattgataaactcaactgtttgttccggcgctctgccaacataattttcaggacgaagaatttcctgtaattgttccaaagttacaccaaaactgctgtcgtttgcaatgcgttccattaaatcatttttcccgccttgctcttttaccacttttccggcttccatagagtgaacacggattttttcgtgtaattcctgtctgtctcctccgcgttttacagcatccatcataatattttcggttgccatgaacggcaattcatccataagatgcttttctatcactttgggataaactaccataccgtttgctacgttttcatataagcttagtattgcatcaattgccaagaatgcttccggaatggcaattcgtttattggcagaatcgtccaaagtgcgttcaaaccattgtgtcgcagtagtaatggcagggtttaaactgtctaccataacatagcgtgccaatgcggtcatacgctctgtgcgcattggatttctcttatacgccatagcggaagaaccaatttgatgtttttcaaacggttcttctatttctttcaaatgctgcaataaacgaatatccgcagcaaatttagatgcactttgagcaataccgcttaacactgctaacatctgactgtctagttttctggtatacgtttgtccggaaaccgcaaaacaagaagcaaatcccattttttcggcaattttatggtcaagcgctttgcatttttcgtggtcaccatcaaacaattccagaaaacttgcttgcgtacctgttgttcctttagaaccgagtaatttggctttgcttaattgatattggacatcttccaaatccattaacaaatcttgtatccataaagtagcacgtttcccaaccgttgtggtttgtgctgcctgaaaatgagtatatcccaatgtaggtaaatctttatagttcagggcaaattgagacagcgcagcaatggtagcagccaatctcttttctaccaactgcaatgcttctgtcataataataatatcggtattatcgccaacataacaagaggtagctcccaaatgaataataggtcttgcatttgggcactgttctccaaatgcaaatacatgggacattacatcatgacgtacttttttttcttgcgcttctgccacttcataattaattttatctgcatattgcttcatttcatcaatctgttctttggtaatgggcaagccaagttccatttcagattcagcaagggcaatccacagttttctccatgttgtaaattttttgtccggagaaaataaatatctcatctcactgcttgcataacgcgttgaaagcggagatacatatgagtttttcaaacttgataacattcctttcggtatgtgtaataaagtcaaccgttaaatttccaaacgtttaataggagtgctgtaaatgtcgggtttaccttgacgaagtctttcagaaatttgtgtgggataattaccggagaaacatgcatcacaatatcctccgcattttccctttacaatttcaggcaaactttctaaacttaaaaatcccagtgaatcggcgcctaccaagtctctgatttcttccacagtatgtttgcaggcaatcaacacgtctttatttgggatatcggtgccataataacaaggccataaaaattccggagaactgatacgcaaatgcacctcttttgcaccggcttctttgagcatgcttacaatacgtgcgctggttgttccgcgaacaatggaatcgtccagcataacaacacgttttcctgctactgcggaagataacgcatttaatttaatgcggacacttttctcacgttccgattgcgtcggtttgataaatgttctgccgatgtaattgttttttacaattcctttttcgtaaggaatgccggattcttcactataaccgattgcagcatcaattccggattcaggaacgccgattacaatgtccgcatctacaggatgctgttttgcaagcaatctgccggattcttttctggcttcatatacacttactccatcaatcacactgtcggttcttgcaaagtagatatattcaaaaatacataaggatttgtttaaatccgtttttgcatcaatatagcgaattccctgagggtcaaccacaaccatttcaccgggattaatatcttttacaaattcagcattgcagctgtcaagtgcacaagtttcggacgcaaaaacataagtgtcatctaccctgcccagagccagcggacggaatccatgaggatcacgcagcgcaattaatttctgtgcactcattaccaacaagctatagcatcctcttaattgaggcattgcacgaatgaccgcttcttcaatggatggcgcttttacacgttcttgcgcaatcaaatatgcaattacttcagcatcgttggaagtttggaagatggcacctctatgacttaattcttctcttaattcaaaggagtttgttaaactgccgttaaatgcaattgcaaaattacctttcgcatatcgcattacaattggttgtgcattttctcttgatttttgctttgctgtagagtaacgcacatgagaaatcgcaatttctccgaccaaatctgtaataattttgtcgttaaacacttcattcacaagacctaaatctttagagtaggaaataacaccgcggtcacttaccgcaataccgcagctttcctgcccacggtgttgtaaagctaacaagccgttgtaacaggcataagcgggtgacaacgcgccgtcaaaagaatatacaccaaaaacaccgcattcctcgtggggcttaaaatcgtcagcgtcaaaattaagtacagaattcatattgtttgttcacactcctatgtttctccaaaagcctatacgcataacaaaaatacatctattatgcccgtgcatgcatgtccgtaaaaacagaatgagcataaatgggtatgctcaattgaaatagtagactgcaaatactgtttttttcataaataaccaagtttattttattatatctgcatagactttgtcaatatttctgtttcataattcataaacacgatacaagtaataatatttgattgcctaatggatggcatctcaacaaattgcaaccaaactataattttcctgcaaaaaataagataaactaaaacttttatattcaaaaatgaaatttatgataaataaaattgcgttattaggccgatttttttaaatttcatcttgtaaatataaccaaaatatgataaaatgacaaccagttaataatgattgcagtaggaggaaaagattttatgtcttatgttagcgaacaattagaaaaagtaatacaaaaaaatccagaccaagcagaatttcaacaaaccgtaacagaagtgcttacttctttggaaaaagtaattgaacaaaacccacaataccaaaaagagggtattattgaaagaattacagaacctgaaagacaaattatgttccgtgttccttgggttgatgacaacggcaatgtgcaagtaaaccgcggttttcgtgtacagtttaacagcgctatcggtccttacaaaggtggtttgcgcttccacccatccgtaaacctaagtattattaaatttttgggttttgaacaaattttcaaaaatgctttgaccggcttgccaatcggcggtggcaaaggcggttccgactttgacccaagaggcagatccgaccgtgaaattatggcgttctgtcaaagtttcatgacagaattatgccgtcatatcggtcccgatgtagacgtacccgcaggcgatatcggcgtaggtgcaagagaaatcggctatttgttcggtcaatataagaaaatcaaaggcaactttgaaaatggtgtgctaacaggtaaaggtctctcctacggcggcagcattttacgtcctgaagctacaggttttggtgctgtttacttctgtaatgaagttttgaaagacaacaatgattctatcaaaggcaaaacttttgcattgtccggcttcggaaacgttgcatggggcgctgcaaagaaaattgcggaacttggcggtaaagcagtaaccatttccggtcctgacggttatatttatgatgccgacggaattacaggtgaaaaagtagattatatgcttgaaatgagagcttccggaagagataaagtacaagactatgcagacaaattcggcgtacctttctatcccggtgaaaaaccatggaacgtaaaagttgacgttgttatgccatgtgcaacacaaaatgaaattggcatgaaagaagcagaacaaattgtagcaaacggcattcaatactatattgaagtatccaacatgcctaccacaaatgaggctatggaatacctgcaagagcataaattgattattgctccaagtaaagccgtaaatgcaggcggtgtagcagtatctgctttggaaatgtctcaaaacagcatgcgtttgtcatggtctgctgaggaagtggatgaaaaactaaaaggtattatggtaaatatcttcaaacaatgttctcaagctgcagaaaaatattgcgatgaccgccgcaattatgttgcaggcgctaatattgcaggcttcttaaaagtagctgatgcaatgctggcacaaggcgttatttaatatcgcgtaaatcatatgacaaaaccaccttttcttccctatcgttttgaaaaggtggttttattgtttgatattttacaaaaaagaccgaggaatccatattcctcggtctttttatgaaatgatataaataatcatcggtgcaacataaacagctatgatgacaattgcaaataaagcaaagataattggataggatatgtactccacaaaacgaatatagcggtatcggtttttatttagtaagagtataaatccaatacacaacaaaatacctgcggcagataaaattcctcctgtgataaatccatttggaacatacgaaacagtcaccgtattcgtaccgttttgcaatttgattgccataaacgtatcaaatacttgataaatttctgcctcttctccatttactgttgccttgaaaccatttacatagccaataggcaaaaataaatattgattttctcccatagcgtctacagtgcctgtgatcgtatttcttttctgttccaaactgaccgctgttttattatccatatgctttgtcagcgtatccagttttattccaaatacaccaaatgattttgctatgacattttttcgtacatctacttttacaacaaccgtttcatccgtaaacgttcccaattccagcaatccgttgctgctttgagacggatacttactttgtaccaaacttccgtttacataaacatcaaaagagctgttaatgggttctaccaaattatttgacaactcatggaaacagtcaaaatatagtgtctgtgtgccttcaacaggaatggtatacagtaaataagacgcatcagatgacaattctttttgaatggtatgtaacccttcagaactttgatgatatacgatattgtccatagtaataggcgaataagtctctgttacatcatcggaagtgtgataaattgctttgaacagtgcattttgaatctcttccctggagccatccggaagttgagcataaccttccatatcttccgcggtgaatacagaaccaaaggtacttggcagttcattttttacgatagaatatttgctgttctgataaatgatttcctgttcatcggtgacatccgtattcagcacaatgtgatagcgatttccaagcaaactgtctgtcagcgcagtaccgccattggagtttacttccatccagtaggaagaatatcctaattttttcattgtaaacatgtacgattcattggtaaacgaagtatagtggcttaaagagttataccccagcgctcctaccatattgacatcaaaatactttttatccatctttacacgatataactcgttgtcgtcaatcttattttgcaaatctaaaaccgcttcatttgaaaaagtggatcttgacgcagaaccaaaataaatgctgccgcagaacatcacttccacaatagtcataagacaaagaaaaatacacatggtcagtttgcgcataagatttaaataatacagcaataaaacaaaaaagtaaaaaatggctgcggctaacgcaaataagacaaataatcctaatgctgcataagaaccgtgcaaggttttggtgtacacggtaagtgtatcccattgtttgaagattaacaaaaatccaactgcggacaccacaataattcctgcactgagactccctatcatgacagcatttttcttcacgctcattttttcaactgtattcttttgattaaagtcgtttagcatatccgcagcaataatcaatcctaaaaatacggtaatgtagccgtatcgtgcgggaaatgcctgataacttcctgtgtgccacatcttattgataggctctataaagatgggaagcagcgtcagtaaaaataagatacctataatatttaattttttctttttatactttttgcaaatgaaatacaaaggaacaatggtgattaaaatagccgtacatgtaataatcggtacagtagtatatacctctgaaataaaacttcctgaggataaactttcaataattccggttcccctgccggattgcaaatattgaagcaaagaaggcacccatacaatcccggtaatacaaaggacaatgagcgtagatactccgaataaacagatgacttttttccttcgttctttttctacacagaaccatgtatacaagccaattgctaaaattaaaaagatagccaccatataacataagtaaaaatgtatggtaatcattgcagttaaagcaatcatatacagcaatactttttctttttgtataatacggtccattcccaataacaagattgggaacatatacatcatatccagccaaaccacattttgaaaatacatcatggtatatccgcagaatgcatacatgacggataaagcaatattttgcaatacatgcagtgaggtaaatttatttcgaaagaacagacttgctgttcctgcacaaaccacaatttttataaataccagaatatttgcaaacaaataaatatcttttgtatctatgaacgctaccagtaaagaaaacggactggatacaaaaaataataaaattccccaaaaactggtgccgcctgcgttggccatatttaaaaataaatctgactggcccgacaatacattttttaagtccagcaacaaaggaactacctgttgattcatatcgcaccaggacaacgttcgttgtgcaaacggaaatagttgaaatatcgcaaagacaatcaaacataaagctccggaagcaacaggcggcaataaacattgccagtatttcttcatagattcacctcgacttataacgcaaaacaaagcctgccggcaagcaagctttgttttatcacagcttcttttatgacaacacaattttatggaatacttttttaccctttttcacaataatatagccgtctttaaagtcttccgccgtaaattgttctgtaggattggtgattttcacatcattgacagagatgccaccttgttctaccaaacggcggccttctttcttggaaggagctaaatttgctttcatgagcatatccagaatgcccaattggccgtctgcaaagtcggcagcagtgaaagtggtggacggcatattatctgtatttgcaccagaaccaaacaaagcacgggcaccttcttgtgctttttctgcttcttcctccccatgaattaactttgtaacttcatatgcaagtacttctttcacagcatttaattcactgccttctttttttgcatattcattgatttgttccattggcaagaaggttaggattttcaaacacttgataacatcagcgtcatctacatttctccaatattgatagaaatcaaacggactggttttttcaggattgagccaaacagcgcctttttctgtcttgcccatttttttaccttcacttgtggtcagcagtgtaaaggtcattccgtatacttctttttggtcggaacggcgtaccagttccacaccgcctatgatattgctccattggtcatctccgcctaattgcatgacacaattgtatctgcggtttaattccaaaaagtcatagctttgcataagcatatagtttagttcaaagaaagagagtcctctttccaaacgctgtttatagcattcaaaagacaacatgcggtttacagaaaaatgaacgccgacttcacgcaaaaattgaatataattcaagtccaaaagccaatctgcattgtttgccataattgcttttccatctgaaaaatcaatcaagcgtgacatttgcttttgaaaacaactgatattatgtgcaatctcttcttttgtcagcattttacgcatttcagtttttcctgatgggtcccccaccataccggttcctccgccaaacagcgcaattggagtatgtcccgctttttgcaagtgagacatgaccatgatttgcacaaaatggcctacatgcaaactatctgcggtagggtcaaaaccaatgtaaaatgttactttatcattgttcagcaattctttaattttttcttcgtttgttgtttgggcaattaatcctctttcctgtagttgatcaaaaactcccataataacctcctaaattacaatttatgacgtcttttgcagggatataaaaaagccccctgcaagttatgcagagggcgaatcaatcgcggtaccacctcagtttaccatactctcacaagcatggccttacaggtatgaaaacataccttagctgtaacgtgcagacacggcatgtccctactgatgataagttcaggacagcagctcaggaatgtatgttcaggttaccgctggatttgctcacaccaaccgcaaattctctgtaccggtaacagtaaccctacttttttccatcaacgctattaataaaatattataatgaaacagatttgcattgtcaagtcaaatggccgaacaaattgcttacgatttcagctgttttgcagaatcaatcatctcttgtgcattctgcagtaacagtggtgtgattgcctgaccgccaatcatacgagcaatttcttttatttgagcctccttgctcaatggtattacctgcgtataggttttattttctgtaacctgtttttgaatcagaagatgataatcggccaaacaagcaatttgtgccaaatgtgtaatacatatcacctgagcgtatctggaaacttcgtgcaattttaaacctaccttttgggctgcactgccgctgattcctgtatcgacttcatcaaaaatcat

SEQ ID NO: 4197 - DNA, 19169 bp, Unknown
  16S sequences of unknown bacteria
ggcgccagcgcaggttgattgctcatttctcggacggtacgccctcgttgctgccgaaatcatcggggaggtccttttgggcaaagccgctttcgggccggtcggccgagtcggagctgtcggagttttgcatattcggaggggtaaagccgccctgttcgcccgaattttgaaaatcgggaggagtcattttatccgaagagtcctccgatgccgagtcggcagagccgtcgggcgaaaagcttccgtcccgtccggagtcttgcccgttttcgggcgggttgggacggtcgttttgctcggttccgctttcgttttggggagcgtttttaccttcaccctgctgaccgtcaaaatccttgccgttgccgcggcccccgcccatgctctgactgtcgggcttgtaaagctcgccgtaattgcttccgtaattccgttcaagaaagctttcctctatgccctccaccgcaaggtaaagaccgaagtcctcgccgttaaccgttatataagcgtagctgcaaaggggagaagccaccccgaactcgcccatcacggtgtagcagagataatccttcatataggtgttgtcctgaataatgttgttgagacaaagcttgtcgaggccgtgataggtgttggtgctgtcataatgatcgaattcgattttaaagctgtaacggtcgttgccgtaattcgcaacgtttgttaaggaggtgttgcccttggccctgagccccacgttcttttcggcctcgccgtcgataacaacggtgcagagaacatattcctcgtcggtacagtcggcgataaagccgtcccaatcgtccatgacgatgtctatcgaatgaacctttgaattatcgaaaaggcgggtttcatatcccatggcccttgcgctcggcgtaataccgagtttttcgccgaagcaaaggcaaaccgtcagcagcagcgcgacacacaggacaaggcacacaattttgtcgaaatatttgctcgttgacatgattttaacccatataatcgccgttatagctgacgagagcggcgttttccactcccggcatttccgaaagcgcgtttacgaaatcggtgctttcgtcctttagccttatttcggcgttaagctcgattttaccctttgtcaccgtcttgcttttgacggcgaattttttgcagttttgttttatgaattcggccgccgccttttcgctgtcgccgccgtcgagagaaagcacgaggatataggggttgaaatgagatttgcggttgacaaaaacgataagcacaaggccgataaaaaggcttcccacaagagcgagaggaataagtcccgccgcaagcactattccagccgctatcgaccaaaaaagaaaggcgatgtcaaggggctcctttatggcggtgcggaaacggacgatggaaagggcgcccaccatgccgagggaaagcaccacgtttgaggtgacggcaagtattacgaccgaggttatcatggtcagagcgacgagagtcactccgaagccggaggaatacatgaccccctgataggttttcttgtaaacaaaaaagataaacagtcctatggcaaaggacagcagcagcgtgattcccatgtcgagcaggctcacgccggttatgttttcgagaaagcttgatttaaaaatatcgctgaatgtcattgtttcttctcctttaaaattttttttaatcatacattcggcaggcggcatattttgaaaaggccgactcccgcctgaagggcaaattaaccgcgtcgcggattatgtcaggcaaaaaaccgtcccatttgacctccagaattttcgggtcgtctctgaccggaacggtgggacagtcgggatttaaaagctcggtggatttaagtcccgtttccatgtcgtaatccaaggtaattcgcacgtttcccgggccgtagacaaaggctctgcgggtgtaatccacaagaaccttgggacaaagcccctgccgcatttttacaaaaagctcggcgcaaagggcttcctttcggtccttgagaaaaagatattctcccctgcttaaaagctcggcctcccgctcggtcagccgtaccgagcttttggcgcaaaggccgtttatttttgactttttttcaaggcagataaaatccctgctgttgttgtaaagccgtattcggaatttttcccgcctgttcactccgtccagcttttctctaagcgcagtgtcgaaggaatcgtcgaaatagaggcttcttatgcggtaaacgccgttttcgtaatggctgtcgcagcttgcaacggcgcccagtcttgcccttatgacaagggcgtcggtcgaatttatttcatgctttatttcgtgtcggaaattcatgtgctttctcctttctgtgcccacagtataacgactccgcctaaagcctgcctaaagaaaaaagcacaccgtgcaaaatttcgcatagtgtgcttttgagggcagttattaaagatgaatgatatttgtaaaaacgccgccgtcgcaaaggtcgataactccgtaggaatgttcccccgctctcgaaagggagccgggattcataaggtaaagcccgtcctcatatcttgtaaatccgatgtgggtgtggccgaaaagggcaatgtcggcgccctgttttctcgcctgctcctcatacctcgaaagcccggatttaacgccgaaaaggtgaccgtggcaggcgaggattttcttcccgcgaaattcgaggaaaaggctgtcgggaaagggcgcagaaaaatcgcagtttcccctgacgatgtgaaaatttttgtcggggaattccgaagaaagcctgtcgatctctcccgctccgtcgccgagaaaaatgacctcttttgcttccttttggtcgaaaagggcgtcccttgcggaatttaccgccccgtggcagtcggacattaccaaaatacgcatatctttttactccaaagcattattatttaaagggtgatatttatgaacggttacggcggaatgaagccgcggggagggcaaacgcccgatttcacaataggaaaaaccgaggccgacgcgctgacaaagcaggcggcaaagcaaatgggccgacctcaaagcgaaataaagcgcgccgtcgaaagcggcaatctttccgacattatgtcggggctgtctgacaaagacacaaagcggcttaacgaaatactttccgacgaaaaaaaacttaacgaactgctttcgtcaaaaaaggctcaggcgctgctgtcaaagctgcttaaatagcctcgcggtcattatatcaaaaataagttcccatggcaagtcccgcgaaagcaggtgagattttggacgatctgtcaacgctgctctcgggaattttaaattcccccgagggcatggaaaatctgaaaaacgcggcctcggcgctgcttaagggttcggaggaaaagaccgagccgccgcccgaggaggacggtctttcgccggcgcaaattgcaggaatggtcaaaatcgtgtcggcgataaaaaaccgcaaagaggacgatcggacaaagctgcttcttgcgctgcggccgcacctttcggaggaacggcgcaaaagacttgatgaggcggtcaaatttcttaaaatcgccgacgtcattcccatcataaagggggcggggattttttgagcacgggctattcaaaggaacagcttgaaaaaatgcagagagaggccgaaaagcgggtcatggaaatgcggcaaagatcaaaagcggcggccgaaagccccgattttcaaaagccgaaacccgtcgcaaaaacagtcggtcgccgtccttccgtctcccgatttttggagctgctcaacaccgacaaaatgatgtccgacccggacagccgccttgtgcttcttttgctcgcccttcttgcgggagagggcgccgaccccatgctgcttttttctcttttatacatcatactttagaatttgtttgacaaaccgctccttttggcatagaattgtcctgttaacggcaattaaggagaacggtttatgggatatatggaattttgcgccccctgcctttttgggcttgaaggggtgcttgcgaaggagcttcgggaaatttcggccgaaaatgtcagagccgaaaacggccgcgtgcttttttcgggggattataacacccttgcaagaagcaacatctgccttcgcacggccgagagagtgtgtattgtgctcggcagcttttacgccaaaacctttgacgcccttttcgagggcacaaagaggctgccttttgaacggtttatcggcaaaagcaacgccttccctgtggcgggatggtcgcttgattcaaagcttttcagcgtccgcgactgtcaaaaaatcatcaaaaaggcggcggtcacccgtctttcggaaaaatatcacataagctggtttgaggaaacggggcctgccgttcaaatcagattttccattctcaaggacagggtaacggttatgctggacacctcgggagagggactgcacaaaagaggctaccgcgcaaattcggcgggagctcccataaaggagacgcttgccgccgccatggtcatgctgtcgagaccctattccgattccacgctttacgaccccttctgcggctcgggaacaatcgcaatcgagggcgcccttatcgcctcaaacaccgctcccggtcttaaaaggcgctttgccgccgaaaactggggttcgataaaacccgttgtttttaaaaacgagcgggaggccgcaagagcaaaaataaaccgcgacatagaattcaaagccgttgcaagcgacattgacgagacggccgtcgccctcaccctcgaaaacgcgaaaaaagcgggggtgggagaattcgtctcggcggttcagagtgacatttcggattttgccccaaaaaccgaacggggcattgtcgtcacaaacccgccctacggcgaacgcctgctcgacatcgacgaggcgcggcgcatttacggagttatgggtaaggtctttgaaaaaaagcacggataccgctattcggtcataagccccgacgaaaaattcgaacagcttttcgggcgatctgccgacaaaaagcgcaagctttacaacggtatgctcaaatgcgatttgtatatgtattttaaatagacagcatactactgcttcttccgccgtccttgtgccgacggcgaacaagtcttttgcagggcggacgacggtaatgacggccgaagcccgaaatcggcacaaaaacagcatttcaacaatcattgctcccgagagagttttaaaagactctttcgggagttttttcgtcaaaagccttgtatcctcccgccaaacaacccgtttcgaaagtttttttaaaaaatttcttgaaaactattgacttttcaaaactactgtatatagcacagtagtgtaagaactaaaacaaccgtttgccgttttcacgatttgccgcagtgccctttcggaaaacagccctaaaaccacggaaaggccggtttcaaagcaagcggccgaaaaaaacaatcaaaatgccgaagaatttgcggtatcgggaactgcaaaaaaacttaagcaaaaacaatccctccgtcgcggctgcgccgcgccacctccctttacacaagggaggcttgaatgtacaaggcctattgctttttatttccaatgtggggaaatataaaatcggtttttatttggtttaggcgttttcaaaaaacacgaaaatatttttttgcttagtctcggcgaccttgtgaaaaatgaaaagaaatttttgcgtaccgtcggctcccttgtgtaaagactgaaatcgacctctccgcgaagtttaggctcccagatgtaaacgaccgcggttcggtattttcggctcccttgtgtaaagggagctgtcagcgcagctgactgagggattgtaagtttgcgaataagtctctgatttatcaatcgccgcagtttgagttgtttgcccgtaagtttatgttttatcttaatcaacggatacttaacgaaaggagtttcatatgaacagtcaatacaaaaaaggtgtgcttgacctttgcgtgctgtcgctgctgcacaggcgggactgctacggatatgaaatatccgactttttgtcgggtcacatcgacgtggccgacggaacggtctatcccctgctcagaaagctgaaaaacgagggtctgctgaccacctatcttcaggaggaaagcggcggtccgccccgtaaatactacaagctcaccgacctcggtcgggaaacctatcaaaacgacaaagccgaatatctgaaattcgccaaggcggtggaaactttattggaggatgaaaacaatgacaaagaatgaatttatgacaatactttcgggcgaacttaaaaagaaaaacattcccgacgctttagacataatcgatgaatatgaaaagcattttacctttaaaatgtccgacgggtattccgaagaggagattgccgcgagactcggcgaccccgccgcgcttgcctcccagctcggcgaaagcggcgccccgagggaaggcaaaacaaggtctttacggtaatcgggctgtgctttgccgacatattcgcaggactgtttttcatactgcttgccgcctttgagcttgttatggcggcggcgggaatttcctttgccggggtttgcgtcggccttttgggacggcttgacattttcggaattattccctctatgccctattactgcggcgtaattctcgcccttgcccttgccgctctcgccctgctcagctttgcgggctgcgtgtattacggagcctttttgcgccagcttgtccgcgcattttcacgctttcaaaagaacgccctcgcctcggcgtctggcggcgcccttctccccgctcttgccatagccccgcagttttcggccgccaaaaagcgccgccttcgcagcaccgcccttatcgcacttatacttttcgccgcccttttcgtgctgtcctatgttgtgtgtgccttttcggcgggaagccttgaattttggcacgcgtggaattggttttcccccggcctttaagccggcagaagccgttttaagcttatttcgaaaatttaacgctctccgttttgcctttttcaaaagggcggcggggagctttttgtttttggctttgaccgcgccgaaaagtgcgtcgggttccgccgctttgcacggtaaaaaacatttgcctttatttataatatgtgttataataaaatgaatttttgtatgtaaagggtgatcctgtgaatttggacgtgggaacacgggtcaagatgaagaaaaagcacccctgcacaggcgatattttccttatcacgaggacggggatggacgtaaaactcaaatgcgaaaaatgcggccgcgaaatcatgcttccccgtgccgccgccgaacgggcggtcaaaaaaattcttgagcaaaacaaggagtaattatgtttgaaaaacttttggaaatagaaaagcattttgacggcctttcggaacagcttcaggacccggacgtggtcagcaatcaggagaattatacaaagctgatgaaggaatacaaaaggctgacccccattgtcgataccttccgcgctcttaaaaaggctcaaagcgacgaaaacgacgcaaaggagctgcttgacagcggggacaaagagcttaaagagcttgccgaggaggagcttaaaacggcgaaggaacaaatcgagcagctgtcggagcagcttaaaatcctccttctccccaccgacccaaacgacgaccgcaacgttattgtggaaatccgcggcggagcgggaggggaagaggcggcgctttttgcgggaagtcttttccgtatgtattccatgtatgccgaaagcaagggctggaaaaccgaaataataaacgtaaacgaaaccgagcttggaggatacaaggaaatcagctttatgataaacggcgagggagcctattcccgccttaaattcgaaagcggcgtccatcgcgttcagcgggttcccgaaaccgagacccagggccgtattcacacctccaccgtcacggtggcggttcttcccgaggccgaggacgtggaaatcgacataaaccccgccgatcttcaaatcgacaccttccgttcgtcgggtgccggcggacagcacataaacaaaaccgaatcggccattcgcataacccaccttcccaccgggcttatcgtggaatgtcaggacgagcgcagccagcacaaaaaccgcgaaaaggccatgaaggttctgcgttcccgcctttttgaggcaaagcagcgggagcaggaaagcaaaattgccagcgagcgccgctcacaggtgggaaccggcgaccgctcggagcgcatacgcacctataattatcctcaaagccgcgtttccgaccaccgcataggactgaccctttatcatctcgagcagattttaaacggcgacctcgatcaggtcatcgacccgctcataaccgccgaccgagccgaaaagctcaaggcgggagagcagtaagaaaggaagaaatttatgcccaacaaaattatcgttgacgccttcggaggggacaacgcccctctcgccgccctcaagggagccgcccttgccgttaaggaatacggcgtcggcataatcctttgcggaaacgaggccgaaattcatcgggtcgccattcaaaacgacatttcccttgtgggaatggagatacttaacgcttcgcgggtgtttgatatgcacgccgagcccacctcggtgctcaaagaaaattccgacacctcccttgccgtgggacttcgcgcccttgccgagggaaagggcgacgcctttgtgtcggcgggaagcaccggcgccatagccgtcggaggcacctttataaccaaacgcatcaagggcgtaaagcgcccggcaatcgccaccatgatgccgacgccaaaatcgagatttcttcttgtggacgcgggcgcaaatgccgactgccgccccgaaatgctgctttccttcggagtcatgggctcaaaatacatggagctttccatgggagtgaaaaacccccgggtgggacttctcaacaacggaaccgaggacacgaagggcgacaagctccgtgtggagacctataagctgcttaaggagtccgggcttaattttgtgggaaacatcgaggcgagagacgtcatggccgacaaatgcgacgtgctcgtcaccgacggcttttcgggcaacatcgtgctcaaaatgtcggagggtgtggcgctttccttctacggcctcataaaacaggcctttgtcaagggaaccctttcaaagcttgcggcgcttatggtcaagaaaaatcttaaaagcatgaaaaagcttatggactattccgaagtcgggggagcgcctcttctcggtctgaaaaaaccggtcataaaggctcacggcagttccaacgagcgcgcctttaaaaacgcaataagacaggcaaacgcctttgcctcctcgggcgccgtggccgccatttcggaattttatcaaaacaggaaggctgatgacggcgatgaaaacgcttgaacagaaaataaactatacattcaaggacaaaaagctgcttgaaaacgccctgacccattcgtcctatgcccacgagacccgacaccccgaaatgtgcaacgaacggcttgaatttctcggggattcggtgctttcggtggtggtttcggactttctttacaagtcctttccaaagctcccggaaggaaagctgacgagaatccgagcctcggcggtttgtgaaaaggcgttgtccgagttttcgaggaagctgggactcggcgaacatctgctgctttcccacggggaggagcgcaccggcggacgcgaccgctcgagcattattgccgacgccttcgaggcgcttatcgccgcaatctatctcgacggcggaatggagcctgcgagagaatttgtgctttcctttgtggtgccctctctcgacaagcatctcggcgccgtggagaaggatttcaagacccatttgcaggaggtcattcagcataatcccgaggacaagctcatatatactcttgtgggcgaacagggtcccgaccacgacaagcggttcacggtcgaggtcagaataaattccaatcttgtgggaaccggcacgggccacagcaaaaaggacgccgaacaggccgccgccgaacaggccttaaagctcatgggcattataaaatgagcgcaaacatctcgattttcgtgccccattcgggctgtccccacaaatgcagcttttgcgatcaaaacgccataacgggaaagcacagtctgccctcggccgccgatgtgacggctaccgtcgaaaaggggcttgagtatataaatgacccgaagtcaaccgaaattgcctttttcggaggcagcttcaccgccatagacagggcatacatgaccgagctgcttgacgcggcctttccctttgtaaaaagcggaagggtgaaggggataagggtgtccacccgccccgacgccatagatgacgaaattctcgatgctttggagagccgcggcgtttgcgccgtcgagctcggagcccaaagtatggataatgacgttctcgaaaaaaacctgagagggcacacggccgagcaggtcgaaagcgcggcggagctgataaaatcccgcggctttgagttggggcttcagatgatgaccgggctttacgcaagtaacagggaaaaggacataaaaacggcgcaaaggcttgcctttctttgtcccgacacggtcagaatctaccccgcagtcacccttgaaaacaccctgctttgccgtctttacaaatcggggaaatattctcccccctcccttgacgaaacggtgtctttatgcgccgagctgcttgaatttttcgagcacaggggcattaaagtcataaagcttggtcttcacgcctcaaaagaggtggaaagctcctatgccgcggggccttatcaccccgccttcagggagctttgcgagggcaaaatatatcttaaaaaggccgttgccgccctcggagggcaaaagggggatttcaccctttatgtggcaaaaagcgaaatttcaaaaatgacggggcagtccaaatgcaatttaaaggaacttgaaaatctgggctgccgatgtaaaataaagccccgcgacggccttgaaaaatttcgggtcattgcggaaaaggagttgacggattgtttttaaaatctttggaagcacagggctttaagtcctttcccgacaaaacaactctcaaattcgaaaaaggaataaccggagtcgtcggccccaacggcagcggaaaaagcaacatttccgacgccatacgctgggtgctgggcgagcagtcgaacaaacagctcagaggagaaagatccgaggacgtggtttttaacggcaccgcctcccgccgccctcagggcatggcgcaggtcaccctctgtcttgacaacaccgaccgcgccttaaactgcgacagcgacgaggtctttataacccgccgttattatcgctcgggagagagcgaatacagaataaaccatgccgccgtccgccttaaggacatcaacgagctttttatggacacgggactcgggcgggacggctattccatgatcgggcagggaaaaatcagcgacattgtctcgaaaaaatccgacgaccgacgggaaatgtttgaagaggcggcgggaatttcccgtttccgctatcggaaaaccgaggccgaacgcaagctgtcggccaccgaggacaaccttgtacgcctccgcgacatcatgcaggagctgacccttcgagtggggcctctcgagcagcaatgcaaaaaggccaaacagtttctcgagctttcgggagagtgcaaggagcttgaggtggggctttggctcataaaccttgaaaaaatcaaggacagcctgcgaaatcaaaccagaaaaatcgacattgcccgcgccgactatgaaaaggcgagggaccgcatagacgacataatcgacctgcttgactcctccggctccaaaactcgtcttttaaccgttcagatggacgccttgcgccgcagcgtttccgaaagcgaggaggccgccgcccgaattgagggtcaaattgccgtctgccaaaacaacattttccacaacaccgaaaacataaaccgccttcgggacgaactttcgaccgatgtgcgggacgccgccctcgacagcgagcttgccgaaaagaccgccgagcttgaaaacaaggagcggcagataaaggaaggccgtctttctctcgaaaactccgccgcaaagcttgaggagctgcttaaaagtctcgggcagagcgagcaaaagctcgagtcggttcgttctcaaatcgccgtgctgggacaaagcatatccgaaacaagcattaaaagcgtgacagccatgtcctctctttcggaaatcgaaaatcggggcagcgccctcgaggacgggctttcggaacggcaggcgcttatttccgaggccgaagccgagaaaaaggcgctgggctgcgaccttgaaaactgcgacgccaaaataagcgagtgcgaaaacgccgaaaagggcgccgaaatgctgataaattcggcccgatcaaagcttgacggcatttccgacgaaatacaaaagctcaccctcgacgagggagaaatgctgcgccgcgcaaaaattctttccgacatggagcggtcgctcgacggctttaacaacaccgtcaaaacggtcatgcgcgaggccgaaaagggtcacatttccggcataaagggtccggtttcgcggcttgtttcggtggatgaaaaatattccgtcgcggtggaaacggcgctcggcggtgcgcttcaaaatatcgtcaccgaacgggaagccgacgcaaagcgcgccatttcctttttaaaacaaaaccgcatgggcagagccacatttctgcctcttgacaacataaagggaagaaagctttcggctccgggcatagactcctacccgggatttttgggagcggccgacagtcttgtttcctttgcgcccgaatacagggaaattttttcctatcttctcggaggcataggcattgcggaggatcttgacagcgccgccgccattgccaaaaaatacgggcacaaattccgcatagtcaccctcgacggacaggtcatgaacgcgggcggttcgctgaccggcggttccttcagccgttcggcggggctgctttcccgttcctccgaaatcgaaaagcttaaaaccaaagcggccgaaattcacaaaaagctcgccgaaaaggccgagcaaaagcaaaaactttcggccgagctgtcgtcacggctcgccgctcttgaaggggcaaaggccgaaaaagccaccgcaaacgaggacaaaatccgcgttctttccgagcttaagcgggttgagcaaaatcttcaaagcgaaaaggccgccctcgagcggctcaaatccgaacagctttcatccaaaagccgcatagccgagctgaaaaagtcggccggcgacgccgacgaggcgataaaatctctcaaggccgagcttgaagaaaagcaatccgagcttgacattcttgaaaaggactcggaagagctttcaaagcggcgggaaaagctgctcatggacaattcggccgttcgggtgaccgttctttcccttgaaaacgaggctgaaacggtcaaaatgagtatcgaatcggtcaaggcgagaaaaaacgacgccgcaaacgccaaaaccgccaccgaaaaccgcattgccgagcttttgaaggcaaacgaggaggaaaatctccaagccgaaaagcttcgttccgacattgccgagctgcgggacaaggctgcgtcggcaaaggagcgcaccgagcaaaagcttaaggaacgcaccgagcttgaggccgaaatttcaaagctcaccgccgaagaaagagacctttcggcgcaaaaggaacggctttcaagcgaggtcacaaggctcaccgagcggcgggacaacatgcaaaaggagcaggagacggtggtttccaagctctttgacaaatatgagctgacggtcagcgccgccgaggcgctcggcattgaaatagccgacattcccgccgccgacaaacgtctgcgggaaattcgcggcaaaatcaaggcgctcggcagcataaatcttgaagccatagacgaatatgccgaggtttccgagcgatatgaattcatgaaagctcagctttccgacgtggaaaacgcaaaatccgagcttgagcggctcatttccgagcttatcggcagtatgcagaccgcctttaacgaaaaattcacccttataaacaagaatttttcggccacatttgtggagcttttcggcggtggcacggctcatcttgtgctgtccgaccccgccgacgtgcttaattccggcatcgaaataaaggtccagcctcccggcaaaaacgtctccaccatagagcagctgtcgggcggcgaaaagtccattgtggcgctggcgatatactttgccatgatgaaggttgcgccgccgcccttctgtatgctcgacgaggtggaatcggcgcttgacgacgtcaacgtggacagatttgcaaactatatgcgaaaaatgtgcaacgacacccagtttatcgtggtgacccaccgccgcggaaccatggaggaagccgacgtgctttacggcgtcaccatgcaggaaaagggcgtttcaaaaattcttaaacttgaagggaaggaatacaaccgatgagttttttcagcaaaatagcacagggtcttaaaaagaccaaaaactctctttcctccgctctcgacggaatgctttcggtctttacaaaaatcgacgacgagcttttcgaggagcttgaggaaatactcataatgtctgacatttcggtcaacacctccgagaaaatctgcgacgaacttcgcaaaaaggtcaaggccgcgcgcaccgaaaaccccgaggacataaaggaaatgctcagggagatcatcaccgaaatgcttgccgacggtcagccggttaaaatcgacaccaagccgtcggtcatagtcatgatcggcgtaaacggcgccggcaaaaccaccaccatcggcaaaatggcgctgagatataaaaacgagggcaaaaaggtcattctcggcgccgccgacaccttccgcgccgccgccatagagcagcttgaggtgtgggcaaaccgcgccgatgttcccatgataaagcaaaaggagggctccgaccccgccgccgtggttttcgacaccatctcggccgcaaaggcgagagactgcgaccttattatctgcgacacggcgggccgacttcacaacaaaaagggactcatggacgagcttaacaagatttcccgcattatcgaccgcgagcttcccgacgccgaccgcgagacccttctcgtcatcgatgccaccaccggccaaaacgccatgaaccaagccaaggaattcgccgcggccgcgggcataaccggcattgtgctcaccaagctcgacggcacggcaaagggcggcatggtgctttccataaaagaggagctgggaattcccgtaaagcttgtgggcgtgggagagggtatagacgaccttattcccttctcggccgaggacttcgcaaagggaatcatataaaaaaagagaaggtctcccttctctttcctttctcttaaagccgcaaagcccgacaggcgttcggctttgattttatgacgcctcggagtttgaataaacctcccagccgtcggcatatcttttgaccttgatttttccgtcggtctttttgcggtcttttttgtcggcgtcgaaaatccacatttgtatcatgatgtaaagcaaaattactccgagcatttgtcatttcccctttcgcctctttaatataccggatcgactgtccctttaatgggatttagcttggttgcacttcattttcttcaatttaagtgtaccacaacatattgtatctgtcaatattatacgcacatcatgtgccgatattacattcaaattcaaaaaacagcacaaaaattttctttaatttatcaaaagtttaaacaatattcatctttacaaattaaaatagtattcggactattccgatttttggagggaacgcaatgatagaagtaaaaaacctgaccaaaaaatacgggaacttcgaggcggtcaaaaacgccgacttcaccataaacgacggtgaggtcgtgggcttcctcggacccaacggcgcaggtaaatctaccaccatgaacatcataaccggctacctttcggccacttccggctcggtttcggtcaacggttatgacattttcgagcagcccgaggaggccaaacggcacatcggctatctgcccgagcagccgccgcttttccccggcatgacggtggacgaatatctcaattttgtttatgatttgaaaaaaaccaagcttccgagaaatccccaccttgccgaaatccgcaagcttgtcaaaatcgaggacgttaaaaaccgcctcatacgcaatctttccaagggctaccgccagagggtgggtatcgcccaggctcttgtgggaaatcccgacgtgctcattctcgacgagcccactgtcggcctcgacccgtcgcagatcattgaaatcagagagcttattcacaagctcggaaagacccacaccgtcattctgagctcccacattctttcggaaattcaggcggtctgcaagcgcatcattataataaatcaaggcatcatcatcgccgacgacacccccgcaaatctttcggcacgcatttccgacagcctttgcatacgcctgtcggccatcggtcccgcaagagaaattctcgaccgtctctcgctcattcccggcatcggcaaaataaccgtcaccggcacctcgggcgaggctaccgattttaaaatcgagcccgacgtcaagaccgaccttacggtggaaatttcaaaggaaatgctcaaaaacggctggcccgtgacccgccttaacaccgacgccctctcgctcgaggacattttccttcgcatgataaacgagccccccgaaagccttatgaaggccttctcggagcacagaaccgtaaccgacaaggaggtcgcagaataatgaaagcaatatttaaaagagaattccgctcctacttcacctcccccatcgggtttgcggttctcgccatattttatataatttccggactgcttttcgcggtatattttgaggcgggccagcccgacctctcgggaattttctcaccggggctcttcctttgcgcccttatcatcatccccattctgaccatgcgccttttcagcgaggaacgccaccaaaaggccgaccagcttgtcatgacggcgccggtcaagataacctcggtggtgctgggcaagttttttgccgcctttgcggtttacgcgattgccgtggccatcacccttgtttatcagataatcatcacattttatgtaactcccgactggatggtctttttcggcaacttcatcggaattctcgttttcggcgccgcccttatcgccatgggaatgttcctttccaccctcaccgaggtgcaggttgtggtcgccgtggcgacctatgccgccgagctcggcctcgttcttattccgagctttgtcgtcaccttcctcgggcagatgtccaacacctttgcgaaatataccgtcaagatattcgagggaatgtccattctcgaccgtttttccaacttcacaaagggtaccctcaactattcggatattttcttctttctcagtctggccgccctcttcatctttttctgcataacggccatcgaccgcagacgctacgcctgataggagggacaaaacatgaaaacaaattccaaagcctttaaaagaggcggcatggcgatagtcaccgtgatcgccgcaattatcatcgcaattttgcttaacgtcatcgtcaccacaataaacgaccgtttccccttttcggtcgacctgaccgcaaacagcgactataccataaatctcgacggcgaatacgagcaatatgtcaaaaacgtttcaagcgacataaaggtcaccgtatgcgcccccgaggacgactttgaaggcagcacctatgtcaacgccatggttcagaactgcgggctcaacgtcagcagcgacgacgtcacaaccatgtacagcaaatatgcccgtcagacgctgcttttcgtcaaatccttccccgcaatcaacaacaaaatttcggtggaattccgcgaccccaactcggtcaccgatttttccgaaataaagaacaaatattccggcgacaacctcgcctacggcgacataatcgtctcctgcacccacaaaaccgaaagcggcgaggacaatgaacgctatcgcataatcaaaatgaccgacatcttctccaccgaggtcaaccagtcgctttacagccagcttgcaatgtacggctccacctattacaacaacctcaccggctccaatcttgccaccgagatgacctcggccatatacaccgtcacctccgaaagctcggtcgaaatagccgtgctcggcaaccacggagcccagaccgccaacggcgagaattccgaacttgcgggactcaaaagcctgctttccaaaaacaactacacatttaccgacatcgcaaacccgctcaccgacgaaattcccgaagacgctccctttgtgctgatttatcagcccaccgaggactataccgccgacgaaatcaccaagctttcaaacttccttataaacggcggaagctacggcaaaaacctcatttatgtcgcctcggcggctcagcccgagcttcccaatctcgagcaattcctgtcggaatggggcatcggcgttctcccgcttgtgggatatgacgagacaaactactattcctcccccagctatcttgtttctcagcccgccgacagcgactatacctcaaactatgatgcggcaagcaccgttatttaccccgacgtctaccgtcttgcccgccgcaccttcgagaccgaaagccgccgctacaccacacaaatcgtgacctcctatgacaccaccgtcggccgccccgtcgacgccgaccaaaattggaaggcggcagaggc

SEQ ID NO: 4198 - DNA, 32759 bp, Unknown
  16S sequences of unknown bacteria
ctcctgtagcgtaccactgggtgatttttgctccgcccagtgtacttactccgtatacttccagattctttccgcttactgcagaacgtatctcgtaatagccgtccgggatgacaacatctttttgttgagcagaattaagagtctgtttttcttgtgaatccacagtattttctacgttggaattcgtagaataagagtttacagcacgttcaaatgaaaagctttcattaggcatattataagacaattgtaatgtattttcagaagaaacaaccaccatttgatgattgtaggactttaaaaatactgtctcttcctctgtggataccaatgaccaatactgagtttcatcgtcattccaatcggaaaaaacagctgtattatcttgtgctgttaatactttttgagaactttgctgtacaattttatatttgtcttgttccaacttctcaaaacaaaatagctgttcatcagactcttgctcgtcagcaaatataaaggtttgtccaccattttgttctgagctaacaccagtcagtactttgttctgatatttaattttataaattccttcttcaaggtcgtatggataggtttgtacattatcagtagtattgtctgtactactttctgattcatttccatcttgaactgttgatacagacgatgaataagtgtcagcaaaaacagctgtaaacgatggtacacacaataaaactaccataaaaatcgctaaaaaaccagtaaattttttcattttcgcccctaactttcctaataatttatgtaaaattatattatcacaaactacaatgtaattgcaataaaacggaagaaatttcacattctttcatttagaaattttttcaaatattggaaacttgagtatttttccataaaaaaactctaacgttaaacgttagagttttttatttatgatttatctgtatatttcttattccgtaaaactaaagtgacaacaattactaaagaaacagccaatattgtaattaatataggtaccaatattagatatgttgtatcccctgtcggtacattatttatattttgattttgttccattggatgactgtcacttggtgtctccggaattaccgatggcacatattttcctatcgtaattgtttctgttgcttctttatttacgtgagtattgcttgcagttaccgtattcgttacagctttatccgaatcgctttcctgtacagtataaaggaagtcgagagtcactgtctctccgggctgtaatgtttgaatcatgaccgcagtccctgattgggaagacacttgcttgatattgttattcaaagaagctgcatcaagtgttatatttggcattacatccgctacttctaaatttgttaacggttcaacgcctaggttagaaactttaaccgtaaagcttacttgctcgccaacattataatgtttatcagctctgtcggctgttttggaaatacttacttgataggctctgaatacttctacatcaactgtattactggtaatttggtctacttttctattcgctctggtcatatcaatgcctgtatttgggtcgccatccagttctccttcaagcataaacgcatttggaattgtccattgagtgatgtcttcaggctgattatctacagcttttacatcaacttggaacgtataagacggaatcgtatcgtctgcctgtgcgggaagattactgatatccattgacaatacagtggtaccgtcctcttgcggtgtagcagtcataccctgaggcatattgacaacgcttaaacccttatccagaatatctgtaaaggttgtatctgctacatcaattccattactgttatagatagaaaatgtataagaaaatacctcttctgtttttactgtgtgctttgaaacatcttttttcaaagtaacatttggacgttttgcagtgatagtttgaacttcactttctgcagattcatattcggtaccgccttgaaccaatacaggccaaccaatagatgctttatgctccatttcccatgtatttactgtagggtcatcaaagttttggctgtaatagtccacagtggtttttaccaaaaatacttctttatctgtcagtatgtcaatatttaatgtaaggacgtctcttcctgtctcatcttttgtgacagtataaagtgatgtatctacaggagttccatctgcatatgtcaatccgctaaagcttacaccttttggcagtacatccgttattattacattttcaagagaatttgacgtactttgcccttgctctacaatggcagttagcttaaagacagcctcttgcccttgttgatagaattctttcggattttctacggtattggtaatagacgcaattggacttgtcacatatacattagtatttggagtaaccgtttccgctccatccattgaaacggttgcttggtttggaacagtccatgcattgttatcaacagtcaatcccgtttgtcctaacacttttacattaaattcaacatatgcctgtaccggtacatccggtcgattctccgctcttcccggaattgttagattcgttatctcaagagtgccgttgtttaacgtatatgaagtaatcggtgttacagtatctgtaccatcgttatttatcacatgcagctgcaacgtgccctcttggaattccaacaatctgtttatctggtctgtcaccttcagattttgtttttcagcggtattaaaattctgcataccaatacggtatgtaatcagttcaccaggatgatgttctgctttatcatctgctgtccaatcagtttgaccttctgccttatattcttttgaaatgacagtctgttgattgcgtacaacaggagcatttagctgtactgtttctccgctgtttacagtaacttcaaaagaagttgcctgtattttaccactgtcagggtcaaatgcttccgctgtttgaagatgtccaaagctgtcggaatccatttgagcattggtttcaaatgaaaaatgttcatccgttgttgttccatagaacgtaatacggtatgtacccggcattaatttgtaacggtcgaatacataaggagaatctattgaagttacctgacctaaatcaacaggtgcattgtttactttttcccatgtatcatttacttttttctccagtaccgcagtaacattgatataggttccaatgaggctgtcaatggaattatcccagagttggttctgattgtcgtcaaaccaagccaatgttcttacatgggcgtagttaataaaaccaatgttaatattaaaatctgtagcatccttgtcacctgtaacggcaaaaccatcggatttaccgtctatcgtaacattgtttgcaattgcattgggttctgtatgaaccggaactttggtttcaatatcataagtggttccgtcctgagtcgtttttccaaattcaacataatattgacctgccactacatcattaaattgataataaccattctcatctgttgtagcagttgcaacctcagcattgtcaaacaatccttttaaggttactgtaattccctccagaagccggtctgtattttcatcataaataccattgtagtccgcatcataaaatgcacggcctgtaatttgaaccggtttgtataaaccaaagttttggtcagatttttctccacctaaactcaaatccaaatgctcccgaatggctatttttgtatcatcttgcgtcacgatgttggtcggtgcagagaaatacgctctagtatcagaatcgcataccactaccgcataaccatcttgtggggacaagccttcaaatctgtaagaaccgtcattatttgttctgtaatgttggtcggcaggcaaattttctaagaaagctattttatcttgacttgcgtcaaaagcagttttgtcacttggttttaataaatatgcagtatatccgcttaaccttggttcaccgtcatttaatgtaccgttggtatctgtatcaaaccaaacataaccacttactactgccggagtatagatgcctaagtttgcaatataatcgcctgaagtaccggttgcaaacggaggcacaacgcctgttgtatttgcatggtttttatccgcagtggataccgggtcagtacttagttttacatcctccatatgattggtcacaatacgtccatccggcaaagtaaagataattttataattggtattgccgggtacattgtaaaatgcataggtaccatcactgcccgttgttgtgttattgataaaggtaccgtcttccttatataaagatgcttttacaccactgattttttggtcattggactgcatggtgccatcaatatccacatcattccaaacagtacctttcacattgactttaggtaacgctaagcctacatacagccaagcagttggtttatcagaatttaaggtaactgtttgattatactctcccaatttaccgttggcagcatccggagtgactgtactgtatcggtttgatgctgctatatcataaatatcataggtcttgggtatcgtatatttccaaggggtaccgtccggtaatgtgaatttaaccttatagtttccttcagataaaccgtctaccatataagttccgtcggcctgcacttgtgttctgccaacttcagcttgtgtatcttctgaaatcacagaaacagttaatccattttctccattataactttctgcagcatttttgataccatcgtcattatcgtcaatccaaacgcgtccttcaatgtggaagccatttgcgataattgcacctgcatctacatcggtacgtttggctgctgtttcattcgtacctaaatttactgcctcgccggtgcctgtaaaaatagttcctgaacagctgattgtatcaattgtactgtttagtgttgtattgtccggcttggattccgtgaaagaatatccgcttggcaatgtaaaacggactttataatttgtttttaagtccaaatcatggaagaaatacgttccatcagcacctgttagattatttgtaagcggactgccttgcgcatcaaccgctgcagcacccggaaccacttcgtaatttccaccgttttctttgagcagttctaccttaactcctgccaaaccaggctctgctctttgctgatatccgtctttattggtatccaaccaaaccttatcaccaatggtacctcttagtaaagatacgcctgcatcaatgttactgtaattggattcctcatacatggtaattggattagaatatccgaatgtatgtgacttaccgttaatagagctgttatcttttgcaaagaagttgctgtccttggttgcatctgttccctgcaatctcggagagaattggtatactccttgactctcatctgtaattaatgcattcgggtctacaattacataataggtaataccgcttgtagaagcagcaacaccttcaaaggaataactgccgtccgcctttgttacagtagaaccttttaaatagctgcccgaaatacttgtgctgctagtacttaaatatacaggaacattctccagaggcagctctcctgcatcttgcacaccattcttattcgcgtcgttccatacttttccgcttactgtatttgcacttaagcgtaaaccaactttattactttcaccttttacgtttacactggcctcttcacctctgtaagcataaaaacggtatccgtaactgttataagccgtggttcccgctgctgcctgtgctgcactggccggaacttttgctttaatggtaatggtcatagtagaattttgactgcctgtcatttgatatccgtccggtgctaccactctgatatacatatcaccttcctgatacgtatcgtgccagcctgtatcatctcccatccagtcaggagtatctaaagacgctttgctgctgtactggatttttgctccgcttacattggtagtaacatttgtaattgttgccaaagaccattggcttcctctcggacgctgactgtaagcaccggtatcatctacacccggtaaacggtcaattacacatacatcttcatatgtgtaagcattggtcaatgtatttttcagtgtcaacgtatatgtcacatccgcattatgctctgtaaatgcataattacgtccgctttgtacataagaggtagagccgttgacaacagatgtaacagatttttctgcagtaaaacctaaacctccaccaatatccacttctgcattggagttaacagcatctttaccgtcatattttactttaaatccattctgcacatctttctctgtaaaattctctgtgggcaacaaataagattcgtttgtcaccggaccatagtttacagggtcagcctccaccaacaggcgaatgcgcacagactgcccaggagcaaacgtaccttttacaggaatggttacttttgtaacatcatctacggtatctgtggataatccactaatatcataggaagaactgctgctttccgcagagataaacctccagccgtatggcaatacgtctacaacagttggatctaccatattagaagcttgatttttaccatctatattggttcccgccgtacttgcattggaaacagtaatatcatagtaaatttgtacacccggtgttaataccggctgattataagttgcgactttggttacacccggtttaatgccatcttgatataaataagtataaatgctgctgtaaatataataatcggtatccgggttacggtctaggtcattcgtatcgtttgcagcaccgcgattaccgtagtttgggttggaactccagtttacatttgtataaattctgtcgtattcactgcgattgataaatgcatacatataatttgtcacttgcagcgattttcctgtagcactttccatagcagaatctgtgatttttacattatactgcaattcgatggtagaacctgccggaagtacatacggctgtccttggtcatcggttaaggaaatatacattttatttccttcctgagtcacacttgcatttacagttgtattccctaccttagcagtaattgggtcagactgtgcgttgccattgacatcagtgtaaatgaatccttccggcaatacatcaaccaatgtatcaagcggcaggtcagcaccaccgttatagttgctcgaactgcttgaatttacatatgcacgatattttaccacatcaccggtgtgaaaataattattgtaaccataagatagaatttctttacggatacttgcagccaatgagctggaacgtacataaatggtacttgcattctgaatgattctttcttgtacatcgttatccaggtcgtagtctttatcatccacatttaagtttccgtttgtccctgctgttaaattggttacaccatcggcaaacacataacatgctccgctgtaacttgcataaccggaactatttaagtttcctgctacttgttctactgtaggagctgttgcggtatatgtaatttcgacaatatcacctgtattgacagtcagttcttcttctgtgccaaacatgtaaataccattgccctgagtcgtaccttgtacaggtgtataagttgtctgctcaccttttgcagatgtttttgtaatacttaccacatctttaaacgtaaaacctgtgggtaacaaagaagctaattttattttcatattctttgcataatctgctgttaattttatctttaaggttgcagtttcgttatcagttccggccggacggatagaacctgttgtatcactgcttccaccaaccactgttgtttgcaataagcttaattgtggttgttgaaccaccgtgcctccggctgttttaccgctggccaaatgtacattttgacttggggaattaccatgaggatgcttctctaatgtaaattcattttcaaaaccaagcggcgtatacacatgatagtcactattaggatataactgctgtaatgtttctacatcatatgtttttaattttaatttcaactcgacatatccgccaattggcacaccggaatctgttcccggttcaccctgatgggacgttgaatgcatatcagaacatatctcaaaattcagagcatttttcccgttgattttggtaccgtttacaacggtttggaatttgtccagctttttgcctgaagcatcataagcggtaaattcccatgcggaatctgtaccattggcagccaatgctgtatctgaaccgttaaagattctttccaaagccggaaataactgttcgccaccgttacccatgttttcaccaaacaattcctgtaattgcaaatgatacggagcaaatccaccggattgatatagtgtactgtctattggaacacgtatggtaaagtctacccagtctcccggataaatctttttaacaaacccttgtcggtcttgcaagtctgcattaccattctcaaaggtcttatatgtatccataaccggctcgggcaggttatcataaaaggtagaaacagcttcggaggtagcggatgttaatttatctccgccgccttctttatctgcatcaagacgtgtctcaattgtatgaaaagatacccaagaacgatttgccaaacgattatctcccagataatccgcatcttcgccgcctgctgaatcactttcttcttttaataccttgaatgtaaggtttatgccatctccggttgatggtttgacagtattggacagcgaataatatgttttgccgttataagatgtggttccgctactgtaactatacatatgaaaacggatacctacaatatcctccatggtataaccagaaggtaacgtcgatttaatctcattataagaaatagtctttctatatgaagaatacacgttgattctgggaagtgcatgtgtataatccgtttcaccttttaaacggtaataaggagttacataaatatcgccgctgctcatagcaggatattgtatcccctgcaattccattctttgatttgggtttttgctgcctgcttccgtctcccaatcatcatatacgttatattcgtaaattttgttattaccgatttcgcaaccccaattggaaatcttgaatgttagggtatcctcattggtaaccaatgttttatctacagatttggaaacttttaaagcactgccggcatccaaattttcctttttaaatataatatctctatgcacatcatttggatctatttcaaaaacagtttggtcactgtcgcgtccgtaaagttttgcactttccagcttccactctacatttttgatttcagaacctgcagccatagtaccaacatcaaataaattaggatacaaataatgaatctgtaaatagctgatttttccataactgctggttggtgtaattgtaatttttaaccgtacagaatccgttcttccatccacctgagaaatttgctctattgtcgtttctgtgcggaagtaagaattactgtcgttaaggctgtaataatcggtacggccatttacattaaaataacctttataattattgacattttccagatactggtcatccgtaatatttaaaagtccttccggaacttttaatgtaacatttaactcaattttgtccggatgaatgctgttagcgtcactatataaattattgtccagacgaaggccgaatccgcctttttctcctgcatcgtatgtattaaaattgccgtttggaacgacaatcgtattatttgtgcccgtattacttgtataaagcgtcgccggtttccaatcaaattttgtttcaattttgggaatattggttgaagtaacttttgaaatatctgttacatcatggtattcctctgaatcaggcgataaatctttttgaaggacttccacacgaattggtgtttctccacgtgaactggttgcgccttcaggccacaacaaaccaaatgtcatctcacggccaacagagtccaggccatcgctgtatatttcgggaattgttacatcaatatactgaaaacttttatttccggcgtcatctttgccaccttccaccggaataggtgtgctttctacttttgttgttaaatattgatagtctccaaccttaactgtaatattttggtcagcgggaacataaatgcgaactttcatgttctttaacactttacgttcactgatattgctcttataaaacaacttatagttgacttgctgaccgggtgttacttgatgataactggtaagctgcgtaacagaaaaatacaaatcaccgtcttgtacagcagattcaacatacggaccttgatccggattgttttttctgacaattgccatttttaaattcgagcctgcaaattgttctgtaatgtctatttctgatgcatcatccggtacagagggggttacttttacagaatcaaaagctactgtgattggagaagaattattgtcgcttaatccgcttacattaatatttttgggaataacagttgcatccacctgcgttacattttgtccgctttttgactttacggttaattctacttccagttttcctgaaccttttttagaaactgtataagtaatatcttggtcatccggagataagttagaagcaaacgctaaatctaccaattctgagccgggcattccagaaacaaattccaaacctgttccggtttgtattgaaaacttagtataaaacacttttgtattcaaatttccatttgccttatctgtagatttgaattgatattttaatgcttgggatgcttggccatgaaatacggattggtccgggtttgttacttcacactgaatattatccgcaacagcaacatattcccaattggtacttgctgttacttcaaatgtaatggtatctaatggacttaactctttttcaccttgatatagcttaccggtaatttgatattcccccggggctgtttgcttatccggcattttggcgctaaaactgagacttaacgctttatcaagattgttgtttgtaaaatcatcaaaatttaatgttagctctctggtggcctgatgataggagtacacgtctgcatcatgaggcaatgttgtaacctccataccttccggtaatgtgaacacatacttcacgttctgaattgcaaaatccggccaaacttcacttccttcttcagataaacctaaatcgtgaggttttactccgtttttcatttgaaagcttgccacataatctacaatttgacccgcagcaacgctatcttgtaccgacggtgtaagtaccatttcaaagtggtcggttttatccgttaaatctactgtggcaaccgcttctttattagcaggaggcgtatacaccgcctctggtattttcacagaataagctgcttcaaatgtttggcttttttcaccatttaccatggatacggcttttattgttgtatcttgataaatggtaattggtgccgaatatttggtactgaccgcactgggctcgcttccatcttccgtataataaataacggcttcaggattgctgcaagtaagtgtgacctgtgtacctgtttctacctcaccagctgcaacattcgcttggggtgtgggaattatattcccacccagactgtcaattgcagcaaaacttggcagttgtatggcagtcatggtcataataaaaaataacaccattgccacaacttgcttggaacgtacattcaattttttcatgaaattcccctttcttaaattagactcccttttggctcagatagattatcagatgtttccaatgaactgcatcctaactgccaatggcttgggatagcatacagttcataatttcattaaatatcatctaatcatctatgttcataaaagcatacttaatatataaccagactagttcggtttataatttaagtaatttactttatatgttatttttaagaataacatataaccaaaaaaatttccatatgttgtattaaaaatacaaaaatttgtatccaatgataactaaatgcaaaaagtattgcaaaatacattactcttgacacaaacataaaggttttgcttatagacttattatgcaatcatggtttatatacaaaaatttataaataaaaatacctaatgatggaataaggagtaaaaaatatatgcatactttaaaaagagtctcactttgaaagcgctttcaaaatattgataaaaataaaataaaaataagaatcattattgacatttccaaaatatgatgtataatatactcatacacaacaatataatacatttacaaaataaaggaggtctttatttatgaaacatttaattggtcataaagtagaagattttaaagtacaagcttaccatcaaggtgattttaaagaggttacattacaagatacaaaaggtcattggtctattttctttttctatccggcagactttacttttgtttgcccaacagaattaggcgatttggctgaccactacgaggaattcaaaaaagaaaactgtgaaatttattctgtatcaactgatactcacttcacacataaagcttgggcagaccactccgaaacaatcggaaaaattcaatttcctatgttaggagacccaacatgggcactatcaaaagattttggcgtgcttattaaagatgcaggtcaagctctacgcggaacttttattgtaaatcctgaaggtgaaattgtagcatatgaagtacatgacctaggaattggcagaaatgctgaagaactgcttcgtaaactacaagctgctcaattcgttgcagaacacggcgaccaagtttgcccagcaaaatggaaaccaggtagcaaaaccctaacaccaagcttagaccttgtgggtaaactataagttttcgctcatagtcagttactaagaaaacgctttggaaatgtcgccggcactgccgtcggcatttttttataggaggatgtatatgggaacaatttacgatttaattattatcggcagcggttctgcaggtctttcagcaggactatatgcaggacgcgcaatgctcaacactctaattatagaaaaaaaacaagttggcggacagattataaatactgctgaagttgtaaactatccaggtgtacgcaaaacttccggtccggaactaatggaagtgatgcatgcacaagccaaagattttggtgtatcatttgttacagatgaaattaaggaagtagacttttcaggtgaagtaaaacgtttgatttctgaaaagcaagaatatttatgccgagctgtaattattgcaacaggtgctcagccgcgtaagttaggttttccgggagaaaaagaatatacagggcggggtattgcatactgcgcaacttgtgacggagaattcttttccggtttggatatctttgtcatcggcggtggctatgcagcggcagaagaagcgatgtatttaacccgttacggaaagcatgtcaccatgattatccgtgaaccggactttacctgcgctaaaagtatcgctgataaagtaaaagagcatccggatattacaattcattatcatactgagattaaaaaagccgatggtgatgatttattaagagaagctactttcataaacaatcaaaccggagaagaatttacgtatactgcttctgaggaagaccaaacattcggtatttttgtatttgccggttatgaaccagctaccgctttatttaaaaatcacattgaattagatgattatggctatatccctaccgataacaatatgaacaccaatgttcacggagtgttcgcagcaggagacctccgtccaaaagcactgcgacaaattgtaaccgcagttgcagacggcgctattgcagcaaccgctgcagaacgctacgttgcagaagaaaaagaacgtcttggcatcaaagatgaagaaaaagtaataaaatcaaaatccactgaatccgcagccgcatctcctgcgccttcaaaaaccaacaccacaccatcggaagaagctgaagaatcattgtggccggctgaactgatagagcaagtacgaggtatattaaatgcattgaatcaagatgtaacattggttaccattgtaaattctcaaaatgagcattctctggagctaaaaaattggctggaagtacttccaactttaaattctcacattcatctaaattcctatgaagaaggtacaaacactgcggttgaagaacaaattggcgctgaccagctgccggttgtagcctttttagataaaaacggcgtatataccggtgtaaaattttatggaattcctggcggccatgaaatgaattcatttattttggcattgtataatttggccggtccgggacaagccattgatgataaaacattaaatcgcattaaagcaattgataaacctgtaaaattaaaagtatgtatttctctttcctgcaaattctgtcctgatgttgtagcggcatgtcagcgcattgcaatattgaatccccatgtagaggcttctatgatggatattgcattattccctcagctaaaaaaagaattcaaaattatgagtgttccggctgttatcaaaaataatgataaacttttatttggttctaaaacaatagatgaaattttagactttatcgaagaataaaaagaacagcttcgcgcattagcgtgaagctgttctttttatctttttaaaaacgttagcctgcatacagtatatacaattagtgtaatagcaaaacctattaaccatccgcctataatatctgtgatatagtgtactcctaagtacacacggctatatgctacgactaaaatgagtgcactcaaacacggaaccaatacgattttagccaatatactctttaaatatttgcataccaaaataatcagcataatatataaagctgagctgagcatagcgtgtgcacttggaaaactaaaacctgtttcctcaattagtctcaatacactcggtcttggtcttgaaaaaatgtgcttaaacattacgcttaaaccaatggcaacagctactgaaatagaggccggtatccccacctttttcctggtgccgggtataatcaataacaatacgcatattcctatgatgacaaaaacgtcccctgcatatgtaataattttgagaaattctgtcaacacaggggtaattgtttgagatacccaaccatacacccactcatcaaatccttgagttactcccagctggatgcaaatagcaagtgctgcaaatcctcctacggccagaagcacaaaaatactgcgacaaattacttttttcatgattcttccctatcttttagatcattttcatcatacaatatgatgcacattgaaatccattatacgcctgttttgcatttatggggtaatattttcatatattttatgaaaagtttacaaatacaaaatgattgacaagaattttatctttttatacgccctgtcttgtggaaaatgtaaaattatcatataatataagacatactaacataaagtgagtgtttttttaatgaaacatcttgatttaatcaccattatcatcggtgctctaacattgattttaggcattgcaggcattattatttctctgattttgagaagcgaatatatgattgtttctatttgcggctgtacctgtgctgtattgtgcggaggttttgccttattcagcggtattatggcaaaaaggaaaccataatatatgctaacatgctgcatcatttacatttttgtgaatagtaaattgaaataataatgaagggatattccaatttcgtattttagaatatccctatttctatttatatcacctttgtcaatatccgcttttcaagtgtatccggttaagagattgacaaagattcactttttcttttataaacaagaatctgcataatttgcagaaataagtagcaaattgattgtttttctacctggtattctgtaaaacatttttatatttcatcaattcttagaatacattttaaatgttttgttaaaaagcaaaaaaggcttccattgcaaggaagccctttttagatttaaaaatattattcagcttttttctttcttgcaaagaatacagtacctgtcatagcacctgctgccagtactgccacagcaatccacattacagtgttgctgttgtctcctgtttgaggtgagttcatttcttgctctgttgaaccatcaattgttcctgaagcacctggagtggttggttcagtaggttctgctggatttacaggagtttcctcttttttctccaatgctgcaattgcttcttcaattgcctgagccattgcgtctacttcagcttgttgtgtaatattttttcctctcacaactgcatttactgctgcatctacgcctgagaaatctttatattcatctctgtttagtgcgtttgctttggcaattgcttcatcaaccttagtataatccgcatcggtgatgctataaacttgtaatccgtttgctacagaaatatctacaaaccaaacggcatgacgtccttttgcaacatctaaagatgtaccaggaagtaaaatatcattggtggaagcaatttccacaccatctttcaaaatggagaaattaccaaataccattgtttcgccaggaatataagaatatttgaaagtatataaacctgcttctgtaagttgagctgagaaattagagtcaagacctgcacttactgaaataccatttgtattatctttccagaaatttactaagaattctgttaaataattatcgttcacatcatttagtgatgaggttaatgcaaatttttcacctgcagttaattgtgcagggtcaatataaacattcacttcatcaacaacagtaccattctctaacaaagtaccttttgtatttacatagggaccacagtgtgcattattctgatctaaaactgtatcgccttttaatacagctgatacatctgatactgtttcaacgctgccatatccatttccactaatccaatcacttggcaatagaataggcgcagcttgttctgttggagcaggagatggaacatttggagttccaattcttaaaccaccttcaacagaaatatcagaaaaccaaatatatcctcttgtaccacaatctgctgtttttgcattcatgttgatttcctgagtagaagcaacaactttgccattgtattcaatgataaattgagcatatacatctccggatttatcaaagtaacgatattttaatgtgtagataccagtttcttttaactcagctgtaaaggaggtatcaagtccaacgcttacttgtactgcgttattataatttttccaaaaattcgccaataactcggttttataagcaccgttagtatcattcatagacacagttaatgcaaatttttcagcaacattcatcgtgtttggattaataaatacatctacagattctactatttctccatctgccagacttgcagcatttgctttggtataaggaccgctgtgtgaattgtccgtatttaattcagaatcaccctgaaaagtatatgtaccgtcagaattaggtgttatacttccgtagccctgacctgttacccattcatctacttgtatggcgaaaacagctgtcggaattaagctgaataccatcactacagaaataatcatagcgattatttttttcttactcataaaaaatcctcctgttacttttctgcctattccctaattttgaataaaattctttgtaaaggtgtacttttttaaagaaaattaattatggacatattctttaaattataaatttatgaatattgaaaaagataaaatgatattatataattaacattatggaataatataaattctttgtaaaagtacacctttataaaaaaagccaagggaaaatcatatgattttcccttggcttttttatcttgattgttttcaatgatagtttttataactccagctatactgattgataatataaaatttttagaagctatctttatcaaatattgtgaatgaggtaaatttggtttattccatagcaatcatagccgcttttccatgtataaaatccagcaactgttcgggggagagttcgatttgtgttccaatctttcctccacttatgatgatagtcccccatttggtacaactctcatctattatagtttgatactgttttctcataccaataggagaacagccaccgcgaatgtatcctgttactttttgtatttctgaaacaggaatcatctccacagatttttcgcctaccgcttttgccgccgcttttaaatttaattccttcgcaacaggaattacaaatacataatattgtttactatgcccttgtgtcaccaatgttttaaaaacttgattgacattttgatgtaatttactcgcaacagacataccgtcaatcgctccgtctttactgtcataagtatgttctgcatatggaatatgcgctttatccagtatgcgcattacatttgttttttgctcctttgccactgctcattcctcttttccttttctttttgtataaatgcagaaatccaatacttctcctaatttaaatatatttttcgataaaacaccttataaacaaaccctgcacgactcatggtcgataacaaaaggttcggcatacaaacgtacaatattctattgcttaaatacagtacagcttatttcttcaatccccctgcccacaatgccattatcttaaaacagttctcctaatcaatatacaatctccgcagttttgctatatatgtcattttagacaaatacgccaattcttcctactgcttttccatttacttctatggcagacagtagattttggaaaatatcgcttttcagggattccaaaataaactcctatgcaccttttcgtgtatacggatatagcaatacatttcacggaaatacatctgtcaatattgcactatacttcttttggagcatataaagtcaaatcgggcacatctgatatcatctattttctcgaaataaactttctgatactccttttaaaacaaggttacaaatgaaagaatcgaaactcctcccaaaactgcaacgacaatccaagcttttatcttttgaaacattgtattttgatactctcccatgacatctttacgggaagtcagtaatgttaaaaataccaatattggcgtcatgagaatgccgcttatcacctgtaccaagatagctaaatgattcagcggtaaacccggtatcataactacaactgctgccgcaatgacacagccaaaatatacaccatagaatttaggagctttggtaatgctgtcatctaaacttttactccatccaaatgcttctgctaccgaccatgatgaagataacgaaactgtaattgccgccagcagacctgcatcaaatagtccaattccaaacagcattgcaggtacaaagccaaatttctcctgcaacgctcctattaactcggaaggacctgcattttcaatatcaggaatacatccaaataaagcggctcctattaatataataaacactgcaatgacaacttgcaagacacaaccgattacggtatccatttttccttttcgtaaatcttcttttttagaacccttattgatatacgcactgttttgataaaaaatcatccaaggtgcaattgcattacccaccaatgcaatcatgtaccatattacattgccatgttctccactgggaactgcccatgttataaatgaatttgcaattgcattccaatcaggttttgtcatgcaggcaatgataatgaacacaatgtttaaacagccaacacctactgctattttttctttggttgcatatccgcgaaataacgcaattgccaataccaatactaaccctattagcactgctgcccacataggcagcccaagaatgaccaaacctgcagacatgccaataaattctgtcatcaaagtgataaaattctctacgaccaaggaaagtaattggtatatcatccaaaactttccatacttttgttttaccaaagtattgtaactatcctctgccactacccctaatctcattgccatttcttgtaccgtataagtaatcaacaccataagcaatgtaagcggaataaacagtccaacaccaaatttggcgcctgttactgcataggaaatcaccccgcccgcatcattgtcggccaaagcggcaaccagtcccggtcccaataatcccagtaccatgaacaacgaacgtttgacagagtgcttttctccctgcaatttatgtttgcccatgacaccactcctaaaaatagttctaggatatcatacgcaaacgggataatttctgtgaggaataaaaaagccacagaaagtcaccaattaagtatcaatatatgattcataatctattcccaagtatatagctataagataaagcacactgacaaaacaaaaataaattttttcacatttctcagacttaaccgtttcgtttcatatataacagtggatacggatttccttgctcatcatagtcagttcttttatatgtacgaaagcccatatgctcataaaatccttttgcagatatattttgctcgttaacagtcagctcattaattgaataatgctttatcccgtattgcaataatcgcttccccaatccttttcctatatcttccgatgaaacaaataacatttcaagtttttgttgttccacacccataaaggcaataggaattttatgttcattctccgcaataattaaatgagagatatgttctaaggcttgcgggacatattttttgatttcctctatttcgctgtctgacaaaaacagatgtgttttcttcacagcgctctcccacacttgtaataactgttgtatcagcaatacaggtctttcagttacttcaaatatttgcatatttatttctcctcatatgaatctattttgggataattatagcataaatacgccttcaattttatatcaaaattaagtaaagtttccctcttcagaatacaaaaacagttctaaaaaagtcagcaaacatgccataaagtttacgtcatactgtaaaacaggtggtttcctctattgcaaatgaaaaaacggcttttttaaaaaagccgttttttatccgccaacttattcttcaattctccatttaatgccttgaggcgtatcttccaaaacaacatgtctggcttttaattcatctcgaattctgtcagcagtttcccaatctttttccgcacgggctttggtacgctgtgcaatgaaagcttctatttcctcatccaaagactgctcttttctactataaagcagacctaacacatctgccaaacggttaaacatatccagcgcatattgacatatttctttcgatggttttgaagaagcatttaaatgagtatttatatctttggccaagtcaaataatgctgaaatcgcatctgcagtattaaggtcatcgtccattgcctcaatgaaatgcgcttcatgacgattaaatttctcttttagtgctgattcgccttctttctttcctatttccgcattttctagtaagaaagtcaaattttcacggcaattatataaacggtccaaagcagctttacattgctcaataatttctgtactgtaattgattggactgcgataatgagaggccaccattaaataacgaatcggctcatatccatacttctctgctacatcgcgcaccgtaaagaaattattcaatgatttgctcatcttatgattatctacattgatataaccgttgtgcatccaataacgcgcgaaaatttttccgttacaacattcactttgtgcgatttcgttttcatgatgtgggaaaattaaatcttgaccaccacagtgaacatcaatggtttctcccaaataacggcgtgccattgcagaacattcaatgtgccagccgggacgtcccttactccaaggagcttcccagtacggctctccttctttggccgccttccaaaccgcaaaatccatggcgtcttctttcatttcacctacactgatgcgggcgccggattgcaaatcatccagaggctgatgtgacaatttaccatattcatcaaattttttggttctaaagtatacgtccccattttcagcaacgtaagcatatcctttttccaataaatcagcaataatatggataatttcatccatattttcagttgcaagcggatgcactgttgcatgacctacattgagtccatcagcgtctttccaatattcctcaatgtattttttggaaacagtaagataatccgtaccctcttcattggcttttttgatgattttatcatcaatatccgtaaagttctgtacaaacgttaccttatttccgcggtactccaggtagcggcgcagtacctcaaatacacaaatcggccgtgcatttccaatgtgaatataattgtaaacagttggtccgcaggcatatattttgaagtggccttcctcttgaggaatcaactcttctttctctctggttaaggtattgtatattctcatccaactcttcctctcatcttctgtcttcctatttcatcttatgctcattcttcttttgtatcaccggttttctcttctgttggagccggcaataatttttgctgtgttgctgcagcaagctgcttttttaaatcttctacttccagctttaatttagtatgctctacactcaggcggcacagctcctgcgctaccgggtcagaaacgtgaatttggtctaaattacaagttttaattccattgattcttacaattcgggcaggcacaccaaccgctgtagcattgtccggcacttcatccaacaccactgcaccggatgcgacacgtgctccgtcacctacacggaacggtcccaatacttttgcccctgaacctatcataacatcattgcccagcgttgggtgtcgtttcccgtggtccttgcctgtaccgcccagcgttacattttgataaatggtacagttatctccaatttcagctgtttctccaatgaccactcccataccatggtcaatgaatagtcctttgcctattttggcacccggatggatttcaattcctgttttatggcgtgaacgctgagaaatccagcgggcaataaacttcatattgtgtctgtaaaaccagttggccttgcggtaagaacgcacggctttaaaaccggaatacagcagatacacttctaatctggaacgggcagcagggtcgcgttccataatagaatccaaatcttcttttaactgtttaaacataattgcctccttctgccgtaatcaatgggcaaacattatatacaaaaataaaaaccgcctgcgtcccctgttacagggacggaggcggcataacagtcgcggttccactccgttttatcactctcagggccgataacggtgccaaccgtacaaagatactcccacaagattagcggtttccccttatctgcatgcaaaataccttgtattttgccaaataggtgcatttcttgtctgttcaacattaagaatgctttcagcctatggacattctctctctgcaacggaagcaaacagtacttctcctatttattacatttgattactctctattatattacaaagctaataaaaatgcactactttattttgaatttttaaacaaattccagttttgttttaaataaattgcacctgaaataatggtaaataaagtagaaatacctactaaaacgtttcccgcaaaccagaataccgtactgctggaaaattggccaacagtgaaacttggcataactgacaagttaatcagttcctgtagatactgcatgattaaaatacctacaattgcaaccatttggctgacagtttttgctttaccccaaatatttgcggcaatgacctctcccgtattaactgcaatcaaacgaatcgaagtcaccataaattcacgcgcaatgataattaggacaaaccaaagctctgcaagacctaaattcacaaaacacaccaatgcggatatgaccaatattttgtctgcaagcgggtctaaaaacttaccaaaattcgtgaccaaatttctttttctggctatttttccgtccaataaatcagtaaaggaagccaaagcgaaaataagccctgcaattaaaaagtggtgaggaattgtaacgtttaccagaaacactacaaaaaacggcaccataataatacgagctaccgtcagtttatttggtaaattcatgaggtatgccctccttccaccagttcccccatcaggtcacaattgatgcaatctgtgatatgtacatgaacaaaatcacccggagttggtaatgtattcaccgccgtaaataatactttgccgtcaatatccggggaatctgcatagcttctgccgtaataacagccggaatactcatcatatccttctaccaatatttccataacggttccgatacgctgctgtcccaattgctgcataatatccatttgttcttccatcatgatttgtgcacgatgctgttttacatcttcgtcaatttgattcggcatcaacgcggcaggcgtgtcttcttcctgcgaataggcaaaacatcccatacggtcaaaacggatattacgggagaattctgccatttggttaaattcttcttccgtctctcccggaaatcctgcaataaaggtagtgcgaatgaccatattgggaattctgtcacgcattttttgaattaacgctgtcagactttctgtatcttcaccgcggttcatctcacttaatacacgtccaacagaatgttgcagaggaaggtcgatatacttcaaaattttatcttccgttgctattacatctattaattcatccgtaatacggttgggataacaatacaataaacgaatccaatgagcaccttcaattttgcataaacggcacagtaattcaggaagcatcagctttccgtaaatatcctctccgtagcgtgtggtgtcttgtgcaatcacaatgagctcttttacaccgtttgcaaccagttgttctgcttctgctacaatgtcttccatggtacggcttctaaatctgccgcgtatcagcggaatggcacagtaagtgcagcaattatcacaaccgtctgatatttttaaataggcataaaattttggtgtagaaagtacacgctcacctgacaaggacaaatcatatttggaggcaaataactcttttttatgtccttccagtgcttctttcaatgccagtgcaatatctttattagcaccaattccaagcaccgcatctacttctggcaattctttgcggatttctgtttggtatctttccgctaaacagcctgttactacaattgcctttagtttgcctgcttcttttctgcgtgcaagctgcaaaatttcgtcaatggattctttttttgcactttcaataaaaccgcaagtatttacaatcactgcgtcggcctcttcttcagaattgcagagcgtatatcctgcctgctgaacggttgccagcagcatttctccatctacttgatttttagaacagccgaggctgaccattcccactttatatgacataaagacacctttccttactgaatttgtctgaattattattatacgtcactgctgttccatttgcaatgcctgtatctaagaatcattcatagtaaatatcttcatcgccctcgcagaaaaaacatgaaattgcctgtttgatatcctcataacgataacccagtctttgcagtccgtttacagtgcgtcgatatcctttttcatcctgcaaacaacgtaaatattttttttcaatgatttcctttatcttttctaccggattcggctccagttcttccactacttgcgcaatgatttccttatcaatgcctttttgcagcaattcatactgcgcacgtcggccggaaaatccttttctgttgaataattctgcagcatatcgtttggcaaattcttcatcattgaccagccccaactcctccatgcggtcagcagccgaccgagcagcttctttgctggtggtacgctggattttttctatcaattcttttttggaatggctgcggtgctccaacaaatacagtgctttttcatttgcacgacgggcatcggaagccaaaatcaactcatgcagctgctcatccgtaatatccataccaattttataacggaactgcagcaatgtttccgtgtcaatgttcactgcaaattctccgtccaaaaataacgcggataacattttacgtcttttttctatcgccgttatgagcatatcttttctcctcttttataaaacggaaaataaggcgaacaaatcgttcgccttatgggtataccgcttaatcgtctacggtaatatcaatatttgccttagatgcaattctggtagtaggagtttcaggcttttccggttctgttactaccggctttgcaactgcttttgcagcccccctggtagattttgcatacagtttgccaacatttgcttttacttcttcttcgattttgtcgtaaatctctttatttgcaagcaagaactcttttacattatcacggccttgtcccaaacgggtctctccataagaaaaccaagatccgcctttttgaactacatccagtttaactgccaagtcaagcagttctccctcgcgggaaataccgcgtccgtacatcacgtcaaattctgcttcacggaaaggaggagccactttatttttcactacttttgctctggtacgggaaccgatttgttccgtaccgttttttaaggtttcagttctgcgaatatcaatacgaacagaggagtagaatttcagtgcacgtccgcccggggtaacttccggacttccataaattacgcccactttttcacgcagctgattgataaaaatagcaacacagttggattttgaaatagcgcctgccaacttacgcaaagcttgagacatcaaacgcgcttgcaaaccaacatgggaatctcccatttcaccttcaatttctgctcttggaaccaaagctgcaacggagtcaactacaatcacatcaattgcgccggaacgtaccaaagcttctgtaatttccaaagcctgctcacctgtgtcaggctgagaaaccaacagtgcatccacatcaacgcccaatgcacgtgcataaaccgggtcaagagcatgctccacgtcgatgaatgcagccgtaccgccgtttttctgtccttccgcaatacagtgcagtgccaaagtagttttaccggaagattcaggtccgtatatttctacaattctgcccctcggcaaaccgccgatgccaagggcaaggtctaaagacagagagcctgtcggaattgcttctacctgcaaggcatcttcttgaccaagacgcataacggcaccttttccgaattgtttttcaatttgtgccagtgcagtatccagcgctttgcttttatctataacagccataatttcctccatatttgtatcagtatgtgtcttattatagtacatgttttcgctaaaatcaatggatttcacaaattttccaaacaaatgtttggttttattttttgattcctgcaactactcgaatgatattaccgctgtctttttcaaactgtatttgttctacacctgcatcggcaaacagacgagcaaccgctgtttcctgcccctcaccaatctctactgcaacgataccgcctgtttttattttaggaatccaaatatccgcaattgcacggtaaaacagcaagccgtcttcaccgccatccaatgcggttgttggttctttttgcacttcttcctgcaatgtcggcaagactgccgtttcaatatacggaggattggacacaatcgtatctatatcttgaaaagcagaggcaaatgcttcggacaaaatatctccctgcaaagcaactacattttcaatcccctgttctttacacaacgcaatgttttgttgtaaatatgcaaaagcaggtgcatatttttccacacaagtgacatgtgctgtggaaagtaaggaggctattcccaagcccacagcacctgtacccgcacataaatctaaaattgttgcttgttttgtttgtattaattttgctgctgtttctaccaacacagtagtatcttcccgggcaattaatacgccttcccccatttttaaatgaaaatcgagaaacggccactctccaagaatatactgtaagggtcgtttttttgcccgttgctctatcaaagaaaaaaattctgtttcctgttccaaagtcgcctgttttgtattgccgtgcagcatgaggtcctgccgattcatatgaaacacatgctcaaacaggcatatagcatcaaaggcagggctttcattccctgccttttgtaaacgctgtttgccttccaaataaattacttgcagcgtccgcatataatatcttctccattctcaggaatcacatctttcattgctgcaattgcaacttcaatcatgccgtcatccggttcttttacagtaatacgctgcatccacaaacctggagccgcaacgatacgtgtaataatattgtcatatttagagcagattttaatcaattcaaaaccaatggatacggaaacaggaagcagtaataatttagctgatgttctcaaaaacggattttcaaatggaatgaaaaagcctactacaatacctactatcagcatcagcaccaaaaaactggtaccgcagcgcggatggaaacgactgtgtttgcggacattttcaacggttaactcttctttattttcatagcagaagatggttttatgctcagcgccatggtattgaaacactcgtttgactgaaggaatcaaagagcagataccaatataagcaataaaaatcagtatacgaattacaccttcaaaagtagagcgccaaggcaaaaagccatcgccgattcctgtataattataaatcaaattaaaacttagtgccggcaaaaagaaaaataacccgattgcaattaatacacctaaagttcctgctattaccataaggtaattcattgcattttctccaaacacacgggtcatccattggtcaaattttgaaggttctgcttcctcttcatcttcaggcagagatttgtccgcagacatacccaaagctttaaacccaatggtcatagactcgtacattgcaataacgcctctgataaaaggccaattgagccatttatatctttcacgaagagatttgatttttaactcttccacatcaattgtttcgtcaggaagccgaactgccaccgaagtctttttcggccccctcatcataacaccttccattaaagcttggccaccgatggaggtaatcatttttgtttgttctcttgccatattcaattgttattcctttcttcaacctctctgttactttgattttcattatcgtccaacgtatcatctatctgctttgcatcgataatatgttgttcttgtgattctattggtaattcctgttgtacttcttgcatatctttattgtcaaattgttgcattgcaggaatacgaatggtaacagctgtacccaagttttcctgactttccacttctaaagtgccattatgcaaggtgataatttcatctgccaaagccaaaccaataccgcttccgcgcactacatgatttgctttataaaatttcttctttatatttggcaaatgctcgataggaatgccacagcctgtatctacaatctgcactttaataaaaccatcttcttcacaagctgatacactaacagtaccctgttcatccgtatatttcaaggcattatcaataatgtttacaaaaacttgacgtaaacggttaatatctcccagaacaggagataacattgcaggttcttcgtacagtaaaaacttatgctctgcttttgcacggtcactgaacatataaacggcttcgccgagttctgccagaatatcaatacgatccatcatcagcgtcattctgccactttgcattctagagaaatccaataattcttctacaattccggaaagacgctcggactcacgaataataacgcccatacctttatcaaaggtaccgcggtcaatttctccgctctgcatcgtttctgcccagcctttaatagctgtcaggggagtacgcagttcatgagaaacggatgaaataaaatcatttttcatttgctgagagttccctaattctacagccatttcattaatcgtatcgcacagctcaccaatttcatcgttgtgctttttctgtatacgggcatcaaaatcaccttgggcaattcgttttgccgtactgttgatttcacgcacaggatttaaaatagattttacaaaataagtgctggaaatgcagacaaacagaataatcaaaacacctattcccgttaaagttgccacaatggctaaaatttgacggtctgcattttctaatgataccacataacgtactccccctacaaccataccgtcattatttcttagtacacgggtaaccgccatcactctctcgcctgaagaaagctttcctttccagctgccataaccttcggcgtcctgcaaagctgcataataatcattcataggctgattttggtccggagtaaaacctgtagaagtgagtacaattttaccatcactgttaataaccatcagctccatactttctttgctggtaaagttttctacataggtatatgcaaaggatgtaaaatctgaagatgttttatttttataatcaataaacacgttggttaattctctggaattggcatttagcgcttgtaaaataccgttataggtataattctgcactgcaaaagatagtgatacgattaaaacgaccaataccaatactacaattcctaaaacgttaaataaccagcgccgtgtgataccttttatccacaaggcgatatattctccccttttctaaatgataaagcagcaaagcatcttatgcttcccacttatatcccagtccccaaacggttacaatatgttttgggttagacggttcatcttccactttcattctcaaacggcgaatattcacatctacaattttttcttcaccaaaataactttctccccacacatgtttcaaaatatccgttctgtcaagtgcggtggcagggttggagaaaaaatattccataatctgaaattctacttgggtcaattcaataggctgtccgcgtttgagcaggtatctgttgcgtaaatttaaagaaaattcaccggaatgaatttcttccttaaaattattttccgttcgcatctccgccagtgctactctacggtaaatagcatcgacacgtgctaccaattcggacggactgaatggttttgtcatatagtcgtccgcgcccatcattaaaccactgactttgtccatctcctgtgtttttgcagttaacagaataataccaatggttccgcttctttttctcagctctttacatactgcaagaccatcatattttcccggcatcataatatccagtacggcaacatcaaaatcgccgccttcccgttcgtaaatttccagtgcctgctctccgttttctgcttcatatgcttcatatcctgcacgttttaagttaatgacaacaaattcacgaataacttgttcgtcttcacatactagaattttcttcatgtgttattcctcctgaattaaaataggacaattaatttggtgaaaataatctaaaataatattccacctgctccatagtcaatgacagtttggaatttgcactttccaattttgctgcaaacaccatattttcatgctgctttaatttatacagttccgtattttcagactgattcttccactcatcttctgtcattacttgtatggttaacaatgcactccctttcacgccgctgtcagctcctgccgtatcaggaatccattcataaaaagttaacgctctgttttcttcgctccactcggttgtaatgacatctttccatgcatccggtatcatgaacatataaccgtctttgctgttgacaactgtactcaataaattggtaaatgtatttgtgctgacatcatagcgatgccaatttacaatataagccgtatcgctgatattatctgaagaaattcccggtaaaatatgtgtaatcggaatttctatcatggaatccccgttaatatcctgagatggaatagaggtgtttcgttccgtatataatacagttttatcctcgggtctgtacaaaggattctttaatttatagtcattgcggtcccaatataaaatttctgtttggtacgtacgtgcacttttcataccgtcaaggatgataccataatcattggcacttatttttcctacagttactttattgtattttgttacatccgagtccagtttagctgtacctaacaaactgatacttccgtttgaaattgtaaataattttgcagtggaagggctttcttttgtttgcaaacgaatggttaaaataccgttttttccactttcaaactctactacagcaagttcattgtacaattcttttgttggaacctctttgattgtttcatcttta

SEQ ID NO: 4199 - DNA, 6483 bp, Unknown
  16S sequences of unknown bacteria
atgttcagccagctcgtgacagtgctcctccttgcagtccaggatacgcaggggattgcgctccagacggtcctgacaggtggggcacagctcatcatagtgagcggagtagtagtccttgagtgcctgctggaacttgggacggcagttgggacagccgatggagttgatgaacagacggatctcagtcactcccagggtatccagtgcctcctgtaccaggccgatgacttccgcatcagcagccgagctctgggcgcccagcagctccacgccgaactgatggaattcccggtagcgtccggcctgtgccttctcataccggaaacagggggtgatgtagctgagcttcagcggcagggcttctgccagcagaccccgttccagagccgcacgcactgcgccagcggtgccctcgggcttcagggtgatggagcgtcccttcttatcctcaaaggtatacatttccttctggaccacatcggtggtatcgcctaccgaacggacaaacagttcggtatgctcaaaggtgggggtgcggatctcgccgaagccatgcagaccggcgatgcgcatcagtgtatcttcgatataccgcatccgggcgctctggtccggggtgaaatcctgtgtgccccggggcgccttggtaatcagtgccatagtatttccgacttcccttcctctttggtttgatcgtaggtttgatatgaaaaaactccgtcccctggcttcccggttggttccggaaaacgcaagggacggagaaaattccgtggtgccacccttgttgaaccggctgtgcggacacagttccggttccactcgagaaatccccttaacgcggggaggattcgggccggtttcgtccctgggacgcaccagccggctgatcgggtgtccttcctcccgggtcagatcgcagaccgctttcagccgcggcggtccttctctggtgcggagcccggggatactgctcccgttttaacgcctttatgatattatatcagattctgccgtgcctgtgtagggccctcagcggagattttccgctgaggaagctcatctgctggggttgacaatgtcacgccagtccaggtcaccacgctccagcgcatggatcagagcttcggctgtggcgatgttggttgccacgggaatattgtggacatcgcacagacgcagcagatccgcaccattcttttccgcgggacggggtgtaatggggtcccggaagaaaagcagcaggtcgatctcattgcaggcaatccgggaagcgatctgctgatcgccgccatgggtgccgctcaggaaccggaagatctccaggccagtggcctcagacaccatcttgccggtggtaccggtggcgcagaggttgtgatgagaaagaatgccgctgtacgcaatacagaactgtaccatcagttcttttttggaatcatgagccatcagggcaatattcatcttctctcagcctcctgtcaaatacttcacccgaaacagtacaaatacatttttgccgtttcaggggattttttctcataattcattttatcatagaaaaatgcaatgcacaatagatttttccaaacaaaagacaaatccggcgctttttccaagggaaaatccgccggactgtccaaaagcaacgaaaccttctgaatccctgttttatgggatcattcagccggttccggttttctgcatacagaaaaacacgaaaaagccgttagatattttacaacctttttcctggtctgtcaatctttttctgtcacgggagcagagtgcccgactgctggggctcctgggctgtgacatccgaagagaagtaggcatccagaatatcccgggccaccggggcgccggtataaccatgccagccctgttcgatcaccacgctgatggcgatctgcgggtcatctgccggtgcgaaacagataaaggtggagttgggcaggtcagccgtttccggggtaccggtcttggaggccacatccaccgggtaattgccgaagtaggtagcagcggtaccggtccgggacgctgccaccatgccctcaaagatgggatcaaacagcgacgggtccactgtggactcctgcagcacttcggtttcgtgctcatacagggtatcggacatgctgtaatccttgatgctcttgagaatggtcacccggttctgggtgccccggttggcaatgttcatgcagtacactgccagctgcaggggggtgtacttgttgaagcgctgtccgatggaggactggagcacatcaccatagtaccagttctctcccgcggcctcagcggcctcgggcgacgagatggtgccggggttggtccacagctcaaagccgttgtccacgcccaggcccagcatcttggcagactccacaatggcgtcgatgcccacccggcgtccggtatcatagaagaagatgttgcaggagtatttgagggcgtccatgacggtgatgtcgccatgatagcccagacaggtgggagtaaacgcctgggaaccatagaccgaggtgtaataggtatacacatggctgcagttcacaatgctttcggaggtgatctccccgctcatcaggccagccagtgccaccaccggcttgaagatggaaccgggggtgtaggtatccagcagcgcccggttgcgcaggggcttgtccgggtcggcattgagttcggcatagtcctccgagagggtgttggggtcatagctgggatagctcgccagcaccagcacctcgccggtcttgacatcgatggcacagaccgcacccgcattggcttccttaccctgtccggccggagcggtttcattgaggtagtggatctgatcctccagcgactgctcggcgatcttctgcagacggctgtccagggtgagcatgacggtattgcccgcctgaggctccaccgaaatggtggaatcggtcacttcgccgttctcattgacatagaccagccgttcgccgtcctcaccgctcagctcctcctcatagagcttttccagcccgtcctgaccgatgatgtcgtccagctcatattcgatgccgttctcctcgaactcctggatgttcgcctcggtgagcggccccacatgtccgaggatatgggctgccatactgccgcccggatagctccgggccgagccctgctccaccgatacgcccggcgaggcaatgctgcgctccgagatgatggtggcagtgcgggtggagatgtcctcggcaaaggtataggggctggaaaggctgaagcccttgcgctccatggtatacagcacgccagccagccggcgctgttcctgctgggtatagatgcgttccgggtccaccagctcgccgtcttcattcttcacctgggcattgtccaggccgaagcgctccagcagccagtgcatgacctcctcggcatcggcatagtcgttgaccccggcaaacttcttgagcgccgcgatctccgaatcagtgccgtcaaaggtatagggctgagtatccgaaaccggcagttcatcgatccactcctccccgctctgctccagcagctgcatcagcgagagaatgatctcattctgggtctcggcgggcaggaaggccttgtccagtacaatattcatgctcacccggttggtgacaatgggattgccgtaccggtcggtgatctcaccccgggccgcttccacggtctgggtcttgatggtgcccttgtagatctggctttcgtattcatcgccctggatcagctgcatctgcagcatccgtccgatgaaaaataccagcaccagtccaaaggccagtaccaggatattatcccgttttttcagaaatgcaggcatagggtctcctctctcagatctcctcggtgcggcggctgaaatagtcgaacagcttccgctccccgaagtagaacagcggcatcacaaggcaggtatacagcacccgcggtgtgagctggaacagcagtacctgccagttgcccgcaaagccatacagcaggtaataaaagatgtattcgatcagcgccatgcctccggtatacaccaggcagcagagcactgccgttttccggtcatttttcatcaggtagatgagtgccagacccaccgctgctccgtacaggaacagggtgagggtatagaacccataaaaagtattggcgcccatatcacagagcatgccgcccagcgccccatacagcgccccggtgaactccccctcctgcatggcgatggcaatcaccgccgggatcaccagaaagggcttgacgccaaagatccgcagaaaacccggggtggtctgcagcacatagcagaagatcagcccgaagcagtagatcagatgtttgccggcaatcagtgcccgtttgcgtcccatgggtctttcctttccccggcccagccggaattattcaaaaacctgttccccctggccttcaaaggaggtgatcaccagaacatccttgaccgtttcaatatcgctgagcgggtcgatgaccgcatacatgctcatgccgctggaatcggtatggatctcggtgacctcgccgatggcaagatccttggggtacagtccgccgtaaccggtggtatagatgaggtcgccctggctgaccgtacagtccttgggcagcatattgagccggagctgtccgttccgggccagggtaatatcgcccgaggtggtgccgatgtcccgggtacggatgtcataggcgcccacttcgatggtggtatccagaatggtgagcaccttggcgtaattcttgcccacttcgctcaccagtcccaccaggccatccgatgtgatgaccgggtcgaacttctcaatgcctgcctcactgccggcatcgatggtaaaggagtagaaccgctcggcggtgtcccgtccgatgaccgaggcgctggcaaagctgaaatcgctgtgctcctccttgatctccagatactcccggagctgttcattttcccggcggtaccgttccaggtctgccacctgctgggtaagggtacgcaccttctcctccagctgggcattttcctcctcgatctcgccggcctggaacagatgccggtacagtccgcccacgctttcggaaatgcccgaagctgccgactgcagcggtgtggtggccaccgagagcagctgggaggtgagcggagtcaggccgccggacatggttgcccgcagcatgaacgcgcacagcacgacaaatactgccgccaggatcttgaattttgtactctggaagaaatccttcacccttggggccctcctgtgaattgcgggaatttccgaccaaatctggaaatccccctgataaaacaaaacactacttcgtcaaccgcaaaatagtgttttggtcctgattcgaatgtgtcaaaaacgccgcttacagcgagctgtcgtcattgtccagcacttcccggagctcgtccaggttctccagtaccataccggtacccagtgccacacagtccagcggattctcagccacccgcaccgaaatgccggtttcccgctccaccagcttgtccagaccccggagcagcgcgccgccgccggtgaggacaatgccgttgtcgataatatcagccgaaagctccggaggagtcttttccagggtgcccttgatggcatcgatgaccgaagccagcggatcagccagtgcctcccggatctcctcgggatagatctcgatattcttgggcagaccgtctgccaggttgcggcccttgatggtgatgggctgctcatcctcatagggataggccgaaccgatcttgatcttgatctcctcagcggtgcgctcaccgatgagcaggtaatacttcttcttgatgtactggatgatgaagtcgtcgaacttatcgccgccgacccgcaccgaacgggccgatacaataccgcccagcgagatgacagccacttcactggtaccgccgccgatatccactaccatgctgccctgggcctcggcaacgggcagaccggcaccgatggccgcagccatgggttcctcaatgatggcaaccttccgggcgccggccttgatggtggcctcccggaccgcacggcgctccacagcggtaacacccgacggaatgcagactaccacattgggacgggagaagaaggagctgttggtgaccttcttgatgaagatctgcagcatgttggcagtgatgtcgaagtcagcgatgacgccgtccttgagcggacgcactgccacaatggaaccgggagtacggccgatgacatccttggcctcctggcccacataacggacagtatcagtacgggtatccaccgccactaccgacggttcccgcagaatgatgccctgaccacgcatgaataccagggtattggcagtacccaggtcaatacctatatcttttccgaacgaaaaaaacggacgcattttcagtttttcccctttcaaattccaagacctctcacaaaa

SEQ ID NO: 4200 - DNA, 23291 bp, Unknown
  16S sequences of unknown bacteria
cggcggtcgcccgcgggtacggtccgtccgtttgccgaagcccccgcgtgcgatccggacgatggggtgcggggcgcggatgagcggacatttccgttccggcggcttgattcggctgcacgcgaagacggtcgtcctgcgccgcccgagcctgaatcgcctgcggagtcaacatctgatacgccgcgccgccgtgcggcattctgagcggaggatgagcgtgaagcatcggagtgtgcggtgcggctctgtgcggaggaggcgcctcgcgaagcggagcttccgaccggacgctgtctgccgctgcgattcttttcctcctgcatccgtccggcttcggtgtagaattcccgttcgtccgcgcgatctgccgagcggcgcgcgtacattgccgttatatcttcaagattgaattctgcggtaggctcgaccctttcacgtccgccggaggaggaggagtgagaagcggtcggtgtgcgtctgtcccccgacgcggtacgtcccgtttttttcgagaccgccgacggagcgcggcgcttctttttcacgatgtcaatcgcgtcatcatcgtcgccgtcaaaatgcggcacatctcctttgaaggaaagagaaccgtattcaaaggaatctttatttttttcgttatcgatcatttttcggagacctcacttttgtttttgaaaacccatgtgtgctgcatgcggaagcttacgatgaacatcacaagatcgactgcgatcttgatgacggtttcgaccggcttcgggagagagagaaactgtgagaataactgtccgactgaggcggacaccgtaagcagcacggcggcaagaatataataccgcacgacggagcttttttctccgttttgaaataccacacgtctgtttatcagataatttgcggatgacgagatgactctcgcgcagacgagagagatcgcgtatgaatattcattccacgaaaacaggaaaatattaaacagcgtaaacagtccggtgtcaatgaggaacgagatgacggacgagagaacgaaggagaggataagcccgtagatccttatcgaatcgcgcacggggcggaaatgcgacgtctgattgtcgtcgatgtatacggtgtcgatcttcacctcggagaaggggatcgaatcgcgcttcatcgagagaagcatgttcgtttcgtattcgtatctgtcgcccgatacgcggatgaacggcgcgagatattttctcgggatcgcgcgaagtcccgtctgcgtgtcggtgatcttcattccgaacagaagacggaacacgcgcgaggtgatgcggttgccctttttgctccgctcgggaacgtgcggaagagagaagtcgcgcgcgccgaggatcacacggtccttttcggaaagcatcgctttagcgcaggcggcgatatcctccgtgcggtgctgcccgtcgccgtccgccgtgacgcatcccgcggcatcggggcggttttcgagaatgtagcggaaagccgtctttagccctgcgcccttgccgcggttgacctcgtggcgaagcaccgtcactccgtctcccggctcggggaaattcttttttgtttcagccgatgatccgtcgtcgatcacgattatgtccctgaatcccgcgttcttcagcccgagcaccgtctgcgcgagcttttcgtcgggattgtaggaggggatcacgacgggtatgctgtaaaaatcgttcatcggaaattcctttgtcctttatttgaatgactccggcagaaattccggagagaccgtgtccgtcacatatttgcggagagtttcgagattcgtgtaatgcccgtaggcggcgataccgtgagaggctgcctgcgcggcggtgaaggtttcgagaaggtatatgcagttcccgtagaagcttgtgtcaaagtagtataccgtgggaatgaaaacgggattttcgatagagcgggcgtctcccttcgtgacgatgtcgaacgatatcatgccgccgatcatgttgtagtcatatgcctgctccgccatgaagttgccgagggaataaacgcagagcgttttgcgtccgtcctcggcgcttatccattcgacgggctggatgacgtgcggatgatgtccgagtatcacgtccgcgcctgcgtcagccattatccgggcgtatttcttctgctcgtcgctcggggtgaaatgatcctcgattccccaatgagcggaaacgaaaacgaaatccgcctgcgtgcgcgcgttttcgatctgcgattttacggtcgcttcgtcgagatacgggatcacgacattgtatcccgagccgagggttattccgttcgtgccgtatgtgtaggagaggaatgcgatcttcacaccgtccttctcgagaatgcgcacggcgttgtaatcatcttcgctctcatatccgccgatcatgagcacgttcatcgatttccagaattttatggtcgcctcgagtcccgcaccgcccttgtcgagcatgtggttgtttgcgatcgaaacgacgtcgtagccgagatcgacgagatcgcggcccatgtcctgcggaccgttgaaggtggggtagtaactgaaatcccagccctcgcccgccatgagcgtttcctgatttataaacgatatgtccgcggcggaaacgatcggtgcgacctgcgaatacgtcggcgcaaaattgtactgccgtccgccgggctgcgcgaccgcagccgcctcgcgcacgtttccgtagtagactatattgtctccgcagccgacgaaggaaagacgcttttcctcggcttcgatttcttttgtgtcggttgagctgccgccgctttctccggtaccctgcgcgctgtcgggcacggcggaggtttgagccgcatcgggcgtggcggtatcggtatcgctctgtccgaggggacgaagtatcccgcatgagcagaatgagagtgcgataacgacggcggtcagtgcggaaagaagttttttcataataatctccattctgccgccgatcggcggcgaaagcggcggtatcgaaaaacggcagtgtgttttttcggatttattaaagaggcggaaacaatccgcacgatttagggagtgccggggagaaggaaccgttctctgaaacggataaagtgctttttcgcgttgtcgtcagcgcatgtcgcggcgcatttttaccgaagatacaattatattatatcataacatagattgcctgattttgcaataaggaaaggcacgaatagagtaaattcctgtaggaatgtcaatgataggtgacagtgactccaaaaaatataaagaaactatattatgatttttagccaaggaaggaggagccgtaggcgacgagtgaattggctaaaaatcggtgcgattaaagaactgcaagatagtcttgcaacatttcgtttggtgatctgtaattcaggcaactcttcgatatgttgttggattttcggttgtatctctcaagctgttttctgccatcctcaagggaatacatcctcatcttcttgtagaaacgagcttcatcaatacgatgttggcgttctaccttaccgttgtgccttggtgtagcaactcggattctgtgatggataattccgtatttctccaatttttcttcaaacagacttttgtgatcgcagctcttttgaagcaaagcgtttgtaaattcagtaccgttgtcggtctgtatttctcttatgggaaaaggggcttttctcaccaggttataaagaaattccgttgaactatatgtgctgtgttcctcatacatttctctgtaagtccaacgggtacactcatcaacagccgtgtactgatagtatttcctgccgtttgacacacaatatgtcggcacatacttcacatctacctgtactttctgaccgggatattcggctcttttgtatggtttgggggttcgcgctgagcgtttctttacttccggcttcccccacttgttcaccactcttaccaggctggtgtagcttcttttgtatccctttgcttttagcgagtcccacagtaccatcatgtcgtccttgtggcgggcatacagccgaagtatcatttctttttcctctgccgtatgctcgttggggtgatgatggggacgatggcttctctcaactaaacttttccatgtcccatcgtaccgcgctttccactcatagatcgcttgtcggcttcttctgtatctaatacttgctgctgttactccgtttttttctgaatatctcaatacccgttgacgaaagtgggcttctgatgttatactgttcatgaaaatagctccttttgtgattgatggttttgtggttattatcattatatcacttttggagtctattttcttttttatttgtcacctatcaattgtatcataacagaaaggcacgaatagagtaaattcccgattcagatgaagcagttcggtccggggccgcattcggcgtaaaaatttgcgacgaaatgttaatatcgggagcttttccgacggatttcgcacacgccgcatgtgtcttccgcaccgtcgattcggattcacgccgaagtcccgcgcggcggcgaacgcagagaaaaaaacgtcatgccgaaaagcaaaatccgcttgctgggaagtgcgttcgggttgaggttcgcaaaagcttttcggggatcgccgggcggggggcggtactgcgtctcggtatttccgaccgatgagtccgatcggcgctcggcttcggcacggggtatcgggcggcgtatgctttgcgcacggtctttgtcgggataccggggagtgcgccgcaacggttattcgctgcatgtcggcacggaaatgcggagatgcgccccgagagcatatttaatgcagagccgtgacatcagtgcgccggtcgggaaagaccggggacagagcgagcatatcggcacgtttttaatcgggatccggcgcggttttgcacatttcggaacgtatttgcttgagaccgtgcgcaggtttgcgtatattgacgggcttgcacgggatcggatgcgaattttgcgtgtgcggatgcaggaaggctcggctcgcggagcatttcgaggtgcaaagtaatgtccgtatattatatacacgatattttgtgccggttcgttgcaccgaaaacgaaaattttttgaaaaattcaaaaaattttcgcgcagcgcccatgtttgggcagatttcggggcggattttgcggttattccgcgcgtcatgcgtgcggacgtataccgaatgtaaaatacccgcgcgccgcatgccctcgccgcgccgacaggggcgcctctgctgccggaaaccgtgcgccgggcgctgttgattcatgtttctgccgggtctgttgggttcgccgatgcgcgccgcccgaggcatgaccgcgctgacgcagcttttgcccgccgaagggcattgccgccgcttcgcattcgacagccgagcgccgactgcggattttacctcgcgattatccgcaaacgtaccatttacacgggcgcgtttttcgttgtcctccgctgttcttctgctgccgttgcccattccgattgtccgctcgccgcccgcctcctgcaccgctttcgtctttgccgccgctttgcccgtcctccgcaaggcgaagatactcctttcccgaaagaaaaaagcggtccggagatttttccgagccgcttttcatattcgatttaccgcttccggcagattccgaatcccggaaggtaaaaaagagccccaccgtgccgtgtaaagcaaggataagaaaccctgctttcgcaaggttggtgtcctctctccggttttgcgctcccaacgtccttaaaatctgtcgaaagagagaagtcaagggaggtctgcatcccgccggacgaagtccggactccataaatctatcgtgggtttaatactcgctttatcacgaacaaagcaggaagctctgttttcagttttctcaaaaacgggaattttattcgccgtccgcgtcctcttcggcttcctcgtcgtagtcgatcgaggcaaattcgtcgtcaaagagatcggctacgctgtcgaactcctcatcgtcctctatcgttgcaagataggtgtctccgttttcgtccgtctcggcgcgcaggattatatattcatctcccgcttcctcgcccttttcgtcgagaggaacgagagcgtaatatacgttctcccctacctcggcaacgccgatctgcttgtaatcggcttcgacaccctcctcatcggtgagggtatatatttccgcatcgtagaattcttctgccatgacttatccgtcctttcggttttgccgtctttccggctccgttattattctataccaaattcggcggattgtcaatatcgtaaaaagacgaaagaagggttttgcgccgaaaaatgtgcggaaaaatttttaaaaagctattgacaaagcgtgcggagtgtggtatagtttcgataaaaccgatgagaaagagtgagtaaagcacgctctgtcatcacagagagccgcggcttggtgcgacgcggtatggcggacgggtttgaatgggctttcgagggcgagcagaatcaagtatgcgagacggagcagtcctccgttaacaaagaccggcatatgaagtatgcgcagagcggacgcacaagcgtcaagcagggtggcaccgcaggagtttcctcctgtcccggcagaattgcagggacgggggattttttgttttcccgttccggaaaaaagaaaggggaaaaccaaatgaaaaacaacgaaattccgtacaagacctatctctccgaggatgagcttccgaagaaatggtacaatgtccgtgcggatatgaagaataagcccgcgccgcttctcaatcccgcaactatgcagcccgtcacggtcgatgagctttccgcggtattctgccgcgagcttgccgagcaggagcttgacgacacaacgccgtatatcgatattcccgaggaaatattcacgttctacaaaatgtaccgtccgtcgccgctcgtccgtgcgtactgtcttgaaaaggcgctcggaactccggcgaagatatactacaaattcgagggaaacaacacctccggctcgcacaagctcaattccgcgatcgcgcaggcgtactacgcgaagaagcagggtctgcgcggcgtgaccaccgagaccggagcgggtcagtggggcacggcgctttcgatggcgtgcgcgtacttcggactcgagtgcaatgtgtacatggtcaaggtgtcctatgagcagaagccgttccgccgcgaggtaatgcgcacctacggcgcgaacgtaacgccttcgccgtcgatgacaaccgaggtcggaaagaagattctcgccgagcatcccggaaccacgggaagcctcggatgcgcaatctcggaggcggtcgagaaggctgttacctccggcggcgcgtaccgctacgttctcggaagcgtcctttcgcaggtgctgctgcaccagtccgtgatcggacttgagtcgaaggcggcgctcgacaaatacggcgtgaagcccgatatcatcatcggctgcgccggaggcggatcgaacctcggcggacttatctcccccttcatgggcgaaaagctccgcggcgaggcggattaccgctttatcgcggtcgagccggcatcctgcccgagcctgacgcgcggcgtgttcgcatacgatttctgcgacaccggaaagatctgcccgatggcaaagatgtacactctcggctgcgacttcatcccgtcggcaaaccacgcgggcggactccgctatcacggaatgtccggcatcgtttcgcagctttacgacgacggactgatcgaggcgcgctccgttgagcagacctccgtattcgaggcggcggagtacttcgcacgcaccgagggaatccttcccgcaccggagtcgagccacgcgatccgcgctgcgatcgacgaggcggtgcgctgccgcgagaccggcgaggacaagacgatactgttcggtctgacaggcacgggctacttcgatatgaccgcatatgagaagtacaacgacggtcagatgggtgattacatcccgaccgacgacgagcttgcggaattcagaaagaacctgaaatactgaaaatcgcggagcggatgccgaaggggtgtccgctccctctgtatttatgacgtacaccgcagcaaaagagcggcgttttctccgacagcccgtgcgggattttcgcgggagagcgccggagatgacgaacggatcgccgaatactttgccgcagcacgcaccttttcgcggcgctttctttacggttgccgaacttcacacggcagcgtgcaccgcagacggggcacagcccgccgccgctcgaccgccgcggcgatgcgcttccttttgatttcggttgtatctttggttttccgaaaataaacgggctgccgtcggtgagacgatctcaccgacggcagcattgctatatttcaaaatgaacggtattccgaatcggcacatgagagaatgcgccgccggcgccgtaggacgatgcactttctccgcggctgcatgagattaggcggctcgcacctcaggctgtaagcgtccgccggcgatcgtccgccactgcgatccgcaccgcagaagtggaacggtctgcttcccgtccgtcccgagcgcattacttcgaaaccccgaacagaagatcgccgtatgtcgggaacggccattcttcgcggggaacgatctcctccgcctcgtccgcggcggcgcggagcgtgtccatgacggggagcagcagatcgcgcgcgcggagcgcggcggcaagtgcgtccgattccttttccgcttcggcgtacagcttctcaagctgtcccaccgatgcgaacatctttccgcagagcgcggacagctttacgatcgcgctcttttcgtaatcggcgtttgcgtcggggcatacggcaagcttgtccttaaccgtgcgcgaaagctctccggtgtatgcggataccgcgggcagtatctgcttgttcaccatgttgatcatcgtaagtgcttcgatgccgatcacctttgcgtatgattcgagcatgatcgtgcggcgcgcggtaagctccgtctgcgaaagaactctgtgctccgcaaaaagaacgacattcttttcatcggtgaggtgcggaatcgcgtcgggcgccgtgcggaaattgggaagtccgcgccgctgtgcctcggcgagccacgcttcgtcatagccgtttccgttgaagatgatgcgcttgtggtcgcgtattgtcgtgcgtataagctcgtgaagcgccgcattgaaatcccgcgcgccctcaagctcgtcggcaaagcatttcagcgattgcgcgacggcggtgtttatcattatatttgtctccgcgatcgattcggaggagccgagcatgcggaattcgaatttgtttcccgtgaatgcaaagggagacgtgcggttgcggtccgtcgtgtcgcgcgggaatttcggcagcgtgtggacaccgacgcgcattcggacttcctcgcgcgcatcgtatgccgttccgttttcgatcgacgacagtatctcgtcaagctcctctccgaggaagatcgagactaccgcggggggagcctcctgcgcgccgaggcggtggtcgttcgacgccgatgccacggatatgcggagcaggtcctgataatcgtcgaccgctttgatcaccgcgacaagaaataaaaggaactgcgcattttcgtgcggagtttcgccgggctcgagaaggttggtgcccgtgttcgtcgagatcgaccagttgttgtgctttccggagccgttgactcccgcgaacggcttttcgtggagcaggcagaccattccgtgcttacgcgcgatcttctgcatcatttccatcgcgagctggttgtgatcgcaggctatgttcgtcgtcgtgaatacgggggcaagctcgtgctgagagggcgcgacctcgttgtgctcggtctttgcgagaacgccgagcttccacagctcctcgtcgagctcacgcatgaaggcggacaccttcggcttgatcgcaccgaaatagtgatcgtcaagctcctgtcccttcgggctgcgcgcgccgaagagagtgcgtccggtgtagacgagatcgcggcgcttgttgaacatatcctccgggatgagaaagtattcctgctcgggtccgaccgtggtcttgacgttcgtgacggtttcgttaccgaaaaggcggaggatacgcatcgcctgacggttcagcgcctccatcgagcgcagaagcggtgtctttttgtcgagtgcttcgccgccgtatgagcagaatgcggtcgggatgcagagcgcaccgtccttgatgaacgcatacgacgtcgcgtcccacgcggtgtagccgcgcgcctcgaaggtcgcgcgcagaccgcccgacggaaaggacgatgcgtccggctcgccgcggacaagctccttgcccgagaattccatgataactccgcccgcgtcggtcggagagataaagctgtcgtgcttttccgccgtaacgcccgtcatcggctgaaaccaatgcgtgtagtgcgtggctcctttttcgatcgcccaatccttcatcgcatttgcgacgacatttgcgatcgaaatatcgaggcttcgtccgtccttcgcggtctttttcagggcgcggtaggtctccttcggcagacgctcctgcattacggcatcgtcgaacaccattgaggcgaaatactcgggcactttcatttccattccgttctccgttctgctccgatcgcgcgtgcgcacaatctgataatattatataatattgtacattaacataatgccgttgtcaaggcaaataaagcctccgcgcaccgtgcgcacgacgaaaaacaggcgcgtcgcgcaggtgaaatcggtcttttttacgaaaaaatttgtatgcgaaaaacgagcaaacgcgagaaaaaacgagaaaatcgaagatcggatatgcgtaaatcggcgaggcgggattttctttccgaaaagacttgacacggtgcggaaggtgtggtatactgtaacgcgcaaagaaaattacgaatatcgaaaggatctttactatgtcaacattcatggcaaaaaaagaatccgttgagcgtaaatggtatgtcctcgatgcaaagggcaagccgctcggccgtaccgccgctgccgctgccaacatccttcgcggaaagcatcgtcccgaattcacgccccatgtggactgcggtgaattcgttatcattataaatgccgccgaggcagtgctcaccggacgcaagctcgagcagaagttctaccgccgccattccggatacatcggcggactcaaagaggtaaactacaagaccctcatggcaaccaagccgactctggctatggagcttgccgttaagggtatgcttccccacaactccatcggggacaagtcgatcacccgtctcaaggtatacgccggcgcagagcacgacaacgctgctcagaagcccgaagcgtatgagttttaagaaaggagccccgaataaatggcagtaagctacacaagtgcgaagccttatttctacggcaccggcagacgtaaaagctccgttgcgcgcgtccgcctcttccccggaacaggctctatcataatcaacggcaaggatattgacgaatacttcggtcttgagactctgaagctcatcatcaatcagcccttcgacgttaccggcacccgcggcaagttcgacatcgttgcgaacgtaaacggcggcggtttctccggtcaggcaggcgctatccgtcacggcgttgcccgtgctcttcttctcgcagacgagactttccgtcccgagctcaagcgtgcaggattcctcacgcgcgatcctcgtatgaaggaaagaaagaagtacggcttgaaggctgcacgtcgcgcaagccagttctccaagagataacttcttatcttacggaaattgcaaagaagtcaaaaccccgaagccttgcggctttcggggttttcttttgtgctcctcggcgcgggacacgcgtccctccgcccgccgacaccgcaaatgccgatatttcttccgtaatatgccgcctcgcgaaaaatgacgctttccttgaattttcgcattgacttttttcgaaagggagaatataatgtaaccggaaaatacgaaaggatgtgattttcttgaagaagataattgcgatgctcgtttgtgtgcttatgcttgcggcgtgcctgccgactgccgcttttgccgttgatgcgggaatcactaccggggacgtgaacggcgacgaagcggtcgatgtgaaggatgttgttctcatgatccgcttcctcacgggatgggatgtcggaatttccgaggagtacggcgatttcgacggaaacggcaggatcgacatgcgcgatctgattctgctgataagatatattctttcatctacaccggaaccggaaccggaaccgaaaccggaacccgatcccgcgccgtcgcagatcggcgaggtgcttgctttggtgaacgccgaacgcgcgaagaacggactttcacctctgacgctcgacaccgagcttacctcgaatgcgaatatccgtgcgaaggagatagtcgagcagttttcccacacgcgtccgaacggtgagagttgtgacaccgcggtgacggtcaattggagctacatcggcgaaaatatcgctatgggatacccgacccccgaggcggtcatgaacggatggatgaattccgacggacaccgcaagaacatactgaacggcgattttacgaagataggcataggcgtctgttcttcgggaggcgccatgtattgggtacagcttttcgtcggataagaaacagcataagaaaaagcaggagatttgctttcggcaaatctcctgctttgctcttgcctttgacggcacgtttccggacaaaatccgatgttatgcctgagccgcgtcaacgatcgccgcgaacttctccggaacgagagatgcgccgccgatcagaccgccgtccacattctcctttgcaagaagctctgccgcgttcttctcgttcatcgaaccgccgtactggatcgtaagtccttcggctgccgcgccgccgtaaagtccggcaacgacggagcggatgattccgcacgcctcgtctgcctgctcgggagttgcggtaagacccgtgccgatcgcccatacgggctcgtaagcgatgattacgttcttcagatcgtctgcggtgagtcccgcgagatcaagcttggtctgcatggagaggatctcctcggtgatgccggactgacgctgctcgagaacctcgcctacgcagagaattaccttgagccctgccgcaagagcagccttcgtgcgcttgtttacggtctcgtccgtctcggcgaaatactgacggcgctcgctgtgaccgattataacgtactcaacgccgcattccttgagcattgatgcgctgatctcgccggtgaatgcgcccttttcggcaaagtgaacgttctgcgcgccgatcgagatcgcggagccttctgcgccgcactgagcggaggcgatgtcaacgaacggaacgcagaggatgatctttgcgccgtccttgcccgcgacgagcgccgcagtgtctgctacggtcttcttcgcctcggagggggtcatgttcattttccaatttcccgcgatgaccgcggttctttttgctttgttcattttcaaaatccaactttccgtaaactttttgacgtcgggcaagccgattgcgtcgggcaagccgattgcgtcggacaagccgattgcgtcggacaagccgacgggcaaatactgcggcggagcgggaaaagagctgccgctttcccggctccgccggagccttcggcgccgcgtgacgccgtttttttatttatcctggaggcatgcgatgccggggagctcgagaccctcgaggaattcgagagatgcgccgccgccggtggagatgtgggtcatcttatccgcatagccgagcttctctacggctgccgcgctgtcgccgccgccgatgatcgagattccgccgcactctgcgacagcctttgcgactgcgcgcgtaccggctgcgaagttctcccactcggaaacgcccatcggtccgttccagataacggtgccggagcctgcgatcgttttggtgaagagctcctgagtcgtcggtccgatgtcgagacccatccagccgtccgggatcgcgtcggagtagatgcgcatgaagtcggcatcctccttgtactcgcgtgcaacgatgttgtcaacggggataaggaagcttacgccctttgcgcgcgccttcttcatgaggtcggaagcaagctcgagcttgtcctcctcgcagatcgaggtaccggtggtgttgccgagagcgcgcatgaaggtgtacgccattccgccgcctatgatgagagtgtcaaccttgtcgatgaggttgttgataacgccgatcttgtcggaaacctttgctccgccgaggatagcggtgaacggacgtgcgggatcggacagagccttgcccatcacgctgatttccttctggatgaggtagccgcatactgcggggagataatcggcaacgcccgcggtggaagcatgagcgcggtgcgcggttccgaatgcgtcattgacatagatctcagccatggaagcaagctcttttgcgaatgcgggatcgttcttttcctcttccttgtggaagcggacgttttcgatcatcatgacctcgccgggcttgagcgcggctgcctttgcctttgcatcctcaccgataacgtcggcggcaaggacaacctcctgtccgagaagctcggagagacgctttgcaacgggagcgagggagaaagcgggattgaattcgcccttcggtctgcccatgtgggagcagaggatgactgccgcattcttcgaaagaaggtacttgatggtcgggagagcgccgttgattcgtgtctcatcggtgatcttgccgtccttcatcggtacgttgaagtcgcagcgcacgaggactttctttccggatacgtcgatatcttcgacgcttttcttgttgtacgtcatgttatataccaatccttttcggtgaattttttctttccttaatatatcacatctgcgcaaatatatcaagacttttttgtgaatacgccgaagctttcacattccgtcggaaaaacggatcggaatcacttcgcgctgagctcggcggctgcctttacgagactgcccgagaggattattgttctctcctcgtcggtgagcgagccgaggcggaacacatgggatgtcgtgcttccgtccgcgtggcggacaaatccgtcaagctcggacgcaccgtcggcaagcgccctgcgcactccggggaggatcacaagatcgccgacctcaagcgcgatgccttcgctgcccttgtcgttcccgagcgtgagaccgtcggagagaagcgggagcatgccccaatttatgaggttcgagcggtaacgcttcgtcgcgtattcgcgcgcgatgtttgcgattccgccgagtactctctggcaggaagccgcctgctcgcgtgcgcttccgtcgccgggacggcgcgccgcgacgagagtgccgtatccgatgctgccgtcaagctttatgtcggcaagcgcggcgagaatcttcgattttacgtcggctgcctcgttgtcttcaagctcggaataggtgtcgatctccgtgggggcatccccggtaatctccattgccccggcgcggaaaacgtcggtgcggtgagcgtagcccggatcgcgcctcgagagggcgagacgggagagacggtagggattcgaacggtacgacgaggattcgccggaggggatgagctcgtcggtggtcgttacgtcgtcgtcgatgaccgacgcgacaccgacaacgagattgtcggcaagcggacgcatgtcgggccattccttgatgttcggaccgaaggtgagcttcgcctcgggatcggcttttccgaagccgaagtagcagcggttctcgtagatcgtgggatcgaagaggtagtcgacgggggagtagtccacctcaagctcgtcagccgcggtgagaagtccgccggcacgcgcagtcgccgctatcgaacgcgcgtccatgagcgcgaccgacgcgatctgtccctcgccgggcttgctgccctcgcggttcgggaagtttcgcgttgtgtggcggatcgagagtccgccgtttgctggaacgtcacccgcgccgaagcacggtccgcagaatgcggagcgaagcgtcgcgcccgtgagcatgagatcgcgtgcgatccccgtttcaagcatgcgtgcgaatacgggctggcttgccggatatgcggaaagcgcgaattcgccgcatccgatcgagtgtccgcggaggatgtcggcggcagcggagagattgtcgtatgttccgcccgcgcatcccgcgatgacgccctgcgaaacgcgcagacgtccggtctcgcggtcaaccttgtcggtcaggcggagcgcacccggacggagtccgagctttgcctctcccgccttctccgtctcgcggagaatgtcggcggcgttctcgttgagctcgcgcaccgtgaaggcgttagacggatggaacgggagcgcgatcatcggctcgacggtcgaaagatcgatatcgaccgcgccgtcgtagtacgcaagctctcccggctcaagcttcccgtatgcctcgggacgtccgtgacgcacgaagtagcgctcggtctcctcatccgtgatccagatcgatgaaaggcatgtcgtttccgtggtcatgacatcgatgccgtttctgaattcgatcggcagtgaagcgattccgtcgccgacgaattcgagcaccttgttcttcacgaagcccgatttgaataccgcgccgatcagcgcaagcgctacgtcctgcggtccgacgcccggcttcacctttccggtgaggcggacggcgatcacctcgggcgctttcacgtcgtaggtgagcgagaggatctgcttgacaagctcgggaccgccttcaccgatcgccatcgttccgagcgcgccgtagcgcgtgtggctgtccgagccgagaatcatctttccgcagccgctcatcatttcgcgcatgaaggagtggattaccgcctgatgcgcgggaacgtagatcgctccgtagcggtgagccgcggaaagtccgaacatgtggtcgtcctcgttgatcgttccgccgacggcgcagaggctgttgtggcagttcgtgagaacgtagggcacggggagggattcaagcccgcccgcgcgcgccgtgagaaggattcccacataggttatatcgtgggaagcgagcgcgtcgaacttcagacggaggttcttttcgtcgcccgccgcgttgtgtgcggagaggatcgaatatgccatcgtctgacggcgggcgagtgccgggtcggtatccgacacgacaaactcccttccgtttttgaggaaaacgccgtgatctgttatctttaccaccatgagcgcccccgcttatttcgttacatcgtccgcgatcttgtacatcatgtcgaagtactttctcttctcctcgcagaaagccttcatctcggcgatctgctcctcggagaatgcgtcgagatccccgtccttcagcttgttcttgtacatcttgtcgagagcaagcgcgtactgaatgttgacggtgacgatctcgcccttctgctcgcatacgacgaggttggagttgcccttgaagagctcatttacggctgcctcgcccatctgagccgcggcaacgcggtcgcggagcgtcggattgccgccgcgcacaacgtgagcgagacgcgcgaacttcgtttcgacgccggtctgctcctggatgcgctttgcaaagccctcggagaagttctcgacgccctcggcgacgatcacgatgaagctgcgctgaccgtttgccttcatggtcttgatcttctcgattgcggcagcctcgtcgaaatccttctcggggatgacggttgcgaccgcgcccgatgcgattccggtgagaagcgcaatgtctccggcgccgcgtcccattacctcgatcacgttgcagcgtgcgtgtgattcgcaggtgtcgcgcaggcggtcagccatctcgagaaccgtgttcattgcggtgtcgaagccgatcgagtaatcggtggaggttatgtcgttgtcgatcgtgccggggattccgatcgtggggattccgtgattggaaagatccgttgcgccgcggaacgtgccgtcgccgccgatcgcaacgataccgtcgatctggttcttttcgcagtttttgagagcgtcagccatgccctcgggggtcttgaagcgcaggcagcggtcggaataaagaacggtgccgccgagtccggcgatgtttgcaacgtcgcgcgcggagagtatcttcatgtcgtcctcgagaagtcccgagtagccgcgcataagaccgtagacctcaacaccgcgcgactgagcgcagttgacgaccgcacggacggcggcgttcattccgggtgcgtctccgccggaggtaaggaccgcgatttttctgaaattcttttccattttctattcccatccttttttggtaagtattattgaaagcaacttttacaccatcctacattttaatacatgcgcggaaaaaaatcaatagaaaattgaccgaatattgccgctgcggtgccatatggagataaatttacataatttttataaaccgcattgactttttcgcctccgcctgttaccataaaaccgtaatatgcccggaaacggggcaaaaacatgagttacggaggattctgaaatgaaactcggaatgataagagggtacagcgaggactttttccgctatacgaaggatcacggacttgactttatcgaggtctgcacgaattacgataacgagacggaagcatttatcgcaaatatcgaggagacgaaaaagctcatcgacaaatacgagctgccgatactttcggtcggacgctggaattcggagccgataaaggacggtaagatcgacgctgcggtcaaggatatgctgaaggagcagatcgacaagaccgcgtatatcggatgccccgttttcaacatgggcgtgaaccgcgacgagtcggtaagtcttttcaaaaattatgttcttgcggtggaatatctgcgcgagatgtcggattacgcccgagagcgcggggtgacggtcgcactctacaactgctcgtggagcaatttcctctgcgagacaaaaacgtgggagatcgtgcttcccgagcttcccgacgtcatgataaagtacgactgctcgcatgcatacgcacgcggcgcggattatctttcggagctttacagatgggcggaccgcctcgcgcatatgcacatcaagggaagcaacatcgccgacggcagatatatcgacgatccgccggcgggaatcgacgcgctcgattggagacggatattctcgatcctgtacgcgcgcggatacgacgggaccctttcgatcgagcctcactccgcaatatggcagggcgagctcggcgagcgcggtgttcttttcacgatcgactatataagacagtacatgctcaggtaaagccgctccgccgcaggcgggaagcgaatgccggagcaaacggaaaaaggagggagccgtccgggacggctccctttcgtttttgcgggcaaaagtgcggattttcgcgcaaaaagcgcgcagtattgcctgcattgaaaaagaatttaaatattttctgtttacacgggtgatataagatggtataataggacacggtataacgttaatttgtaatcgtacgttatcttaccgtgtccgcgagtttgatgcggagcatcaaactccaacgtgagcaggaatttgtaaaagtttgggctttcgcccctcccgtgctttgcacgaactcgatattatgacggcaggacacggtatgacgttaatttgtgaccgcacgttatcttaccgtgtccgcgagtttgatgcgcggcatcaaactccaacgtgaaaccgaggttgagcacggtatgacgttagtttgtgactgcacgcttacttaccgtgtccgagagaatgacgcagcgcgtcattctccgacgtgaaacggaaactgagcacggtatgacgttaatttgtgaccgcacgttatcttaccgtgtccgcgagtttgaagaacatggtataacatctggctcaatttgtacgttcacttaccatgttcccgaaaacggagccccgctccgttttccaacgtgagttcggccttgaacaaggcgtcaaactccaacgtgaaaccggggacgagtacggtattacattggtttgtagtcgcacgttcatttaccatgctcccaaaatcggagcggcactgcgcttttcgacgcaggtacgactttgcgcgaggcgctttctccgacgtgagccggaatgcgtccgcatccatgtttctccgcggctggcggagcattgattcttcagcttaagcgcgggtttccccgctttatgatctacttatgcacggaggtgacttcatgcgtggtttcggtgtgaccgacgtcggacagcggcgcacggtcaatcaggacagcttcataataaagcagacggcggacgaccgtctccttgcggttgtctgcgacggaatgggcggcgcggccggggggcttgaggcaagctcgacggcggcaggcacttttgcggctttcgccgaggcggagcttgaaaagctcggcgatggtgctcccctcaaggcgcagaaggcggaacggcttctgcggcgcgcggtcgatgcggcgaacgaagcggtttacgaaagagcaaaggaaaacgaaatgctcaccggcatgggaacgacgcttgtcgccgcgcttgtgtacggcggcgacatatacgcggtgaacgtcggggacagcaggctctaccttatctccggcgacgggaacatcacccaggtgacacacgatcactcatatgttcagtttcttgtcgatatcggcaagataagcgaggacgaggcgcgcctcagcacgaacaggaacattatcacaagggcggtcggcacatcacccgagattgagtgcgatttctttaccatttgtaccgacgggatggagagggcgtgtatgcttctctgtacggacgggctttcgaacatgctttcgaccgatgagatcgcggacagcatgatcggcgatcttaccgatgaaaacggacttgcgtcggcttgccgcactcttgttgataccgcgaacgaaaacggcggacccgacaacataaccgcgctccttatatcgctttgacggcggatttttcggaaaggaacggctgtgcgaaagagcagccggatgaataaatggaaggctacgagagatatgtcgggcaggtgctcgataacagatacagaatcgaaagaataatcggcatgggcggcatggcggtcgttttccgcgcggaggatcttctgatgcgccgcatcgtcgccgtcaagatactgaaggacgatattgcgcgcgacgaggtttcggtgaagcgcttcatcaacgaatcgaaggcggtctccatgctttcgcatcctaatatcgtgacgatctacgatgtttccgtgcgttcggacgccaagtatatagtcatggaatatatcgagggaataaccctgaagaattacatgacgaagaagggaaagctcgaattccgcgagataatcatgtataccgagcaggtgctccgcgcgctcgagcacgcgcatcagaaggggatagttcaccgcgatatcaagccgcagaacatcatgcttctgaaaaacggaataatcaaggtcatggacttcggcattgcgaagctgccgaatgcggagaccgttaccgtcaaggacagcgcgatcggaacggtctactatataagtcccgagcaggcgtccggcaagcccatcgacgcgcgcagcgacatatattcgctcggcgttatgatgtacgaaatggcgaccggcaagctgccgtttaccgcggacagcccggtttccgtcgcgctcaagcagataaacgataccgcaaagcccgtcaaggaggagatgccgtctcttccgctcggactttcgcagatcatcgcgcgcgccatggataaggaccccgatatgaggtatcagagcgctcagcagatgctccgtcaggtggtgcgcctcggggacaatcccgaaacgacgttcaagccgctgaagccgacgaaaaagaaggggcgcgtgaagacgagccgcggcatgcttccgataattcttgcgataaccgcggccgtttttattgtcgccgtggcgtcggctttcgtccttgtgaacaagctgtttctctcgggcgacgataccaagacgatcaccgtcgatgagtttgccggcaaaaccttcaccgacgagcttcagaaatatttcgacgcctcggatatatatcacctgaatctcaatcaggtgtacgactccgacgctcccgcgggctatataatgacgcaggacccggcggcgggcgaaaaccgcaagatcgagcccggaaagaagaagtgcgagatcacgcttacggtaagcctcggtccgaagaccatgaagatgtcggacgtgaagtcactcgattaccgcgaggcgacgcttctgctcaagaagatgggacttcgcgtcagcacggagtcgatcacaagcgatctttacgatgtcggacacgttatatcctctgcgcccgaagcgggaaccgtgcttgaagcgggagaccgcgttgtgctgtacgtcagcacgggcgcaagcggcgagcggatcaccgtgccgaacttcaagggcaagaccgagaagcaagtgcttgcggaggcaaccgaggcgggacttctcatcggcgatgtgtcatatgaggagtcggaggattacggcaagggacttgtcgcagatcagagcataccgagcggaagccaggcaaacaaaaactcgataatcgacttcgtggtgtcgctcggcgcgcccgagaccactgcaccggagactacggaagaggtaacggaggctccgacggatactgcggatattaccgatacgggcaccaatgtgacggacacggaaagcccggctaccgacgacgaaagctcgaataaggataccgacgatacggaggacgcggtttacgcggataacaagaactgatggcggtgacagcggataaactgtacgcg

SEQ ID NO: 4201 - DNA, 2376 bp, Unknown
  16S sequences of unknown bacteria
cgccactggcgcatccggctcgtgcggaactcgcatcttgcagacttcgccgctgcccaggttgcagagtcagagtcctcatcttcttcgtcccagtcgtaggcgtggtcggccgagatgttcagagccttgtagcccaggccgagcgactcgacgaacgcacggcagccgcggatgatcggccagtacatccaggagttcttctccttgcccgaggcgaggtcgtgctcctcggtgtagatgctcccgtccggctgacgcacggcgacggcccagttgtacttaccgcgcatcatgacgccctcgatgagcgcctgaccgccgatatgggtcctcagcttgacgtcgccgtctgccgcaaacgccttcttggattcgcccaacttactctacgaccttctcccacgggtgcccgcagcacatcttgccctcggggcacgcgccgcgcacgcagcccggtcccgccgtcttgaagatgtgcggtgcggtcgggcggacgagctcgagcatcttgcaggctacctcccgtatctcccactgcgcgcggttgcagcagcgcaggctgaagaagtgcagcagctcgcggatgttcatggtcacggcaatcttggtctcgcaggcatttggcagcaggtagcgcgcgtcttccgccggcacgccgagctcgacgagcttgtggtaggcctcgaacgccgccttgaccgcctcgtcgaacgcctctgccgcgcccgcctcgtcgaccgtggcaggccggatgaactcgggggtctccttgaacgtgacgtagcgctgcgactgctggttgaacgacgcgaggcggtggcgcaccagctgatgcgtcatcgcgcgcgatacgccatcgatggcaaaggtgtagctcgcgtgctcgagcgtcgagaagtgcccgcttcccatgatggtgccaagcacgtgctcgatcttctcctcggaaagcgtctccatcagctcggcagcgccgacaggcgcatagcacaggcgtgctgcggtggcgacggcgcgttcggggtctggcgtgtggtaaagaagctctacgttcattgaatacctcgactttcctctcgtcgtgcgctcggggggagcggattcggttccccatcataatgaaaaaggcaccgtcccttttgcaggacggtgccctaactaccgaatcgccatcaaagcgtcactcagcggtctactcctcggaagcagcctcttctgcagcagcctcggcctcgggtgcctcctcggcaggctcctctgcctcagcctcggcagccttcttggcagcctcttcggcatacttggcagcgcgctcttccttggcggccttctttgcggcacgctcctcggcggccttcttctgagcctcctcggcagcagcctgacgctcggccttcttcttggcctcggcctcggcaacgcgggcagcagcggaaccgaacttgtcagagaagcgctggacacggccaccagcgtcgacgagcttctgctggcccgtgtagaacggatggcactcgttgcagaggtctacaaccagctcggacttggtggagcgggtcttgaaggtattgccgcaagagcagcgaaccgtgcactcaacgtattcgggatggattccaggcttcatggataactccttctacacgccttagtttccgaccaaggcataaaaaacagactgataaaggataccagtcttttctgcaaagcgcactgactatttttcgttttcctccctgcgccgccgaggacgttcggggtgccctcggcacccgcctatcgccccgtggacgtcaagataccgttgcttgcatgccccgcagacgatgagtacattgaatttagtggttgctaaatctgttttggaggaagtcaacatgaaactggcaattccaagtgagtccgacagctgcctcagcagcacgagaagcgggcatttcggtcacactccctacttcacgattgtcgaatacgacaaggacatgaacatcgtgggcgccgaggcggtcaagaacgtcgaccatgacgtcgcaggctgcggcggggtcatcgagtacgttcagacgctcggggtcgacggcatcctcaccgtcgggatgggcatgccgccgctgatgcgcttcaccgaatccggcgtcaccgtctactccgagacgagcacgccgggcgtgggagacgtcgcgcagctgttcgcgcagggcaaggtcgacgtcatgtcgcccgacgccgcctgcaggcactgattgccccccgccgccgcaaagcgcgcgctgtggccctgagcgcgacaggcacgcaagagagccctgtatctccagtatgaactgcatcccagttcttggacgggctaataagcggcctaagccgcacacg

SEQ ID NO: 4202 - DNA, 7672 bp, Unknown
  16S sequences of unknown bacteria
aaagcgcagcgcgccgggacagcctgacgccgctgaggcacgcgcggcgttagcgatgctgcacgagacgcgctgagggaaaaattcgtgcttgagcaggcaaacaaaacattgtagaatgaatacagcaggtttgattggaaggaggagattcgatgtttcggatcgttaaaaaggaaagtttgaatccgacggtgacacgcatggtggtggaagcgcccctggtcgccaaaaaggcgcaggcagggcagttcatcatcttgcgcgtgcatgaggacggtgagcgcatcccgctgaccgttgcggactatgaccgggaaaaggggaccatcacgatcatctttcagatcgtcggacgcacgacgatgctgctgaatcagctggaagagggagacgccatcctcgatttcgtcggtccgctgggaagaccgagcgaagtcgaagggctgaaaaaggtctgcgtgatcggcggcggcgtcggctgcgccatcgcttatccgaccgccaaggcgctgcatgaaaacggcgcggaagtgaccgtgatcaccggcttcaggaacaaggacctcgtcattttggaagaagagtttgacgccgtaagcgaacatcgctacctggtgagcgacgatggcagcaccggtgtaaagggactggtcaccaacgtattggaagaactgatcgaaaagggagagcagtttgacgaagtcatcgccatcggtccgctgccgatgatgaagttcgtctgcctgctcaccaagaaatatgggatcaagacgatcgtgagcatgaacccgatcatgatcgatggtaccggcatgtgcggctgctgccggctcagcgtaggtggagagatgaagttcgcctgcgtggacggaccggattttgacggacatctggtcgatttcgatgaggccatggcccgcaacagcgcttatcgcgatgcggaaaacagagcgcgcgaagccacatgcaatctgtttcagaaggaggtggcataacatgccgaacatgtcgttgaagaaagtcgagatgccggtccaggatccgatggtccgccgcgcgaacttcgaggaggtcgcgctgggctatacggcggagatggcgcgtgaggaagcggagcgctgcctgcactgccccaccaagccgtgtgtgagcggctgcccggtctctgtcaatattccggaattcatcaaggcagtcaaggaaggcgaatttgaacaggcctatcatatcattcatgaaaccagctctctgcctgcggtctgcggccgtgtctgcccgcaggaaacgcagtgcgagcgcgaatgcgtgcgcggcaaaaagggagaaagcgtcgccatcggacggctggaacgctttgtcgccgactggtatcgggaaaacgtgaacgaagagatcagcaagccgcaggcaaacggacatcgcgtcgctgtcgtcggtgcaggaccggccggcctgacctgcgcgggcgatctggccaaaaaaggatatcatgtctctgttttcgaagcgctgcatgtcgccggaggcgtgctgatgtatggtatcccggaattccgtctgcccaagacgatcgttcagcacgagatcgacggtctgcgcaagatgggcgtggagatccagacaaacgccgtgatcggccgcagcgaatcggtggacgacctgttcgatcagggatacgaagcggtcttcatcggcagcggcgccggcctgcctaacttcatgaacatgccgggcgagaacctgaagggcgtctattcggccaatgaatttctgacgcgctgcaatctgatgaaggcttaccgcgaaggggtggatacgccgatccagcatgccaagcgcgccgtgatcgtcggcggcggcaatgtcgccatggacgccgcaagatgcgccaagcgcttaggtgtggaggaagtgaccatcgtctaccgccgcagcatggaagagctgccggcccgtaaggaagaagtggagcacgcgatggaagaaggcatcgaattccgcctgctcaccaatccggtgcgcgtgctgggcagcgaagacggctgggtcagcggcatcgaatgcgtgaagatggaactgggcgaaccagatgccagcggcagaagacgtccggtcgagatcgaaggaagcaatttcacgattgacatcgactgcatgatcatggccatcggcacttctcctaacccgctgatccgctccacgacagaggggctgcagaccaaccgcaaaggctgcctgatcacggatgaagaaggcaagacgacgcgtgaaggcgtatacgccggcggcgacgccgtgaccggcgcagccacggtcatcctcgccatgggtgccggaaagaccggcgcggcagctatcgatgaatacatcagcggcaaacagggcgagaaataacgatcatcggatgaaaagcactgaaaccggtgcttttttcttcaaaatttgtgtaagggtttacaaacgaatgatattatgttactataggagcaggaaataattatatttctgagttgcggcatcggctctgccgcagctgggtcgggtgtacatccttccttgacgcccgttccctcttattcatatcgattcctttcgataaacctagtgaaaaagccttgcaaaaggctttttctatatgcgcttttctttagcgcagatggaaaaggtttgacaaatatcgcaaaaactttaaaatagagtatgcgattgatgaaataagaaataaagaaaggtaaatggtgtgatctatgattagttcaaatgatttaaaaccgggactgacgatccagcaggatggtgagctgtacatcgtcctcgatgccagtcagaacaagaccgcgcgttctgccatggtcgtcaaggccaaggtgcgcaatctgcgcagcggagccaacgtcgagctttcctggggcggcggagagaagatccggccggcgcagatcgataagaaggaaatgcagtatctctatgatgccgatgatgctctggtcttcatggacaatgagacatatgagcagatcgagatccctgcggatcacctcgaatgggaacgcaagttcatgaagcccaatgacaatgtcaatatctccatgttcgaaggagaagtgctcggtgtgatcctgccggataaggtgacgctgcaggtcacagagtgtgagccggccgtaaagggtgatacggcgaccaacgccctgaagaacgcggtcgtggagaccggtctgcaggtcaaggtgccgctgttcatcaaccaggacgagatgatcgtcatcaatacgtttgacggaaagtactccggaagagcaaaataacaactgcatagggaaaagcaatagaaaaatagctggcgtttctttgtatgcgcatctatttttctattctttttatgttataatgttgattaatcgggaggcttttttgttatggaaaaattatcgcgcatggaaaagtacaaagagctgcgtatggagatcgattcagacgccgccgcagccggcaagccgtccatcaattccgtagaactgcagaaacagctgcgcagcctgaatgagccgcaggatgatgaaggatccagcaggcattcacgtcagacggagcgcttctccaaggagatcgacctgcagctgaaggaagagacagatgaggggacggatcagtttcacaacgaatatctggatgatttcatcaacgaggtgaaagaatataatttagagaagggcaaccgcatgagcggcaatacgcagatcgatatcctgctgcagctcaacaaagggaaggaccgcatccagagcatgccgccgaagcagagcgctgcacagccggcggaagaagaggatgaaggcgtatcgtatacgcagtcgctctccagtgaagagctccaggaggaagtggaccgcctgtttgcggaagacgagcaggaaaacgaggcttctgcgcacgtggagatcatcaacgatgatgcgccgcagcagccggagaagaaaccgcaggaatccttcgtgtttgacagcacaccgttagtgcgcatcaatccgatcatgccgaaagaaggagagacgcctgcagaggaagagacagcgcctcaggcagatgagcaggcgacgctgaacgttcctttggagatcctcaagggcgatcagtcatcccctgcggaagctgaacagacaagagcaaatgaagcagtgacaaaaccggcaaaggaagccaaagagaaggcgaagcgtgagcaaaagccggaaaagaaagaagcgccgaagccggcggaaaacaaggaaaagacgaagacagcgaaggcgagcgtaacgcaggaaaagaaaaagaaggagaaaacgccttcttccacctccaacaaggtcctgaacgtgatcctgctcatcctgatcctggcgctgatcgccgtcatcgccgtaacgatctactggctgcaacaggcaggaggattctaagatgaagatcaatatcgccatcgacggcccgagcgcggccggaaaaagcacgatcgccaagcggctggccaaggcgcttggctattcgcatctggataccggcgcgatgtatcgctgtgtcggctatctggctgcacagcgcggcatcgatctgcacgatgaagatgcgctgacagagatgaccgcatccatgcggatccgctttgacagcgaaggacatgtcttcctcaatgaggaggacgtttctgcggctatccgggagaaccgcgtctccatgctggcctccagcgtcagcgtgcatccgcgggtgcgcaagctgctcgtcgacatgcagcggcagatggccctcgataagggcgtcatcatggatggccgcgacatcggaacggtcgtcttgccggatgctgaactgaagatctttatggtggccagcgtcgaagccagggcgcgccgccgttatcaggaatatctggataagcacatcgaggcagattacgacaccatctgcgaagatatcaagaaacgagacgaccaggatatgcaccgcgccgcatcgccgctcaccaaggcggcggatgcgcatgagatcgacacttccgacatgagcatcgaggaagtgtgcgcagctatcctgagcctggttgagaagacgattgtatgaggaggtgatgtccgatgaataaagggaccgtagcgatcgtaggccggcccaacgtcggaaaatccactgtgttcaaccgcctgatcggagagcgaaagagcatcgtagaagatacccccggcgtgacccgggaccgcatttacggcaaggtcgagtggctgacccgcgaatttcagctgatcgacaccggcggcatccagatccaggatcagcccttcaccgatgagatccacatgcaggtggagatcgcggtggatgaggcggactgcatcatcttcctggtcaacggccgggatggggtgaccgcggatgaccgctatatcgccaagatgctgcaccgcagcaagaaaccggtgatcctggccgtgaacaagatcgatgacagctcgctgcaatatctgatgtacgagttttatgggctcggcgtgggcgatccgatcgcggtgagcggactgcacggcatcggattcggcgatgtgctcgaccgtgtcgtggagctgcttccggatcagagcgcagatgaatatgaaggcatgacgagcttctgtctgatcggcaggccgaatgtcggcaagagctcgctggtcaatgccatcctgaaacaggatcgggtcatcgtctccgacatcgaaggcacgacgcgcgacgcgatcgacaccccgtttcgcagcgatggcaaggactatgtcatcatcgatacggccggcatccgcaagcgcggcaagatctatgaaaacgtggaaaaatattcgatcatgcgcgcgatgagcgccatcgaacgcagcgatgtggtgctcgtcgtcatcgacggggaaagcggcttgcgcgagcaggacaagcatgtggccggttatgcgcatgaggccggaaaaggcgtcatcctcgtctacaacaagtgggacgcggtagagaaggatgaacacacgatggcggagatcgagaagaagctgcgcgcgcatttcctgtatctctcttatgcgccgatcgcctttgtctcggcgctcaagcgccagcgcatcaacacgctgctcccgctgatcgacgccgtacatgaaaactgcgcgctgcggatccagaccaatgtgctcaatgaggtcatcatggatgcgcagctgatgaatccgccgcacccgcataacggcaagcggctgaagatctattatgcgtctcaggtcagcgtctgcccgccgaccatcgtactgtttgtcaacgacccggaactgctgcatttcagctataagcgcttcatcgagaaccgtctgcgtgaggcctttggctttgagggcacgaccatccggatcatcgcaagagaaagaagttaggtgagtcatatgaaaacggtagtaattggaagcggaagctggggcaccgggcttggccaggtgctctgcgacaacggaagagaagtcatcatttatggcaactgcaaggaacagatcgacgatatcgaacagaatcaccgcaatgctatgttttttgaggatgtgcagctgaacccggacctgcatgcgaccatggatgtcaatgtggtcaaagatgcggatgtcgtggtcctgagcgtgccgaccatcgccatcgaatcggtctgccgccagatcgatccgctgctgaaggggaaagtgatcatcgtcaatacatcgaagggattccatccggaaaccaatgagcgcatgtcgcaggtcatccgccgcttcatcagcgaggagcatctcagcagcgtcgtctcgctgatcggcccctcacacgcggaggaggtcgtcatccggatgctcacgacgatctgcgccgtctccctcaggcatgaggacgcggtcgtcatccaggaactgttttccaacgattatttccgcgtctataccggaagcgacgagatcggcagcgaggtcggcgttgcgctcaagaatgccatcgcggtcgccagcggcgtgctgtccggcctaggctatggcgacaatacgcgggcagcgctgatgacgcgcggcctggcggagatgatccgcttcgggaccgcgatgggcgggaagccggagaccttcatgggcctgaccggcatcggcgatctgatcgtcacctgctcgagcaggcattcccgcaattttcaggcaggatatgagatcggcaaggccaatgacgcacaggccttctggaaatacaacaagaagaccgtcgaaggcgtacgcaccgccaaggtcgtctatgagctggcacagcagatgcacatcgatatgccgatcaccagcgagatctacaaagtgctgtatgaaaacaaagatcccaagcagtcagcgcgagacctgatgctcagagatctgaaaccggaagcgtaatgaacagttacgctttcttttgtgacaggaggaaagacgatgaatactgcagatgaaatcaggcgccggcgcacgtttgccatcatttctcacccggatgccggaaagacgacgctcaccgaaaagctcctgctctacggcggggcgatccaccaggccgggtccgtcaaggcgcgcaaggccgagcgccacgccacaagcgactggatggagatcgaaaagcagcgcggcatctcggt

SEQ ID NO: 4203 - DNA, 32759 bp, Unknown
  16S sequences of unknown bacteria
tgagctttgcttttgctttacgctctcgccgacagctttgttattatatcacttccttccctctttgtcaatatctttttctagatttttctaaaaaattcttccaaatctcccgcaatcatctcccgtcgagcattatcataccttttctgatgctgtcgcttcgatatttttgattatcttctcggagattttcttgaacatcttgaattcttcgtccgtgattccgtcgttgacccttctcacaaactctttctggcgcgccgctatctcgtgtaccgcttctttcgcttcatccgtgagcacgagatgcacctgacgtctgtcctttgaatccttgtttcccacaacaaatccgcgggagataaggtgctccactgcctttgagacgtggcttttcgctatcattctgtattctacaacactgcttgcggtatcaagcttcggattattcgcaaggaacgctattacgtcaatttccgcccttgtgagtgcaaatttttccgaaatatcgtcccatatcgaatcgtacgctttttttaatacaaacgcgttgtgtaaaatttcgcgtgtttctgacatatttaagccttccttagaatctgtagtttatcgcggagtccgccatagtgtattctccgaggacatcttcgttaagcacgacctcgcttatcttctcctcagccatatccgcaaacagagcctgccctacagtcgtgtcatatccgtcgaaaaagtcggaattatcctcgttttcccacggtttttcatccatttcgagacgcattatatagtgagtgccgtagtcagtctcgatttttttgtattccccaacctcgagactcatcgcgctgtccgtcacatccgctataaaatccatgttttccgagatataatacccgtttttatagtatttgtcctccgaaaacgcgtcatacacctcgtcaaagtccgcgccttcagcaagggattcgtctatcgcgtcgatgagagcctgttttgcggcaagctcttctgcggtaagctcgcgcttctttctcagtccgtcatcggtgtattcctgcactccgtcctcgtccgttgcgtacatatatttattattgacatagatatggcgcactctgacgtagttttcgtcgagataattctgcctgtcctcgtcggttatgccaatgattccgtttgtaccgtagagcgcgtcatacaaagcggacaccttttcgtcgcggagatatatttttttgagcatatttatattgacgccgtatgcaccgagcgccgcattgaacttgtttcgacttccgtcggcatattcgtcaacaaaatcgtcgatatagctgtttatcgtgtcctccaccgagcgggagagcgacaagccgtaatcgtcaaacatctgctcgcacacgagtgtcatctcaacattatgtacgaccgcgctgtaaagaacatcctccaccgtctgcccgtcgtcagtcaccacagaggaaaaatactccggcgtattcttgaagtcggcgtaggtctgggcgtattttcccttgtatgtcgcaaggtagtagctgaactcgttttcgtttatcgaatgactgccgtaggtcatgacgctctcggacgaacacgaaacaagagcgcaggcagcaaggagtgtcgcggcggcagcggatattattctattcttcatttgtctctcactaacagtatttttatattatattataactcgcgaaaatgaacaaattatactatttgtcggaaaaactcgtgtatttacgaagtaattcaagcaaaaactctgtgtttctcatgttcttcttggttttcagcgtgataaacgggttctgaccgagcattacgcgcactccgagggtaggatacgcaagcgcgagcttctgtatctttgcggcgtcgggggaggaggtgtacagtctgatattgccgtccttttcctcgatttttgcaaagcccgcgactctgcccatagctcttatccacgcgatacggcagagatttaccgcctgtgaattcggctcgccgtatctgtcgcaaagctcgtcgattatgtcgttgtagtcgtcctcgttctgcaccttcgcgatgcgcttgtacatatccattctctgcggagcggacatgatatagttctgcgaaagatatgcgtcacagcgtacatcaaccgcgcattcgggaagctctttcttgaccggttcgcctttttcttcaataacagcctcttcgagcagcttcatgtagaggtcgtaacccacagcttccatgtgaccgtgctgttccgcgccgagcaggtttcccgcacctcttatttcaaggtcacggagagctattctgaagcccgcgccgaactctgcgtattcctttatggcagaaagacgtttttccgctatttccgtgagctgttttccgcgcttgtaggtgaagtacgcgaacgctcttgtgcttgaacgacctactcttccgcgaatctggtgaagctgcgacagaccgtagttttccgcgttttctatgatgagcgtgtttgcgttcggtatatcaacgcctgtttctataattgtcgtgcagactaagatatcgacttcgcccttgataagctgatcccacacttcttctatggcgtcgcgatccatttttccgtgagctacggctattctcgcgtcgggtatcgccctctctatcctgtcggcaacgttgtatattccctcgactctgttgtagaggtagaacacctgcccgccgcgtctaagctcacgtctgattgcttcgtttatgagagcctcgtcgaattccataacatacgtctgaacaggtgagcgcagtccgggagcttcttcgagcacgctcatgtccacaatgccgcccatagccatgttaagcgttctcggaatgggagttgcggtcagcgttagtatgtcggcattcaccgcgagctgcttcagcttttccttttgggcgacaccgaagcgctgttcctcgtcgattatgataagtccgaggtcgaagaaattcacgtcctttgagataagacggtgagttccgattataatgtccgtgtcccctctcgccgctctgcgaatagccgccgcctgctccgactgggtacggaatcgcgacaccatgtctatcttaaccgggaaagcgcgcattcggctgaggaaggtctggtaatgctggtacgcgaggatggtggtaggcacgagtaccgcaacctgcttgccgctcatgacagccttgaacgcagctctgagcgcaacctcggtctttccgtagcctacgtcgccgcagagcagtctgtccatagggtacggcttttccatgtcctgtctgatatcgtctatcgcggcaagctgtccgtcagtttcctcgtattcaaacgaatcggcaaattccctgcacatatcgtcgtcgggatcaaaggaaatgcccttcgttctctttcgtctggcgtaaagctcgataagctcctttgccatctctcttgttgcggcttttgctttgctctttgcgcgcatccagtccgttccgcccatcttagacagctttaccatgcctgtgtcagagcctgctccgatgtatttcgatacgtggtcgagctgatctaccggcagaaacagcttgtcgcttccggcgtattttatgtgaacatagtcccgcgaagctccgtcgatcgtcagcgtctcaagtcccatgtactgaccgataccgtaggcttcatgcacgacgatatctccgacttcgaggtctgcgtatgacatgatggcttcggtcgcggtctttttcttcttcgcttttctgaggtagtgtcctctcgacggcttcgcggattctcttgagtagtcgagcagaacgaatttcgggtaagcaagctcaaatccgcccgggaactctccgctcatgataagcacgtgagtgtttttgccgccgatgagcttttctgcggtaacatcaactccgtcagcctgtatcgcagtgcatccgcgtgagattaaatcctcgcttatggcggtcttttcgttttcggtagcgcacagcacggcacagatatagccctctccgcggaacctctccaaatcttcgttgaacagcgcggtgttgcctgaatatgcggggacgtgacgtgtgttgaacgtgaaaagtccggcaggtgtgaatccgctgtgtgagcgcacaagagtatcgacaaacactacgggggatgactgcctgtcgccgatttcttcaaatgagcggagataaataccgtttttctgaggcggcagctcgtggttctccgtcatgtcggcaatgctctgctcgataagcgcattctgagccgccgctctttcctcgatctcaccgcagtctacaagtatcataggtccgcagtcgtagtcgagaagggacgtgccgctcgggtaaagcgtaggcagatatttgtcggcgaagttcagctcaaagccgtgctcgagagaggtaagctcacttccgagaacctcagccgccctcgcgtttttctcttccgtgttgtttccgagacggcgtatctgcctttttatcatgtcccgcagctcttctcgtttctccgcgctcaccataagctctctcacaggcgggaaaacaagagtctccggcgaatattccgtgaatctctgcgtgtccgaggaaaaatatcccattctgtcaatctcgtctccgaaaagctctattctcacgggacttgacgacggcggacatatatcgactatgccacctcggattgcaaactgccctgccgactctacaagctccactcgcgtgtatcctgcgtctgtcaacttctcggcaagtgaggacgtgtcaagaggctcgtcatacgacaccttgatgcacttctcccgcagctcttccggagacaaagtgacctgcaaagccgcctcagccgtagtgcagataacctcagcgcgcgcgtcgtcgggtactattcccgtgagagacgagagtacgttcagccgttccccttcgtagtcgtgagaagaggcaatgtttgagaagcaatactctctcgacggaaaataagccgcacgcattccgcatgacacgaggaactcgcagaacgaagccgcccttttctcactcgcgaacattataacgggaggaaaggtcttcgcggcaaaatcctccgcaagggagtgcaaaaatacgtgctccgagcctgcggtaagtccgctcacatagtaaggctttctctttccgtatgcgggagaggtcagcgcggcggtcagcgaagtgtattcacggtttctgcgaaaaatatcgcacagcagtctgtagttcatttttcccctttctagattaaaaacttaatatctaactccgttcagctttcccatagcgtcgtcaatttttccgtcgagtatcagcggaagtgcgtcataaaccgcgccgaacactgagaacatcttctcctcgtcctcattcggtattctacctagaacccagtcggcaaggggatagtcgggattcggcttttctcccactcctatgcggatacgggggaagttttcgctcgcgagctgttcggttatgctcttcagtcctttttgtccgccgtgagagccgctttttctgactctgactcttccgggggcaagataaatgtcgtcgcttatcacgataatatgctcggggtcgattttataaaagtccgcggcttcttttacggcatcccccgaggcgttcataaaggtctgcggcttcatgagcattactctgtgtccgtttatcgtcgtcattccgtaaagtgccttgaatttcagcgtctttatcgggcaggacatcttctgcgagagaaaatcagcgcacaaaaatcccgcgttgtgtctcgtgaaggtgtatttgtcgccgggattgccgagacccgctatgataaattccggctttccgctgtcctgtgtggaggtcccgcttatctttttaaacagttcaaaaatatccgccattattaaaatccttttaattatctccataacgcgcaaaaagcccgtattttttcagacgagcgcatttgcgtatgtaattttcgttttatcttccggctatctcgtgtactatgcggcaaagctcatcgtacttgtcttcgatatcacgcaccagcttgaactgagttcttgctctgacaaggttgtgctcgggataagcggtcttgaagtatgtgtcgccgtttaagtagtccgcgaggaagcgagaaccgcattcaagcgtcatcagctttatcgagaacggaagaagctcaagctccgcgtccgttatgctcgtaagctcttcaaggaagcccctggtgaacgccgtgaagttttcaaccttgaagtaaatcttgtcgagatccctctcatcctccgcaccgcttgaaccgccgaaacgaagcgcgtcgccgtagtcataaaggagagaacccggcattacggtgtcaaggtcgataacgcaaacgccctcacctgttttgttgtcaagcagcacattgttgagctttgtgtcgttgtgcgttactctgagcggtattctgccgtccttcagagcgtcgaccacaatacccgcgtcgctctctctgtcgagaacgaactttatctcttcttcagcagtatctgctcttccggatttgttatttttaagtgcttccttgaactgctcgtatctgacgggagtattgtgaaagtctacaattgtctcgttgagcttatctgccggatagtccgcaagcattctctggaattttccgaaagcgcgcgccgcatggtaaagctggtcgggattttcgactatatcatatgatttcgcgttttcgatgaatttatacacacggtaatattcgccgtcgttgtgataataatacggctttccgtctgtcgtgtaaataagtgtcaaggtctctctgtcgggatctccgccctcggctatgatcttctttctgagaaattccgtgacgcccattatgttttccataacagccggaggatttgtgaacacgtttttattgattctctgaagaatgtagttaggctgggagtgaacaatataagtatcgtttatatgaccgttaccgtaagcggacggctcgatattcatattgaaattttttaatatatcataaaactgaatttccatgacgattccttttcgctgtttatagtgatgtacagtataatatatcatatttttccataaaagtaaagggggaaaatgtaataaaaactctgtttataaaatatactttgagtattatcttatattgactacccgcgggaataatgatataatattctcacacattttattatatgcacgggagcgggcggaggacaaatgatagtcataaacaacatcggtcacagcggattttctgtcgaatcggagactcatatgctgattttcgactattccgagggaaagctgccatctctcgcgatgaagaaaaagctgtacgtttttgttagccacagccacagcgaccactacaatccggagattttccgcctgtgccgtgagcatcccgcagtaaaattcgtgctgtcctccgacattccgcgctccgaggttgagtcacacggcgtttttgactatatttcggtagaccccggcatggacataaagctcgagagcaaattcaggctcaaggctctcccgtcaactgatttgggcgttgcttttctctgctgtctagacggaagaaacatctaccacgcgggggatctcaatctctggctttgggaaggcatgggcgagaacgacgtttggagaatgaccgacagattccgcgaatacacacgtgggcttaaaggcttccgcatagacacggcttttctccctctcgacacgcgtcagggaatgtattccttcctcggctttgactactatatgcgaaaattcaagataaaacgcgcgataccgatgcacttcttcggctcgtcaaagatagtcgacgacttgattttcgatcccatctcccgcgactaccgctctaaaatcgtaaagatgaaccccagcacgtccgctcattttgaataatagaatccgcagtctttttgaagcactcgtagttgtcttcgcatgactgcggaatttttattacattctcgccgctatctcttttaggaagtcgagcgaatttacttttctcttgttctcgagctttgagagaagatataagtctcccgtcatcactccgtcctcgatagttttaacggaagccgcttcaagtttatctgcaaagagaacaagctccggtattccgtcaagctcgccgcgttttctgagtgctccgctccacgcgaatattgttgctacgctgtttgtggaggtttcctcgcccttcagatacttgtagtaatgtctctgtaccgttccgtgcgccgcctcgtactcgtagtttccgtcgggagagacaagcactgacgtcatcatggcaaggcttccgtaggctgtcgcaaccatatcgctcatcacgtcgccgtcgtagttcttgcacgcccagatgtacccgccttcgcttctgattactctcgccacagcatcgtctatgagcgtgtagaagtatgtgattcccctctccgcgaacttatccttgtactcgctttcgtatatctcgttccagatatccttgaagcggtggtcgtaagttttcgagatagtgtccttcgcggcgaaccacagatcctttccctcgtcgagcgcgtagttaaacgaacttctcgcaaagctctcgatggatgagtcaatgttgtgtactccctgcacaattccgcccgagccttcaaaatcgtgaatcagcgcgcgcgtctcgtttccgttttcgtcagtcacgacaagctccgcctttgagccttcgggtacgcgcatttccgtattcttgtagacgtctccgtaagcgtggcgggctatagtgataggcttcgtccatgtggggatgtacggtgtgattcccttgactatgattggcgtacggaatacagtgccgtcaagtatcgctcttatcgtaccgttcggggatttccacatttctttgaggttgtattcgctcattctcgcagcattcggagttatcgtagcgcattttacggcaactccgtatttttttgtcgcgagagcggattccacggtaactctgtcgtcggtggcgtttctgttttcaagaccgaggtcgtagtattcggtttttaattcaacataaggctctatcagtatctcttttatccacttccaaagcactcttgtcatttcgtctccgtccatctcaacgagcggagttttcatttttatcttagccatgtttttctccttatttcatggtttctcttgtgtattcgagaagtccgccgcacagcatgacattgcgcattctctcgctcagctcacattttactttgaattccgcgccgtttgttttgtcttgcactgtgagctctccgccgtttttgatgaatgaaatcagtccgcaaagtacaaactcgtctccctgcgatatcttgtcgtagtcgctttcgtttacaaattcgagcggaagaatgccgacgtttataaggttctgcttatgtatgcgggcgaacgactttactatgaccgccttcactctgagataaaggggagccaaagccgcgtgttctctcgacgagccttgaccgtagtttgcgccgccgacaataatactctttccgagactcattgcgcgcttcgggaaggtgttgtcgcatacggcaaagcaatgttcggatatagcggggatgttcgagcggagcgggagtatctttgcgcctgccggcatgatgtggtcggtagtgatgttgtcgcctgccttgagcgagcattctgctgtgatgctgtcggcaagcggagtggttttcggatatcccttgatgttcggtccgcggagtatctcaacctctttcgcctcgtcaggggaagcgggaggagtaatcatgttgtcgttcacggagtattcttcggggaggataaattctggcatattgccaagctctctcgggtcgcagaggtatcccgcaacagccgacgccgccgcaacttcgggagagacaagataaatcttcgcatcctttgttccgcttctgccttcaaagtttcggttgaacgttctgagcgagattccgccggagttcggtgactgtcccatacctatgcacggtccgcaggctgattcaagcactctcgcaccagcaccgattatcttcgagagcgcgccgtcgtcagccatcattttaagcacctgctttgagccgggggaaaccgtcagcgaaacatcgggatgcacggtctttccgtcaagtatgtacgccaccttcagcatatcgagaagagacgagttcgtgcatgagccgatacatacctggtctatcttcatccttccgatttcttttatggattttacgttgtcgggggagtgcgggcaggctgccataggttcaagcgcggagaggtcaattttgatgtgctcgtcgtattccgcgtcgggatcggctgagagcggcatatacacgtcttctcttccctgcgcacggaggaattcacgcgtagtttcgtcggacgggaacacagaggtggttgcaccaagctccgcgcccatgttggtaatagtagctctttcgggaacggacagagttttcacgccctctcccgtgtactcgattatctttccgactccgccctttaccgtcatcacggagagcagctttaaaattacatccttcgcggacacccacggagacagctttccgacaagctccacgttcacgattttcggataggtgatgtagtacgcgccgccgcccatagctacagcaacgtcaagtccgcccgcgcctatcgctatcatgccgattccgccgcctgttggagtatggctgtccgagccgagcagtgtctttcccggtgcgccgaatctctcgagatggacctgatggcagattccgtttccgggtcttgagtagtacagtccgtgctttttacatactgacgcgataaagcggtggtcatccgcgttctcgaatcccgactggagcgtgttgtggtcgacatatgcaacggagcgttcggttttaacacggtctatatccatagccaaaaactcaatgtacgccatagttcccgttgcgtcctgcgtcagagtctggtctattttcagtcctatctcacagccttttttgaattctccgtcgactgtgtgagacttcagtattttctcggcaagggtaagtcccattttgtcctccctgtatgcggcaagtttatgcatcgcatgaatgtatagtttatgcaaatttcattttacagctttatttttcttgattatagcacgtttttgaataattgtcaatatcgcgcttcatttttgctgtattatttttcattcgcattctgtcggtcatatgataagcataaatcgggagacaaaattccgcgcggctcttgaattattccgtcatttatgagataatattgtcgagagaaacttgatagaaggataaactaatgaacataaccggacacttcaaaaccataacgcgccaccgccaccttgtaatgaaaaactgcttcaaagccggaataccggtgaacggactgctgcatgatttgtcaaaatactcccccgccgaattcatcccgggaataatgaactacgaggaaggcaagcgcagtccgaacgaacacgagcgagaggtgaaaggatattcctcggcatggcttcatcacaagggcaggaacaagcaccattttgaatactggttcgacatcaacaccaagacaaagcagtacgagccgctgagaatgccgctgtgctacctcaaagagacgttttgcgacagagtagccgcctgcaagatatacaagggagagagctacaaggactccgacccgctcgaatactatctctcaaaaagacctgacgccggttacagtctccttcatccctgcaccgcctgcatactcgaaaaatggctgaaaatgctcgcgacggaaggtgagaaagccacgttcgaccacataaggaagataggcgagataaaatactgcaccttctgtcccagacgcggaaacaaataagagcgaaatattgatttttttgaattattatgttgcttttctgttaatcatgtgttataatatttttgcagtacacaacaacatcacatcagaggttatcatgaatattctctcatatttaacgtgttttttgaccgccctcgctcctctcacaaacgacaagataagcggtatcattttggtcctgtgcatatcgggagtcgcgcttatcgtacttcttattctgactctgattttcaaaggcaaaaataaataacaaaaaggcagccgtgcgtaagttttgcatgactgccgattttttattctgcggcgggttagttcgcacctgtcccgcttttttcaagtctcatcagcgttcttgaaagcgggtacacgagaagccccattccgaggtttccgagtccgtgaaccgcgtcccaaggaagtcccgccaaaatccactttattgttgtagaaaaatcatatccgaacattatcgcctgagccggagcatacagcgttccgtaagtcagtccgaaaagcccgcacactatggggtacactattaccgcgacctttctcggcatattctgcggaagaagcatggtaaacgcccacatgacagtccacagatagagatacggtatccaccacatagcgaatccgtagtacagtcccgacagcagtacgaaaacatatatcgggataagcgcgcggattctgtagactattgtaaacaccatgacgaacatggcaagcggatgaatattcggtaaagcctcaagagccagctttgacgcaagcatgagcgcacccagcattgcgaaaattatcatgctcctgatctttgaatgcgacttcattaaccggcgtaaaccgtataggtaagctcgtagtgttcgccgtcggcaatgttagtggaggaagcgcctgtcataaggtactcgccgtccttggagattgcccaatatgactggtcagcgctgtagtcggcaagctcgccgtcgactgttgtgatgtaaagaccgtattcgtcggtagttccttcaacaagacctgcttcgagaagagcgtccgctaaggttgtgcctgtagtctttatctcgtgttcctttgattcaccggctttgttgataacttcaacggtgatcgtaatctctccgggtgttgtgttgtcttccttttcctttgagcaggaaatgaaggtgagagccatgaccgcaatgagcatcacaacagcggaaaacttaaagatgttttttaactgtttcattttgtttctccttgatttttgtattgttttttagcgctccgatgtcagtgcagaactgccggcactcgcggcggaaacatcggaactcgaggcaggtatcccggcttacacgaatattccctccatgccttctcagtttcccaatggctccgagtgcggtcctcggttatggcggtatgacgtgatcacggtgacgggctcgcacaggattttcacctgtttccggtttaaactcttttgagggtacctctgcgccggagatattatatcacctcaggagtgaaattgcaagataatttaaaatttgataaacgaaatatgacgaaacatacgccgccgcgaactggaacatcacgcattttatcatgtgaactgttccaaactccgagcgcatttttgttatggatgcgacgcacggtggatagagcgcgaaaaacgtgagaaacgacacggcggatgctcggctgaacagctccctcagaacatactttactccgccttccccagagaacacagaaagagaagttaaaactccctcttttgcgaaaactcctgcgataaggctcgcgcttgacaaatcgttcccgaatccgagcggtgcgaaaatcggcgaaactatgcccgaaacacactgcatgagcgattttgagtcggagacggtcacataattcatcacccatgccgccgcggagataaggagcagaaccgtcgctattttcttcaccgtatccgcgcatttttcaccagacgagcgcataactgatgaaaaactcggcattctgtatctcggcagctcaacgacgtcgcaaatacggttctgtctgccgagcagtctcaaaagcaagccgaaaacaagcgcgaaacacactccgcaggcatagatgagaagtataacaagcgaaaactccctcccgaagaacactcccgcaaaggctgcgtatacgggaaacttcgcactgcactggaaaaacggaagtatatacgacgctcgttttgcggattcttcgtcaactgcgcggagtgaatctatcgcgggaactgtgcatccgaagccgagcatgaacgggatagcggcgcgagatgaaattcccacgtcagaggtgaatggcgaggagcaaacgcaaagccgcggcgcgattcccgattcttcaaggaacgtgagatacgcgtacaccagcatgacgggcgggatgaatccgacaacggagagcgcgccgccgaaaaccgcatcggacacaaatctgcgcagaagatacggcaaacctccgctgtaattcaggaatattcgtcgcagaaaatccacgatagcttcgagaaatgacgtgataagtggagaaataacggaatatattaaaaaaatcgggagcattaccgctaaaacaaggcaaaactccgctatattcccgtgctttccgaagagcagtctgtcaagggcgcacagcttagcttctctccgtttttttatgcaatccgcaaggtcagagcgcagcttttcttcgctttcacacgaggggacagaatattccgaggttaaaacaaaactcttcagctcatttttctctattttctcgtacatgaacacgcgtataccgagctctttttcggctttttcacagtcaaacgagcttccgtcacggcggagaatatcgctcatcgtcacaacggcggcggcaggaattttcatctcgcgaagtgcggcaaatattggcgcggaattctcgggtgatgttccgtcaaccacgacaagcgcacggtcggcttgattttcaagatactcgcaggcggagatttcgtcgggagtatcgggtgagagcgaaaacacaccgggcaggtcgcatattgacgtatcttttgtaatgtccgtctcgaatgccgaaactgtagctccgttgtagttgcccactcgcagattcattccgctcagcgcattaaataccgtagtttttcccgcattgggattcccgcacagcgcaattttcgtcataaccgagccgtaattttttcggcaagctctttgtcaatagcaaaatacttcccgctgtagtacactataacccctcccgaagccgtttttccgagcagctttactctgactccctgttttatcccgtattttaagacatttttcggcggattttcctctgtcacgacggcttcttctccgactttaagttcagttaaaaatatttttctcatactaaagtatatttccgtcatgtccctgttatacccgaacaaacaaaacctccgccgcactcatgatgaagtgaagcagaggtttttattcagagtatacttagaaaggagctttttcgatgttcgggttgccgtgggtatatgtgggaaggagcttcggagactgtaccgatgtttcgatacccgcgtcgctgagttccttcgagaacttttcgatatgctcgagagtgagcttgccgacttcaacggactttgacttctcggatgcaaacttacctgcgtttctgccgaatacgataacgtcgaggagggagttgcccataagtctgtttctgccgtgaataccgccgacaacttcaccggctgcatagaggttttcaacgcctgtcatgccgtcggatgtgatgtcaagaccgccgttctggtagtggagagtggggtaaacaagaataggctctttcctgatgtcgatgccgtacttgccgaacattctcatcatagccggaattcttgcttcgattgtgccttctccgcccttcagctcaatcataggagtgtcaagccatactccgatgccgtcagcagtgtgaacgccgtttcctcttgcggtgcattcgcgaatgatggaagccgcggatacgtcacgtgtttcaagcgggtgcatgaatacttcgccgtttgcgttgacgagctttgcaccgagagaacgtaccttttccgttacgagcgcgccgaagatctgttccggataagccgcgccggtcgggtggtactggagtgtatctgcataaaggagctttgcgccgactctgtagccgaggataagtccgtcagcggttgcgccgtagtggttggaggtcgggaagccctggtaatgaagtcttcctgcgccgcctgttgcgaggataacggtctttgcgcgtgctacgagaagctctcttgtctccatattcatgaggactgcgcctgcacacttgccgttttcgtcgagaatgagttctactgcggatgtgaagtcaactaccggaataccgcgattgagcacttcgtcacggagagttctcatgatttcagcgccggaatagtccttagccgcgtgcattctctttctggaagtaccgccgccgtgtgtggtaatcatagttccgtcgggagctttatcaaattcaacgccgaggtcggagagccacttgatagcgtcgggagcttcatttacgagcttgtagagcagttcgggcttagcagcaaagtgaccgccgccgaatgcgtcaacatagtgaatagcggggctgtcattcggtttgtctgccgcctgaataccgccctcagccatcatggtgttagcgtctccaatacggagctttgtgactatcatagccttagcgccgttgttgtcagcctcgattgcagcagaagcaccagctccgccgcctccgattataagaacgtcaacatcgtagtcaaccttgttgagatccacgtcgctcgcgctgattctggaatgtgcttcgagaagtgcggcaagctcatgcggaactttttctccggcattgacgccgactttgaggttttcaaattccgactgcttatagtcggggtggtaagtttgaaggagcgtgtccttttcttcggcagtcattctgcgcggttcaaggactgtgtttgcttctctggcagcctccacctttttcatggattcatacatctgtcctgtgtacatagacatagtggtgcgctccttccttacttttctatttctctgttgttgtagagttccttcatttcctcgataggcttctgcatgagggattcgaggagctcttcaaacgtaccgttctttatttcctgtactctgtcttcaaggtgcttgcactcgggagcgagatacttaccgttgagacgtctcgcgagcattgctacctgaggatgagagatacctgcggggcatcttgatgagcatacgccgcacattacgcagtcaaacgaaagctctgcgcacttctcaaagtcacctctctgcgcatatgcaatgtactgcatgacgttaagtccctgagtacatgactttgtgcaggcgttgcatccgatacagctgtaaatttcgggataaagctgcatcatgatggcttctgtgggctttaccttttccatatcgtaaacctgctttacaagggggaagaaaggcagggttgcgatatacatattatctataaccttggtctggcaggcgagacataccttaagctcacggtcgccctttactctgtagatggtagcgcacgcaccgcagaatccgttacgacagccgcagccgcggacaagctgatatccggcatattccatcgcgcccataatagtaaggtttgacggaacctcgtactgcttgcccataataaatacatgaaccatattttccattattatatctccaaaaatatcatgaaatcatgggacgcttatcaatactcgtccggaagctcgcccagttcgtcaaagcggaacacgggaccgtccttgcagacatacttcgcgccgatgttgcatcttccgcacttgccgacgccgcacttcattctcagctccattgtggtgtagatctgagttttctggaagccgagctctgtgagtccgccgagagtgaatttaatcattatcggaggtccgcacatgagaacagtctttttaaggtcgggagcaagctcttttacgtagttcgggatgaatccgacgtgaccgtcccagccttcctgttcgcggtcgatggtgaggttgacttcaactccgtcgtcctgcatccactcgtcgaggatttcatggtagtcaacaaggtcgtccttggagcgcgcgccgtatataacctgaatagcgccgtaattctgtctgttgtcgcggacatagttgattacggaacggagcggagcaagacctataccgccggcgatgaagagaagatcctttcccttgaggtcggtttcaaccggaaacggcttaccgtaaggaccgcggatggtgatttcctgtccgacgtccatcatgtggagccattctgtaaggcatccgcacttcttaatggagaattccatatattcgcggttcgtgggggaggatgttatggagaacatagcctcgccgacgccgggaattgacagcattgcgcactgaccgggcatatgctcaaacggcttttttccgtccggtgtgagtacgcggaaggttttgacgtcgggtgtgtcgattctgatatcggtgacaacgccaatatgaggaattaatgtttcgttcattattttgattcctccgtaagttttttcataaccttaacgatattcatgtgaatcgggcatgaagcgagacatctgccgcagcctacgcatccgaagataccgtcgttgttttcggggtaatatacaagcttatgcatgaatctctggcggaagcgttccttctgagtaagtctcgggttgccgcctgccatctttgtaaagtcggagtacatacagctgtcccagcatctgaaacgtcttacgcctgtgtttgtcttaaagtcgcggatgtcgtagcactgacaggtcgggcagacgaatgtgcagggaccgcagccgaggcaggcttccgaaagctcgctccactcgggtctgttgaagaattcctttgtcttgcctgcgccgaaagcggatgtttcaagcttagcgagaggaagacgcgccatgatctccttggttttagccttagcttcttccgcgccggactcgtccttttcttcaaaggcatatccgatatcggcgaggaacttctcacccttctctgtctttgcggaaacatagtagccttccgcagctgttgtaaatacaacgtcgccggcaggttcggatgaatctataccgaaagcggagcagaagcaggtttcgtgaggatggtcgcaggacatggagatgataagagaatgctcgcggcggttcttgtagtatgtatctaccggctcggagaggaatactctgtcgagaatgtcgaagctgcggacgtcgcacgcacgaacaccgaatatagcgaagttttctctttcttctctcgggtcgattatatcaattttcttgtggtcgattttaaactcaacaaggttttctgtctgcgggaagaagaaatccttcgcgcttcttgtagtatggagagcgcccgacacaacagtaccctcgctccagagcttatagtcagcctttcccgatgtgttgtctacgggaacataaaccttcatcgcctttgcagctgctgcgaggaagaggttgaggtctgatttagcgatatacttcattattctacacctctttcatgtacaactgagggttcagcgtcgccgaaggtataagatgtaagcggatgacgtgattctgtgtctgtaccggcagtgtagtcgccgtaaagctcgtcgatatccttgatgaacttacggttgaggaggtggagcggaatatgctcggggcagactctggagcattcgccgcagtcggtacatcttccggcaacatggaacgcgcggattatatggaagttcttttcttcaaatgaatctgcggcagccttctgagcaacgccggagttcgggttgtcaaatacgcactgttcgcaggtgcaggcgggacatacattacggcaggcattgcagcgtatgcatcttgaaagctcgcctctccagaactcaaagcgttcctcggaggtcatttcttcgagcttctttacgaggtcaaatctgccgcagtcgggattgtcttctccgtcctcgccgataagctcatcgtaaacaacgtggtgcttgctcttgcaggtgaggcagcggtcggcggtaacgtcagccttagcaacggtagagtcgccgtagatggtctttaccacataattgtcgccgtcttcttcgatacctgtgataccgtcgattccgctggacttaatcttgttcacgtcagccttgccttcgcagggaatgccgataacgtagatattgtcgcggtttactctgtgctctgcggtgagctgattgagggagaacgtatcacatggctttaagaatgcgagaatctttccctcttttgcggattcctttacgagatacttcgagacattagccgcgcagaatccgtcgtaaacgaaatccttatctatttcctccgcgctttcaaatactgcgggagtggagtcgtaagcaaattcgcctgctttccaaccgataacgcgtgtaacggtaccgtcggcaagaagctccttcgctcttttgaccattgtttcttttacagttatttcttgcatctcagatcctccagtctgcggttaggtccgagctttgtaatttcttcggcaaagctgttcattgtagccgcgaatttagctccttcggctgcggaaacccattcaactctggttctgtttctctcaataccgaggtagtcgagcatactgaacagaagagtcatacggcggcgggcatagaagttacccgatgtgtagtggcagtctcccggatggcatccgcagaggataacgccgtcggcacctctctggaacgcgcggagaatgaacatggggtttacacggcacgagcagggaactctgataatcttaacgtttgcggggtactggagacggtttgtaccggacaggtcagcgcccgcgtatgaacaccagttgcagcagaatgccactatggtcgggacgaatttttcgttttcactcatttgcatattgcgtctacctccgccatgatctggttgttagagaatccgaagagatccattgcgcctgacgggcaggtaacagtacaagcgccgcatccctggcataccgcggggttaacgcttgcgacacgtcttaccttagttgttctgtcgggcattctgaattctttttctacatatgtgatagcgccgtacgggcagacattagcgcactgcgagcatccgttgcacatcatttcgtttgaatgagctacgcacgggttgcaggtgagcttgtccttaacgagaagtccgatgaccttagccgcgcaagcacttgcctgagatacggtttcgggaatatccttcggaccctggcacacgccggagaggaagatacccgctgtaggagattctacaggtctgagcttcgggtgagcctctgtgaagaagtcgtttgtgtccatggaagctgtgagctttgttgcgagaggacgcgcgctcttgtcgggttcgatagcagcggcaaggacaacaaggtcagcctttatatggagctgttcgttcatgatgaggtcggacgcctgaacatcgagagtgccgtcagcctgaggagataccttgccgactgcgcccttgatatagtgaacgccgtagtcctcgacagctctgcggtagaattcatcgaagttcttgccgggagtacgcacgtcgatatagaatacataaacttccgtgtcggggtacttttcgcgggtgagcattgcgtgctttgcggtgtacatacagcatatcttggagcagtactgcttgccgcgctcgggtgtgcatcttgaaccaacacactgtacgaatactattgtatgaggatgcttgccgtcggagggtctgaggagagtaccggatgtaggacctgcagcgttagtaagtctttcaaactcaagggaggtgataacgtccttcgactggtcgtaagcatattcgccgtactttgagacgtcaatcgggttaaagcctgtagcgactacgatagcgccgtacttttcttcaacgaatgtgtcggtctgcttgtagtcgatggcgccggcggaacataccttggagcatacgccgcacttgccgtttttgagcatattgcagtggtcggggtcgatagtcgcaaccttcggaactgcctgagcgaacgggatatagattgcacggcggttgtccataccgaggttgaattcgttcggtacgttcttcatcgggcatttctctgtgcagagtccgcagcccgtacattttgtttcgtcgacaaatcttgcttttctcttgatttttacggtgaagtttccgacaaatcccgatacggaatcaacttcgctgtaggaataaatcttaatcttttcgttctgcgcacagtcaaccatcttaggagtaaggatgcaggctgcgcagtcgagcgtcgggaaggtcttgtcgatctgggtcatcttgccgccgatagtgggcttcttctcaacaatgtcaacctcaaatccggcttcggcaatgtcaagcgcagtctggatacccgcgataccgccaccgattacgagagctctctttacaacggggctttctcctgccgtaagaggggtgttgagcagtacctttgcaattgcggcacgaccgaggatgatagccttttccgtagcttcaaccttgtccttgtgaatccatgaacactgttcgcggatgtttgcgatctcaaccatgtaggggttaagaccaaccgacgctgccgccttgcggaatgtagcctcgtgcattctcggagagcatgagcatacaacaacgcctgtgagtttttcgtttttgatagtgtcctttatcaggttctgaccggattcggagcacatatatgtatagtcggtagcgaatacgacgcactgttcacgtccgagagcttcagctacggcttttgtgtcaactgtacctgcgatattagtaccgcagtgacatacaaatacacctattctctgcattattcttcttgcctttctttaaaaaaggttaccgtattttacttggaatattttctcattgcggtcataagagcctgacccggcatatcgtcgtcgagctttgcggggatatcgtccgctttcatgtggttcattccctgacggcggacagcttcaactctgatagcttccactacctttgcgggttcgactccgcgcgggcatctttctacgcaggcaaagcaagtcagacatttgtaaatagactccgactccataagcctttcaatgtctccgcgctcgacaagatatacgaagtgatgcggatgatattccatctcgtcatatgacgggcaggtagcggaacatttaccgcagcgcatacattttcttacgtccgagccgctgatacggagaacctgttcctttaaatctgcgttcatgtttaagtcctcctttagttaatctcgataccgagtgcttccgcgagaacctcggtgaaatattttatctccagacctgtgccggagtgctttttaatgttgtacatacatagagggcaggcggttatcataaagtccgctcccatatcctttgcggaggaagcaaccgcgccgcttctcttctgtgcctgagccgtgtcctcaagagttatgtatccgccgcagcattcgttgcgcatggggtaaattacgggttctgcaccgagcgcgcggataaggttttccatgatttcagggttttccggatcgtcgaatttcagaactgtggagggacggaggaggagacagccgtagtacgccgcgattttctttccggtgaggggcttgacaacctttttcttcagttcgtcgaagcctatctcgtctctgagcagttcaaggtagtgaatgacctttccctctccgtgatattcaaaatcgggagcgaggtaattgttcactctcatgtcgaagtcgggattgacggcgaactcgtggtttgtctgcgcaagaacgttatagcaggcggagcacaccgtaacgacgcgccccgtgcttttataaccgttggcaagcgctctgacagacggcagctttgtcgcaatctcatccttcgacgaggtgtacgcgccgccgcagcactgccagttttcaatttcctcgaactcatagccgaggactgccgccgactctctcgcatatctgtcaaggtcgcgcgctttatttttgagcgtacaacccggataatacgaaatcttcatatatttaactccaaatcaaatatttgcgatgttttacgccatgtcttcgggcttaaagacctcatcgaagcgttctgccgtgaggaatccgagagctacgcaggcttctttcagagaaatgttctccttgaacgccttcttcgcggtctttgcggcattttcgtagccgatgtaggggttcagcgccgttacgagcatgagcgaattgtagaggttgtcatgcatcttgtcttcctttgcacgaatgcctaccgcgcagttgtcgttgaacgatacgatagcttccgcgagaagacggacggactggaggaagttgtagatgcatacgggcatgaatacgttaagctcgaagttgccctgtgatgctgccatggaaaccgctacgtcgttgcccattacctgaaccgcgaccattgttacggcttcgcactgagtggggttgaccttgccgggcatgatggatgaaccgggttcgttttcgggaattgtaatttcgccgaggccgagtctgggaccggaagccagccatcttacgtcgttcgctatcttcatcatgtcgcaggcgagagcttttaccgcgccgtgagcgaatacgatctcgtccttgcttgtgagagcgtggaacttgttttccgcggtttcaaagtgcttgcctgtgatagcggacaccttttcggcaaccttaacgtcaaatcccttgggagcgttaagacctgtaccaacagcagttccgccgagagcaagagttttcagtgcgggaagagcgcgttcgataagctcaacgtccttttcaagagatgaacgccagccagagatttcctgagagaactttatcggagtagcgtcctggagatgtgttcttccgctctttgtgataccctcgtggatgtgctcgagcttgcggaaggttgtgatgagcttttccgcagcggggatgagcttgtcttcaagtgcgcagactgccgcgatgtgcatagctgtcgggaaggtgtcgtttgaggactggctcatgttgatgtcgtcgttcgggtggcagagcttctttccggcaatctcgttagcgcggtttgcaatgacctcgttcgcgttcatgttggactgagttccgcttcccgtctgccatacaacgagcgggaaatgttcgttgagggagccggacataacttcatcgcaagcctctgatattgcggcgagcttttcgtcggtcattttctcgggcttcagctcgttgttagcctgtgcggcagccttctttaatacgccgaaagcacgggtaatctcgcggggcattgtttcgatacccacgccgattttgaagttctcgtggctgcgttcggtctgagctgcccaatacttatctgcgggaaccttgacctcacccatcgagtcgtgttcaatacggtattccatagtatattccttctatttaattatatattaacgttttcgataaccgctctgagactgtctgcgctcttgtgaaggagagcaacttcttcgtctgtgagaggtgtgagaatctttccgcggagtccgtcgcgtcctacgatgttgagtgtgctgaggcagatgtcgtcaatgccgtattcgccgtgcatcatggaggaaaccgtaagtgttgtgtccattccgctaattatgcacttgcagatgtggcaggtggaaagcgcgattgcatagaatgtagcacccttgcgctgaatgattcttccgccggactttctgatgtatgtttcgatttcgtcgtggttgatgggtgtgtagatgttgtccttgcttgtgataacgctgtggtattcgtcgacgggaacgttggaaatattggcgattgaccacggaacgaaggaagagtcgccgtgctcaccgaaaacgtatgcgtgaacgttctgacgattgatgttgtagtattcggaaatgcgggcgcgaagtcttgcggtatcaaggatagtaccggagccgatgatcttgttttcgggaagatcggagcacttgcaccatgtgtaggtaagaatatcaacagggttgcttacgataacataggtagcgtcgggagcgtactttgtaatctgaggaatgatggatttaatgatattaacgttggtctgtgcgaggtcgagtctggactggccgggctttcttgcaacgccggaggtgagaattacgatatcggagtcgcatgcgtcgcggtatgttccggcatagatggatacaggagggcagaaaggtgttccctggcgaatgtcaagtgcttctccgagagccttttcttcattgatgtcgatcattacgatctcggttgctataccgcctacagcgagagtataagcaattgtcgagccgacgcttcctgcgccaataatggtaacttttgtcataagagttcctccaaactaaaatttctttgaaaaagccgatatttcggcaaaatactctgtatataatattatatcaaatcggaactgcaatttcaatggcaagcgcacattttttatgcagtcaggcaacagttttcttttggactagtttgttttttctgtatattttgataggttttgggggcggcagtacctttgtgatatagcgttatatcagttttgatatacctgtgaagaatatgcgcgaaagctccccgacatccgagacagtaccgcgtggttttggcgctgccttcactcaaaatgccggggagcgatgatgatttacagtttttcttcgagtatgtccgctattctctcacaggcgtgtccgtctccgtagggatttgacgcatggctcattttgtcgtattcgttcttatcctcaatgagcttcttgaacgcggaatatattacttcctcgtttgttccgacgagctttaatgttcccgcggcgattccctcgggtctttccgttgtgtcgcgcatgacaagcacaggtttgccgagtgaaggagcttcctcctgaattccgccgctgtccgtgagtatcatatagctgcgcgcgatgaagttatggaagtcgaggacgtcgagcggctctatgatatgcactctgtcgcagtctccaagctcttcctcagcggcttcacgaactacgggattcatgtggatggggtatatcgcacaaacgtcgggatgctcgtctatgatacggcggatggcgcggaacatatggtgcatgggttctccgagattttctctgcggtgagccgtgattattataagcctctttccgtcagcccattcaagctcgggatgagtataatcttcctttaccgtggttttgagcgcgtctattgcggtgttgccggtcacatatatcgtgctctcgtcctttccctctcgtagaagattctgccgtgacagctccgtgggggaaaaattgaactttgcgattatgctgacagcctgcctgttgaattcctcgggatagggagagtagatattatatgttcttagtccggcttcgacgtgtccgacgggtatctgcatatagtagcacgcgagagctgttacaaatgtagttgaagtatctccgtgaacgagtacaacgtcgggacgcacctcttcaagcacggactttattctctcaaggatattcaccgtaacgtcgaacaaagtctgcttgtccttcattatggagaggtcgtagtccggatgtacgtcgaacgcttcaagcacctggtcgagcatctgtctgtgctgtcctgtcacgcagagagttacgtcaaggttttctctcgatttcagctccttcacgagaggacacatttttatggcttcgggtcttgttccgaaaaccaccataacttttttcataatatagcctttcggttgtttttcttcaattatattatatataaatgcaattgtcaaggtaacgctgtcaggttctggtggtgtaattgcgcagacagatttttcgtcaagctaaacaagctgaggaagcaagagtagactcctctgctgacgaagcttgtgacgcatggcggaaaagatgcaagcaagtgcgccgccaaaacgttagctgtgagcctgacagtgttgccttaagctcctataatcgcgccgacgccgtaggatattatcatcatgataacgccggcggtcagcactccgagcagtatcatcggaaaagcgtttttcagcctcagcccaagaagcgcggatatcagagagcctgtccatgcgcccgtacccggcagaggaatagcgacaagtatgaacagtccgagcatttcgtatttttcaatcacgtccatcttgttctccgcgcgcttttccagcttttcggcgattccggcgagaaatttgctttttttcttcatccagtcgaatatcttgcgcacgaacagaatgataaacggcacaggaagcatatttcctatgacgctaaccgcaagcacaccgaaatacggcagtccgtttgcaactccgtacgggatagctcccctaagctcaagcaccggaagcgccgctataccgagcacacacaaatatttcactaatacgctcatgaagtccccttagatactatcttaaaaattttcaatacattatataacacattccaccgcgtattctgccgaaattttgttaacttttgcgcgaaactccgtttatccgaatttctaatcatgctttaatattgacttgacggattaatgatgctataatcaaagcattaaataaaccgtaaaggagtttacaatacatgacatacagtgaaaaagactacacggagctgaactcaaagactatcgacagatggatagacgaaggctgggaatggggcatacctgtttctcacgagacatataaaaaagctctcgacggagactggagcgtgcttctcaccccgactaagcctgttccgcgcgaatggttcggtgagctgaggggcaaaaagctgctcggtcttgcgtcaggcggaggtcagcagataccgctctttaccgccgcgggagcagaatgcacagtcctcgactactccgaaaagcagctcgagagcgaaagacttgtggcggagcgcgaaggatatgacgtgaaaataatccgcgcggacatgacaaagcctcttcccttcgacgacggtgagtttgacataatattccatcccgtctcaaactgctatgtacgcgacgttcttccaatttggcgcgagtgctttagggtactcaaaaagggcggctgccttctcgcaggtctcgacaacggaatcaacttcctgtttgacgacgacgagacgaagatggtaaacgcccttccgtacgatccgctttcaaatcccgctcaatacgagacagccatgaaaaacgactacggtattcagttttcacatacgatagaggaacaaatcggaggtcagctcaaagccggattcactctcgccgacgtatacggtgacacaaacggcgaaggatatctccatgagcttaatgtaccctctttctgggcaactctcgcgataaagtgattatttcataattctgagcgcgttgaggacggcaagcatcataactccgacgtctccgagaaccgcaacccacatatccgcataacccatagctccgagcaccatgaacgcaaccttaacaacaagcgagaacacaatgttttcgattacaatgcgtctggtcctgcgggctatttctataccgtcggcgagctttgacacttcgtcggtcataagaacgatatctgacgcttcgattgccgcatccgatccaacgccacccattgctattccgacgtcggcagatgcgagaacgggggagtcattgattccgtccccgacaaacacggtagtgccgtttgatttctttttaatctcgttgaattccttgagctttccgtcaggcagaagtccggctgagaatccgtcaagtccaagctccgcggatatcttttcggcggcttcttttctgtctccggtgagcattatcgatcttgtcacgccgagctttctcagtctctcgatacctgccttgctgtcgggcttcaatgtgtcggtaacggtgaggtgtccgaggtaaactccgtcggctgcgatatagaggttggttccgccgctgttctttacttcgtttaccttgccgcactcttcctttatcatctcatagtttccggcggagataacggttccgttgtatgttgccttgattccgcgaccggggatttccttgacctcggtaacgtgattcttgtcgatgaatttaccttttttgttgtatgcttctgttacggatattgcgataggatggttcgacattacctcggcggctgcggcaagctccagaagtgcgtccgtgtctccgttttcggctgtaatgtcggtgagagtgaatttgcctcttgtgagagtacctgtcttgtcgaatactgccgtgtcaaccttcgcgagggcttcaagatagttgcttcccttgatgaggatacctgaacgagacgcttttcccagtcctccaaagaatgtgagcggaacggagataacaagcgcgcacgggcaggagattacaagtgttacaagaccgcggatgagccattcactccaaggctgacggaagaagagcggcgggatgacagcgacaagcactgcgattattacaactgcgggagtgtatttgcgcgcaaacttcgtgatgaacgactctgactttgctttgttttccgctgcgttctccacaaggtccattatcttctcggcagtggagttttcggcggtagctgttgcttcgatatagataacgccgtcgcggttaactgcacccgagagaatgctgtcgcctgcttttacggtggcgggaacagattctccggtaagcgacgaaagatcgagcgtgctgacgccttcatgaacgataccgtcgacaggaactctttcgcctgccttgactacaagaatatcgccttttttgacttcataggggtcaaggtcaactgtttctccgtcctttacaacgtgagcagtgtcggggcggatgttcataagactgctgatggagtcacgggaacggtttaccgcaaggtcgctgagccattcgccgaactgatatagcagcataacggcaacggcttccacgtattcgccgagagcaaaagcgccgagggaggatatggacataaggaagcattcgtcaaaaacttcaccgtgaattatattcttagcggctttccagactatatcgcagccgactatggcatacgcgacaattgacgtggcaaggactgcccatgtgggaacagttccgattttcgacataacgaacgccgcgacgaagataacagcacccacaatgagacggggaactatatacttgctttctccctcttcgtcatcgtctccgtgtgagcagcaggagcatccgttactgtgtgaatgtccatgctcatttccatgcttgccgtggtcatgctcatcatggcagtgtccgcagccgcattcttcgttctgatgtttttccttttcaacatcattcttgttcttttccatatcgtactccttgaatcgtagtttattcgcgggtattgtataatagttgcgcaatcattcaactttaccgcaaatgatattccctcatgccgattttcttcggtatcgggggaattatttttcgcggatatgctcgaagcctatgtcgagtatcgcgttcacatggtcgtcggcgagtgagtaatacactacctgaccttcgcggcggaacttcacgagattcgcgagcttcaacgccttcagctggtgagaaaccgcggattttgttattccaagcagagcggcaaggtcgcacacacacatttcgtgcagctcaagcgcgtggagaatctggactctcgttccgtctccgaacattttgaacagtgaagcaagctcgatgtactcgtctttgtcggacagctttctctcgacctcgcgcacggtttcctcgtgtatgacctcgcaggcgcatttcatttcggactcagccaatgtggttctctcctttgttaattagttgagcgattgttcaactgtattatagtacgcgcggctgtgtttgtcaagagctaaaatctcacttttgttctgttctgcgtaatgcacaattatcattgccgaaacacgcaatattatatacaacagaaacataaaaaagcactcccatagcggaaagatacatgacatatcctccgtcgggagtgcgtttgttatattaaattatttcttcttctgaccgtagtatgcgccgggtccgtgcttgcggtcgaaatgcttgcggagaagctcttcttgaatcttctcgatattgccgtagagagcgttctgcatcatttcggtgttgtacgcca

SEQ ID NO: 4204 - DNA, 6291 bp, Unknown
  16S sequences of unknown bacteria
cagttcggagattcaccgttgaagcagatccaggtgtagccctcgtgccagcggcaggtgcagcaggtcctttcatattccatgttttcaccaccaaaagtcacagaatccccgcaccgcatcttcatccacgaaaatttccattacgaatacttgttctctgccacagcactggcacacttcaccggtagttccgtatggtttcaaaatacattgtacggtaggaatccgtacttgtctgccgtggttcagtccttcggacggatattcttttccacagaatttgcaaacagccgttttcccgacgcaaacgatcatactatcatttccagcttcataacctcaaaatcttcaaggtttgggtgccgttttttggccgcgcggcgggctgccgtgtccgcctcttcctcgttgtccgcctcaacctcaaattctcccagacaaacctctccgtaagattcgtaggctataacttccgctttgtatttcattcctcgttggctcctttttctctcagctcgattttcggccgtggctggtcgctgcgattcatcgggtcgtagtagctgacacagcccggcataccttccgggttatcgtgccaggccagtgcgtgccggataaccagccagacaatttctgcccggtacggcaccttcatcacatccgagataggagcggaaaggacgcatctgttatacagcctttccatttcctcccgcatagtgtccctgcggtcgattgcaacatcaaaagcattttcccgctgctctttactatgaaaagcattattttccaagtcaaagtaaaactttgccatgcacagatcatcggccacgtcccagaactggcccatgtgcaggcgcaagtaccactcgcaggcagcctgtacagcttccgccaccgggcggctcatggtcagcgtgatggttttgatttctgccggcgcatcactcttcttcgccatagtgcggctcctttgctcccggccaatggcggcgctggctgcggtcgaacttcctggccattgctgccacctggatggcttccacggccagagcaacagcccggtcatatacgtctttcgttgagatctgcggattattggagtaaacgtccatccacatggcgttaagttcccggcgcaggccatccatttcctgtgcagcttccacagcttcttcctggatgaccgccacgccctcatgcggcccggcaaacatccgaaactttttgttggctgcggccagttcaattttgaccagccgcttcacatcattcttcacagcgtccatgttattcctccacaaaaaccacgttagcccagctcgttttatactttttcccgttgacctttaccgaaataaccggccagtcgcaagaccaggagccaccttcgtatgcgcctttgtccagcaacgtgccatccggtgaatagacatacaccgtcctggccggatattcgtctatccccatagctttgtcagcttcgcatcccgccagcgctccgcacagtgcaacagcgccaattgtcagcgtcaacgctttcaagacattacgcattttcttcgtcctcccgctcgctcaaatcctcaacgtccgcagcgtccttggtctttttcaccatgtctgcaatggcatacagcccagatttcgccagaggttccagctttacggggattacagcaccgcgtaccatcataccatccttgatgacatagtaacgtccgccgcttgccatcttccgcacacagtatttgaaatagccgctcttgcgcatttcatccgccaccggcatgatctgctttgcgtctacaaagccgattgttcgggaagtcggttcaaccatcggaaccaggttacacccacaatagcggatgctgattctgccattttcgcagtccagctcgccacttgctgtatcgtcaaggttcatgccttcaatgttccgaatatcgtccgggcagtcactttcaaaatgaatatcgttccattccttttcgctgatacccagcagagccgccaattccctttcattttgtgctttcgggaagtctgtcagcgggaagattgctgtttttgttccgatgtacagatcacacccctgaccatcgttatagaacaccttgtagagcttgcagtattcgtcagccttgataagttttgcgattgccgccagtttcatttgtaactcccttcattttcaatcacctgaacctcaaacgtcttgtactctcggtagtgatcttctgccatcttttttgccttttcaacggccagctctgcgctggttgctgtgagcctataaggcagccacgcgggcaggccgctttcaccggttgctttcagcaggatataatacctttgcattggtgcgtcctccttccgattttgggcaatcccggagttgaaccgggtgcgggcctgttcccatgctcacaaaaaagaccgccgcggtgggcggcctttatagtggagttcgctattctgtttttagaatctcttccgcctctgccttgtgcttcagcacgctatccctgcaagccgtgccctcgtcccggatctttcccagcgggcactttgcacacggcaggcagttctgccgcatctttttgcagagaacattccttgccgccagaagttccttcctcatcatgcgaacagatacagccagcagtgtttaatcagcgcagcgggcacaaaaaatatcaccgctgcccacagcgccacgcccagtacaaacaacaagattcccagtgtctttacaagtccttccatacttttcctccaattactcaagttcatctccccacgcatcccatccggttgcgtgttggcgggcaaacagttcgattctcggcacatcgcccagcaattccacaatacgctgtctggcttcatccggttttacgctgtgcgcttgtataggggattcgattacctggtgcactgtatggcttttgaccaatgcttttgccttgaatcccggcgtcactcccaacaagcaaacctctgcatttgcacgagtgtaagcgcccattccataaaagtttccgcccgacttgtattttttgatccagacgaatgccgccgttttgtatgtaaatccccatgcgtccataaccttcagcgcatctgggatggttggaaatgtcgcccacatgaacagcgcgcatccctgccccccccccgcaagctggcgaacgggcaatgcgcaaatgtcctcaacggtcattgtgtggtagtgctgcgctgcgttcccgcggcttttgggtccagttccatgctggcggtaactccacggcggatctgcgtagatcaccgtatacttcttgtccggcagtttcatttctgattctccttgaagcatttatcgctccgcaaaatacaagtccgatctgcaatcactgcccgatcgtcccagtattcatttgcccccacttttctggtgtcgttcctgaagaactctttccaggaaggcaagttctcgttgactgcatcaaaatgcagtccccacctttcgcaggcggcaacggcttcttccaattcttttccttgtctgcaagtccagaggatcagcccggcgcccttagcttgctgtttcttggcttcgtcaataatgtgcagaatcggctttccgatgttcgggtactcgttcgtgcataagcatccatcaaaatcaatggcgattgctttctgcatttttactccgcctcctggatgatccaaactctgtgctgtccgtagccatcccagttcagtgcatctttgtggctgccggaaacggcaacatccagatgctttccttttacgctggctccggtatcctgaacgattctcacgcccacatcctcaatgtagaggacggtcccgaacggaaaaacgtccgggtctgctgccaccgtcacgtctccttcaaccggcgcgctgctggcggtaattcctgttccggttccacagatgtgctcccgcttttcggtgcagtatgccgtgcagaggaagtctccggcatcctctaccagtaactttccatccaaccggtcccgcgctttcagcgaatcccgcagggtatctgcataccctgcaatttctttcgacacgccctcccagtcctcgtatctggacttgtaaatgtctcgctggcattccagatcattgattctgtggtaaagcgcatttgtctgtacgccagcaatcaggactaccaccagagcaatttttcctgcatcaattttcatgttcgttcctttccgggaagtgcttcttcgtaacggcgattgggaactcttcgatttccgatgcccaccgggcggttccagttccgtatgtagtctcccataccagcgggaatccgccgatgccatcaaaaaggcttcccagctttgcgccatctcccatgtatgatttcatcttctgtgcaatccagaaccactgcggtaacgcgatgctgtttcccagtgccttgtatcgtgggctatccgcaggcttgtgcttcttgcccttggtgtccacccactccccgatatccgtccagccgtccgggtagccttgaaggcgttcgcactctgtcggtgtcagcctgcggacgatccatcttgttctctgcctagcaagcaccgcctgctgattcccgcccgctgtttctctggatgggagcgctgggaacgtcccatcttcaccgtatacacgccgggcctgtgcgtcccacggattcaagcagccggaatattcgattgccacagcctgcgcatcgtgcattgtgtccagtgtcccggatttttccttgctggcataggcgtgcgcctgcccgttcccgatgccgtagcttgtgacccgctccggcatggccacgagcggcgtattccccccacctgttccccaacggtcgtagcccgttggggaacaggtgggggtttccttgtaccgtgcgtcttgtgcatggttttcaaatactaccggtctatccgccgggtgatctgttaccattggaatatccccgcctccaaggcccatgctcgccggaagcgtcggacagattccattctgtgtaactgtcgcatgaatctggttactttccaagactaccggttgcgtaaaattttcttcttgaacgctgtacgctaccgcatgacggttaaccgtgtctatcgtaaaagaaatatcttctcctacacccatcccgttttgttttgttgctctatcgaccgtgttcccaccgatgcagaaactccgctctcccaccactcgatcatctctaacagggcagtttgcagtaagtccggcaacttctttccacgccgggatgcacgggtcaggatgccttgacaggctcgtgcgctcaaataatatttctccggcacgctggcctccaaggtcgaggataagagcgatacgctttctacgctgggccactccgaaatattgactgtccatctgtcgccaagccaaagaccatccatttccggcgattgctccggctttgctccatctgccccccctcggaggtccaggaacagcagcgtctgcttgtccaatgcgggcaagttcttccagaactgcgcggaagtcctctccgctgttgctggaaaaggctccgggcacgttctcccaaatagcgaaagttggatgcagtccatttgtgcttgacctcatttcttttatgatccgaacagcttccataaaaagtcctgaccgttcacccgcaagacctgctctgcggccggcaatggacaagtcctggcaggggcttccaaacgtgatgcagtccaccggttctatttcatcgccgtggatcttggttatatcgcccagatgaatcatattgacctcacttttttgcacggacggtcggcatcgaaccggctttcctgctcacgggggatagtcagaagcaggatcatcctctatgcgtccgcatatcaatcccgcctggcaagagagcaccggacggggcggccacggcaatggcctaccgcttttgttcctgggcggattgaacagggcacttctgcgctcatgctgcggcgcacccgtgaccgctgactttcatgcgggggcggcttttacagggtggcagcacggtcttgcaccggcttgaccagtggagttaccttgctgtacagcaccatcctgctatgctggcttccggctggtttcatacctgccaactttcatgaaagtcctttgcgcaggcggggtccggcctcgcttacagcaccccatgcctaaaagggtgccctgcgccatataaaaagcagccccgcttctgcggtgcagggctgcttatcttac

SEQ ID NO: 4205 - DNA, 32759 bp, Unknown
  16S sequences of unknown bacteria
atatattatactggaggatttattatatggacaagtacatttttgataaaagcaatggtttgtagtatgaattgcagggagattattatattccttgcctgatactttccgaagaagaaaccacagcctatcgggttatgggggcaacgccacaagcagtatctaaaggagcataagcactttgtttacaccacaatgctgattgagggtacactaaactcataccttgcagatgttgacagacaggcacaggagcgtttgctcctgctgacaaagcagattgcagaacaggaaaatataaccgaacaactgaaatcagacaacgctatgttgtgggtacagaaaatgaacgagattcagtcaagagttagggaaatcatttacagcaaaattgtctacgcataataacgactgggcttaccgcccttgagtgattattagcaaaaaagaacaggcctgtcaatggcagtgctattgcactgtttatcaagaccattgacagacttgttgttttttgcttctaccttatttgtttgaataataaataatcatacttaaataggctgttgttaaccctgtatttttatatgaatgtgatacatctgccttaaaacgcaaggaatctcctctgtttaactgaaatacttccgaatcagctgtaatttcaacttttccgtcaaaaacagtgatatattcttcagctccgcccaaatgaggttgagcctgcaaatatccaccttctttaatttcaatacgatatgtttcaaactgtttatcttcttggaaaggaaaggcgggataattaatatatttttcgtcattttcaatgagaggaatgacgtcttccgatttgattaaaagcggagaagcatcgtatttaacaagagaagtgaatgacaccttatatccgtttgcaattttccaaagaattgaaattgtaggatttacctctcctttttcgatttgagcaagcatacttctggagactcctgttagttttgccgctgagtctaaagtaattttcttttgctctctaattgtttttatattttttcccatatttttctgaatatccatacgtcctccttgttgacaatatattggaccattagtataatataagagaaatacaatatatcggattattcttacactatattgactatatcaaacaaataaactaaggtcaatattttttgttcgtaaagaaaatattctatttgagattatggcaataacaccagtgtaaagttatgcctattatgattgatataggataattggcttttatgaacatctgtttaataggaggaaaaactatgttattaaaaaaagccgaaatggatgaagcaaattcatcatatcaatgtattgaagatgcaagagtataccacaattctatggggtttgtgcaatggcatccgggatatccaacacttgctacaattgaagatgatattgaagcaggtattggttatgtatttacagagggcaatgaaatttatggatactgctgtatcatcattggggatgaaccggcataccatgtgattgacggcgaatggaaaacagacagaccttatgcagttgtacatagaatggctttttcacggaatgccagaggaaaaggattatctggaaaagcgattacattaatcaagaatttctgtattaaaaatggaatcgaagcaattcgtgttgacactcaggatgaaaacaaggtaatgcagcatattcttgtacgagaaggatttgaatattgtggtctgattacttttgatggaggtccaaaacttgcatatgagtgggaccaataaattgaattgcaatacaaaaatatcctaaaacaccctgcaagacgcaaaatcttgcagggtgttttcttatgctccgatatatgtaagactgcaaggcaggtcgccctgcggtgtcgatttcctatgtcgtgatttgtccctgtcttgggagttctttctctgcttcggctgagagttatgtttaccctcttcctgaagctgtcggagcctgttacgcacactttgtttttgggcggtctatactgtttttcagcgggtttctgtccattcttgactgcttgctcccattttgcaaggtcttggttatactgtgtcgcaatagcctctgctttgcggtaagttttcataaatgcctgtacatcaggataaccgtcatcggtcagaatatcggggagggtttctagttttcagcaagttcggcttcggtctgctgtatctgtttttccagagactttcgttccttgcctttgaaaatgccagttgtttccgcaagctgctgtcgcagagtcgggagtgtgacttcctgtatcttcttgattgctttcgcctgtttctgtgcctttagcataaggttctgcattgtgcggaacttgtccatatccatattgaggactggcttgggcggcatatccttttcacggatgatggcttgcaggaattcctttgccttgcctacgataccgctgaacaggtttggaagccaaccattttcacggatcgactgaccggctttatcgtggatttcggtctgtttgattttcagtatctttgcttcttcaatacccgatacaagagccaaatccgctgttttgtttcatttctgccttgcttatgtctgtcactttaagcttttgtcagctttctttgtttttcttattatagtaaatgacagccataaaagtataaaattatttaaaagaaacatcgagataaagccaacgttctgcgtatgcatcatctttagagtaagtgcattaggtactataggcgtccatatcagcggcatcatcgccaaattaaatacacatactgaaggcactgcatacttccatatattattcttataaagcaagtacaccgccattacatcaagtcctacaaataacagcggatttaacagcatcatcagaaaactaaatatgtatttactatttcctaaattgaaagccatatcgtttatttgtgcgtttataattgtacttccatacgccataatgtacggtccaataatctcaacagataatattatactatttattattttttgcatttaccccaccatcgattaatataattattttatcaatttcatatttagccgcaagaatagtaaacggcaatttagtgtgctttttaagattaagagttgtacttgttttatactccttagtcaaaatacctgtctggttgcttgctgcaacctatgcactgccctctacataaattcctttgcactatttacagtataccatttttcatatagctctgcagctatttctcttattgagaagttcaatgccctgaatgccgggattttcggccgtaccttcgttttcgctgcagcatgcaagcgcaagcgcagtagttatcgtaaaaatcagcatcgttcaagcagcaaattttcttttcataaaacacaccgtttctatgttttttaatcggaccatttttcatgcgataaaaaataatattttccgacatcctcacctgatgtgctatcttcaacgatttctgtaagcagtatatcttcctttttactcaagatatattttttatatgcatcggaactacttaacagtgaataggatttaaattttaaatgttttacatcaaatacaaacaaatttttttgttcgggaaaaggatttataataaataaatttttagttgccgcgttgcgctgagcgtttgtcggtgcaagatgataaaagcctggtattttttcatggatctcactcggaagctttgcatatgctccattttcgcgagatatacaggctatacgtccgttaagactctcgagaacatagaattgatctgtaagacaaaagttcattatggaatcctctcctatttcaggattactgtctgacttttccatacaaaagctttctaattccagcaaagtttgctcaaaatatttcctgccaagttatataatgcaattgaactttctttttttcgccatcgtacttttcagttagggcgtatattagttcgtcatatacagtcatacaggcaataactgttccttttggattatctacattgcacgcggtttctgcgatgatatctgctgtttttgcttctgtatctataatacctattctgtagtacgtaagcccatcttcataaggaactgcacaatgaaatacaagtttattgtttacattataagaagtctcaaatattaccgattcaggccaaatgtaagtaacatcacttgtaaattctgataagtctatttgatatacccctgtttcgttattgggcagatataaactgccatacagcttatcgtcgatatacgcgggatttcctgtaatcattccgttaaaagacttttttatttgtattgtctttttatcggtaatattgtaataaaacacatcacatacaaatgattcttcataagaatgagcttcgtttgatactgtataaattaccactttgccatccgtaaaaataggttctgcgttttgtggcagatcgagcacttcaaaggcatttgccgtgagctcctctgtggcggcagcctccgatatttatacgaagactgccgcattgtttatactatacgaggttaaaatgacaatcaggtacaaaaatattaacaaagggactaaagattttttatacatagatactccttgaatttttacgccttatattgccatttcctgtgcaaaatgattttttgttgcaagtaagccgagggcagagagatactgcacctttaaaataagcagaggcgagcggccgcagtgatttatatgcagccgcttttccaacagaatcaaacagtattacttataaagaacaaatctataacaatagattagtataaagtatgtcaggatagcaataatttgaataataactttttgcctccaagctttggctgataaaggatctttgtcaatcaaaccgcttttctttaaagttatcattttaggtacttctatacatgctgcagtaataaacaaaacagtaagccaaaattgacaccaaaaagtattgtggctgttcaagctatcagatgccgacaccgattgcataataaatgaaaaaacaaacataaaatataaaaaaatttttattaatttttttttgtccaatttaatacgcatttttgcccctcttgtaaggtgactagccggtttttattataaaaattaattatatacaaaacattggaaacaccaccgttcataaaaattttatatctaccgccatgcatatgcgcatctttgcaaaagcggttaatataccccaattaatatgttttattggatgtttttgtagtgatggtttctataagttcgtcaccgctgtaacaagtataagttacttccatataataagtgcctttgttatttatcctgtgagtcgtagattttttaaaggttcttgaggtcttatcatatgtcgtatcccagtctccgctgtagataggggttgtgactccgggttttttaatcttcatttcgatatttactttgtcgaagatatccgaagtatgcggtgtcagcgccgcactcatttccgcagtaccggttgaagaaattttaaaactttcacgatgactgtctgtgcctatgtaatacggtacggcggtatcggcatatgctgctgtaaatgatgcgagcatgcttaataccaaagctaaaattaacaatatttttttcattagaaaaacctcctttaaagttcttatataactaacacttcaaaaagaggctttcgtaacagatatttttaaaaaagtttaatttttttgcttttattttataaatttcatactttccgcaatttttaatatgagttcggaatctgtgctttccgagatttttatttcgataatttgattttctgcaagccaagtaagatgaatatagttataatttgagtttacaaacaatactccgtcatattgtccgactttgacattttctatttcaacatcatcactgttatatgttaaatttgtatccaaattgtaaaatctaataaatatgtcggagttgctgttattatttaaaaatattagggttttgtctatatcatttatggcatcgtgcagataatagccctcaggcagatattccggataccaataattgttccacccggcaagcaggctctcttcattctccgtaagaaatttaacggagccggactcatcattatagatgaaattaaagaatcttgagcggtaggcttcggaaacgcttaaggcgacaacattaaatgctgcggtgcaaacaatgagtatggcagccgctttaagtgcagttttgcggcggagcttttttcgctgctcagaattttctttttccaattgttcgattatagcaaatacatttttgtcaagatattcgggaacatcttcaagagctttcatagcttcttcattttcaatttcatattgttttgaaactgcttctgcaatttgctccaataatttgttttcatctataatatttttatcactcatttgttattattctcctgctgtataaggatttgcttttttaaataatctctgattctatgcagccgcacccttacatatgcatctgatatttcgtatatatttcctatgcttttactgttcattttatatttgtattttagcattattaaatctaaatcttccttgcttagaagagaaagagcggtttttaagaagtcatgcatttcatctgggaaaagttcttcatcaatatgattgctgacaagcgtgtcttcgctaagatatgtaaactgctgaattgcctgtgtttcccttttttgacgattaaaatggtctgctatggtgttattagtcattgctcttatataatcgcgggtatcttttgcgcttttgttcttaaatttttctatattattataaactttaatccatacgacctgaaacaattcgtcaattaaataattatccaagtctttggcgtctactgcttgttggataaacttatatacaagtcttttattattttcatatatggcttcaaacaagtggtgtgatttttccattaatttgatacatccttaaaatttaagtaggtggtagattataatgaattttaacataaacaggagcgttctacaatcctgcattttacatggggcagccgtttgttgtaaattaaattcttttatgggcgaaaaacaacaaaatttgtcaattaaagcgacatattagaaaagtccaaaaattcgggttacggccgctaaatccacggaaaacttctttactttacgctgataaaatagtaaaataataatgtatgtttaaaaaacagaaaaggtatatttgagaggagtaccgaccttgaaagcaagatattatttaaaacttgtgatttttctttttgtcttttggattttgctttccggaagatttgaagcaaaatttcttatttacggggtgcttacatcgctgatcgccagctatgtatgcatgccgcttttaatgcttaaaagtgccgacggcaaaaacgagtattttgcgctcgattttccggtatggaggctggtattgtactgcctgtggatcttctggcagcttataacgagtaactttgcgctggcaagggctatcgtaagcccagatcttgcaatcaatccgcgggtagtgcggtttaaagtggaaatggacaatcctatggcgctcacagtgcttgccaattccataacgctcacgccgggaacggtaacgatgaatgttacggatgacggcatctatgaaatccatgctctgacggatgatgccgcagacggcataagagccggagatatgcagagacgtgtggcgagactgttcgggcaggacgagacttttgtcatgttagacggcgcggatagcgcagacaatgcggacagcggcgaaaaaggagcagcggcggacggcgcaggcagcgcagagggaggcatgatatgattaaatttgtagttatacttgccgtgattgtgctcatcacaatcatcgcgctgatgctgggaagagccctgagaggaccgacagtattcaaccgcatgaatgcgctcggtgtaatcagtgcggataccataatacttatagtgcttttcgggtatctcgacggcagaatagatatgtatgtggatatagccatttcttatgcgattttaggattcgtaggctcgatagcgatagcaaaattcttgggaggtaaaaaattatgatagatattcgcgaaattattgcagtcataatgatagcgctcggaattttgtttctcgttatttccgcggtcggaatgctgagactcccggatttttattcgaggctgcatgcttcgggtaacagtgaaacattgggaatgatgctcatgctgttgggttttgtggtatacgaaggagcaaatctcatttcatttaaactgattttcatattcctgttcgtatttatcggcaatccgataggtacgcatatattatccaagacggcgtttaagacgggagagcctgtttggacaaaggataaggaaggaggcggtaaatagatgcagatacttgtaattgaagctgtattgctcttgtttcttatagcaacgacgatagccattataatgtgccgcgaccttctggcgacgatagtaatgttcagtgttttcagtttttgcgccgtgcttgcttacctgatgatgggtgcgccggacgtagcgtttacggaggcggtaataagtacaatttctacaatatttatggtagcggcgttgagaaagataagtaggtggtgtaaaaaatgaagaagatgtcagcaattatcattgcagtggcgctcggacttctgtgtctcagcatatcctgcctgccgaagataggagatccaaattcagctcctaacagtcacgtgacgccgtactatatagaaaacagccaaaaagatacaggctccccgaacatcgttacgggcacgcttgcagactacagaggctttgataccctcgaagagactaccgtaatgttcttggcaggaatgacggcgatgctcattatcaaagcggggaaaaaagaaaaaaataaggcggcagctgaacaggacgcagaaagcgttgttcaggaaaaaagcgcggccggagataaaacagagatgataagcgaaaaggaggccgaaaaataatgggaaaaccattcggcggagtagtgctgaattcagccttccgcgtaatagtgccgtttacgatagtttacggagtttatgtcttaactcacggagaattcagccctggcggcggctttcaggcaggagcgctgctggcgataggcatagtgctcgcaaggctcgtgcaggggcaggatgcaaagtttaatgtcaagggtaagcacgctgtgatgcttgcgggtataggcgcgtttatctacgcggcgacaggatttttaccgctttttttcggcggcaacttcctcgaatacagctgcctgccggtgcatatgcacgaggcggcagaagtgcatgcactcggcatattgatgatagaaatcggcgtaacacttacggtaatgatgacgattatcgatattatggacgcgcttataagggagagtgattcagatgaatagtacagagctttttaatcttttgaacgactttctcgcaagcaagggcatatatgcgcttgtgttaatactgttttttcttggcatgtttgggatgatagtgtgtaaaaactatatgaaaaagcttatgtcgatgaacataatgcaggtatctattatattcttctttctctgctttgcgcagaaggaaggcggtatgatacctgtgctcgacggagtgacaaacgaccctggagcatatataaatccgctgccgcatgcgcttatgctcacggcaatagtagtcagtctcggtactacgggagtagcgctggcgctgcttatgaggctaaaggataaatatggtacggtagaagaagacgaacttctcgggaggattagtgaatgagaaatttacctgttctgatccctattcttccgctcgcgtcggcgatgctgtgcctggctctcagcaaaataaataaaaatctcggaaaatatgttgtgattggcgcgcttacggtctcgtttgcttcggcaataggactttttgtcgaggtgatgcgtacgggagaaactatacattattatatgggaggatggaagccgccgctcggcatagagtttgtcatcgacgaaatgaatgctataattctcgttgctattgcggcagtggcgctgtttgtatgcatatattcgcagccgtttttttcggaaaaaacaagaaggctgaaaagacagaaagataacagcaattatgctgatggcaccacttggctcgaaaaaggtggcttttacgcactgtatgcgcttttatctgcgggacttctcggcatgacgattaccggggatatgttcaatctctatgtatttctcgaaattgcttcaatatcgggttatggtctcatagcgcttggcggcgacaagtcggtgatggcttcgttcagatatcttttgctcggtaccatcgcggcttcattctacctgcttgctgtggcttatatgtactcgataacgggcacgcttaatatggcggatatggctatgctgcttgcatctcataagaactcaccgaatgtttttatcgctgtaagtatgcttataattgcattcggcatcaagatggcgctgttcccgcttcacggctggcagccggacgcttatacatatgcgcatcctgcggcagctccgctgattgcaggacttatgagcaaggcgcctgcgctggcaatgctgagatatatgttctatatcatcggcgcagacagcccgtatgtggcaaaagcactaactgtaataggcttcctcggagcctgcggtatcattctcggatctgtaatggctaacgcgcagagggattttcgccgtatgctggcatattcatccgtagcccagataggctatattgcggtcggactttcgcttggaaatgcttatggcatcatagctgcggttttccatattcttatccatgcatttatgaagagctcgctctttatggtaataggagcagtgcgctatcgctatgacgaagtgcttatatcaaagctcggcggcctcaacaagcatatgccgctgacgacggtgacgcttgtcattgcagcgctttcgatggtgggaattcctccgacgggcggcttcttcagcaaatggtatataattatgggctcgcttgagagcggtcattatttctaccttgtcgtgcttatagttagctctctgctcaacgcgatgtactttttcagagtgctggagactgtatttataaacaaagatgcggagcttgaagaggtgcggcctaaggggcgttttgagcttccgcttcagatgcttgtaccgattgtgctgttcggaattgtgataatagcaataggtgtgctcaatgcgcatattgtagctgatgttttaagtttgggattgccggaggtgcttgcgatatgacgataataagtatcagaccatttttggcagtaggtgtgtcgctgcttgcggcattcctcataatgctttcaggcaaacgtccgaatttgcgcgagagcttcacggttgcagcttcgatcatcaaaatgctcatagtattttctatggtgcctgctgtgctcgaaggctcggtgtacgaatacacgctctttaatattacggacacggtgggatttacgctcaggacagacgctgtaggtatgctgtttgcgtgcgtatcttcattcctttatatacctgtcggtatttacgcaatcgggtatatgcgcggacatcacgaaaaggagcagaccggattttttgcggcctttgccgtatgtatttcggcggctgttggtattgcccttgccggaaatttgcttacattctttgtattcttcgagctgcttacggtagcgacttatccgctcgtgtttcatgcaagaacggaggaggcgagattttcgggaagaaaatatcttatatataccctttccacggggcagcttttgcttgcaggaacaggagtggtgtactatatagcgggtactctcgattttaaagcgggaggttttctcacgatggatatggcgccggtatggcttttgcaggtgctcttctttctgctcactgttgcaggcgctgtcaaggcggggcttatgcctcttcacggctggctgccgtccgcgatggtggcacctacgccggtcagtgcgctgcttcacgctgttgcggtagttaaggcaggtgcattctgcattataagaattataggctatgtatatggcccgtcgctgcttgcagatctcggcgcagcgcaggtgctggcgtggctggcggtgtttacgattatagtttcatcgctcatagctatgaagcaagacaatatgaagaggcggcttgcctattcgacgatcggtcagctttcatatgttgtgctcggcgcatctatgctgtcgccgctcggtatgctcggagctatgtaccatatagttgcgcatgcggtgatgaaaattacgctctttatgtgtgcgggcgcggtgattgttacaacgcataaggaaaatatcagtgaaatgaacggtataggaaggagaatgccgataactttcggctgtttcacgatagccgcgctcggtattgccggtatgccgtttgtggtgggatttataagcaaatgggatatactgcttggcgcgctcgaaatagggcagcctctatatctggcggtgcttgttgtcagcgcgcttcttggactttcttatctgatgcctgtctgctatatagcgttctttaaaaaggatgagacaggggagtttgcggaatacggagaagcggataagcgtatgctgcttccaatatgcctgacagcagctctctcattgatacttggtattatgcctaacttcggagtgcatctttacgatcttgctgaaattgcggctaatgccgttacggcaggtttttatgagtctgcacttatcgttacgacaagctttgcgggaggtgcgctgttatgatgaaaaaaggaacgaagagaaagatatatctgatagctgcggttgtgtgtattgtttctgttatcgcggaaattatgtttgcacatccacatgggcatgagatatggcatacggtgcccggcgccgatatagtgatagcgtttgtcggcggctggatacttatacttacagcgacaaaaataatggcgccgatactccagcgtaaagaggattattacgacggaggtgatgataaggatgaataatattattcttcatccgggaattattctgattttgtcgggaataattgcagcgcttgtaccggaaaaaataagaaagattataatgatattgggccctgcaggcgcaattactgcaatgcttgcgcttgattatgggactgtgcttactgtaccttttataaacgggagcgagctgatgctcgtaaatgtcgacagactgagctatgtgtttggaatggtgttcagtatgatgtcgctcatcggctcggtgtatgcacttcacaacaagggttctcttgagactacagcatcgctttgttatgcgggaagctcactcggcgtaacgcttgcaggagattggcttactctcatatttttctgggagcttatggcggcgtcatcgcttttccttgtgtgggcaaacaggagcgaaaaggctgtaaaagcgggattcaggtacctgcttgtgcatatgttcggcggcaactgcctgttaataggcataatatttaaagtaaacggcggtgatatgcttataagcaatgttacggccgtgcacgacgctgcattttggctcatactccttggagttgcgataaatgcggctattccgccatttcacagctggcttactgatgcgtatcccgaagccaatgtcacggggagcgtattcctttcgtcatttacgaccaaggttgcggtttactgcctcataagaatgtttgccggcacttcgtttctcatctggtttggtgttgcgatggcactttacggcgcgctttttgccattatggaaaacgatgtgagaaggctgctttcatatcatattataagccaggtcggatttatggtggcgggagtcggtataggaacgccgcttgcgctcgacggagcgacagcgcacgcgttcagccatattttatacaagtcgcttctgtttatgggagctggagcgataattacggccacaggtataaacaagataaatcagctcggcgggcttgcaaaaaagatgccgtttgtgtgcgttgcgtttactgtcggggcgttttcgatttcgggagtgccgcttttcaacgggtttatcagcaagtcgataacagtgtcggccgcgtgcgaggcgggttatccgctggcagagcttttactgctcgttgccagcgtgggaacattcctccatgttgtaatgaagatgctgtactttatctttttcggtgaggataagggcatagaagtgaagccgcttccgaaaaatatgtatgtcgcaatgagtatcggttctgtgctttgcatactttacggagtgttcccggatcttctttacagatttctgccttacgattttgaataccatccattcacatgggatcatattatgcagtacgtgcagcttctcgttaccggagtggtaccgtttattatgtatcttgagcatatggagccgctttcaaagatttcgctcgacacggactggttttacagaaaaccgtttgcggcgcttgtgcgcgttatttcctcgctttgcgtaactgtgcagattgggcttggcgcgtttttcaaaagcatatatgacggcgtgcggcgcgcatctaaaaatccgcttgtgtttatcggcgagcatggtattaccgagtatgagggaatagaaagctcaaaaattgccgcgagcagtgcggcgagtgcgatatcgggcacgtcagcagatgttattgtggataatgccgaggctgtctttgatggcgattttgccggaaatgatatagatggtaaacttgcagcagaaataaaagaagaagctgaggagcgggcttttgacaacaatcagcttgacagcgctgatgtgtacgatccggacaaagagcgtgagcctatcggcgatataatgagcgttgtaatatttacatttatagcggctgccgcgtttatagcagcagtatttatgtagctttatgcaaatagcagcaagccaaaaatgagctttgatttttaagcattaaaatatgattgtataccgccgcgatggtaatgccaaagcggcgtttttttaatctgtcggttatatttataaaaacaaaagctgcaatcgatatctgctcacgcttgggagtgagagcggcgattaaaattccattacgaggcccgtatggaatggatgaacgaggtctccgagttcatctgtgagtatttcaagagcacgagtacccgtgcagtgacccgtgtatacggaaataataccggtagcgcgtatgcgctgcgcaagcgcgcgcacttcgtcgtccgtgcgttcaaagaggtgaaagccgcctatgagtgcaagcagttttttgttgggaaaagttgcgccgacttctttaataatgttgtctgcacctccgtgggaacagctgttgaagatgacaagaccattttcagtatcaaaaacgaggctttgttcgtgcgcgtaatcatctggtgctaacgtgccgcagcgcattatatacataccgtcggcttcaccataggcgctgagattcggcgttttgtgcgggattaggaaaacaccgtcagaaggtgaaaaatttccgtcaataaaaaccatacggtctctaaaattttccattactgcatcaggaacgccgccgtactccatattaccgctttcaagcatataacaggcatcacagtcggggcgtacataaaaaggtgcgtcttttgatacagtaaaaaatgtttccataccgccggaatgatcgaaatgcccgtgtgaaagcacggcgtagtctacctgcgacaaatctattccaagctttttggcgttttcgagaaaaagcccggacgctccgcagtcaagaagaatttttttatctttatatgtaatataaatggacaagccccactcactgcccaaattgtcaaaaggaatattgtccgataaaacagtcgctttcataaaaacacctccttgctgtttgcttgattttaacgcagattagaagttattgtcaagttatagtcaatctgacggcaaaatgctgctattttgactgaaatatttttatagcgtcacgaaatctcatcatcatttagcatttatattatatatatgtaggaattttttaaggtaaaaaaatgggcaaaaaattttgttaaaaagatcgcaattaagcgtgtaaattaaaagaaaaggcttgtcgaagcaaatatgattgagatataataaagctgtattattaaaattatacagatgattggctaaattaagtaaggagcgaagcaaatgcaaatattggaaagagagacaaagaaaacaatgctttgcgtcataatcgcgcttatgcctgcacttataatggcggtttataattttggggcaagagcgttcatactaactttggtatgtgtggcagcaagcgtactctttgagttcttatttgaaaaaatcacaaaacgcgagaacactgtgtcagacctttcggcaatcgtaacaggtctgctgcttgcgtacaatcttccgccgacatttccgtactggatggcgattatcggctgctttgtggcaatcgtcattgtaaaacagcttttcgggggcataggacaaaattttgcaaatcctgctattacggcgagaatcgtactgctcgtaagtttttctactgatatggcagtatgggcaaagccgcaggaaagatttctttcagccgctgatgcagtgacgggagctacaccgctcacgcagtttgcggagggaagcacagactccctgccgagcaatatggagatgttcataggaactataggcggctcacttggagaaataagcgcggcggcgcttcttatcggcgcggttatactgcttgtgacgagagtaatttcaccggcaattccggtagcttatattggcacggtattcgtatttacatgggcgctcggactcgatccggttttccatattctcgcgggaggcgtaatgcttggagctatatttatggcgactgacccgacaacatctcctaagacgacagtcggaaaaattatattcggtatcggctgcggtcttcttacggtagtgataagagtatatggtacatatcctgagggagtatcgtttgcgatacttcttatgaacattcttacgcctcatatagacagtctcacaatgagaaagcctaaggcagagaaaggcggtgcaaactgatgaacgggaagtttaaagatttatttgcacctacaatagtgctgcttgtaatatgtcttgcggcaacagcattgcttacaggtacatatcaggtgacaaagcctattatagatcaaagagctcttgaggctgcgggcagcacaagaggcgaagtgcttcctgagggtgatgtatttcttcctatggaggatattacgcttgtagagggagtaaccgaagtatatcaggccgagaacggcgcagggcttgttattacggcaggcgccaatggatttggcggtgttgttgaggttatgacaggtatcaacgctgacggcgaaattacaggagtaaaaattacaaatcattccgagacgccaaacctcggtacaaacgcgatgactgaggagcatttaagtcagtttatcggcgcttccaagattacaaataaggcgggcggcgaaggaacgatgattgacgcctattcgggggcgacaatttcttcaacggcggtatttaacgctgtagatgccgctctgcttcaatttgccgttgccaacggcgcagcgtacgaagcacctgtagagcttactccggaagaacagtttgcacaggcacagagcctcgcacttcctgagggagatacatttgagaagctcgatgtagagctttataccggaacatcggatattgcacttgaagtatacaaagctgcgaacggtgcaggtattgtagtatatacatcaggagaaggctatgcgtcatctgtcggcggtgagcctataaaggcgcttgtcggtatcaatgcctcgggagcagttacaggtgtacaggtaattgaacagacagaaacaaacggaatcgggacaaaggctatggaagaagattatatcaatcagtttatcggtgcgacagcaattacgagaaaggcaagcggagaaggtacgaagattgatacaatcagcggagcaacattctcgtccgtaggcgtatacgactgcgtaaaggctgctatcaagcagtatgaattgatgggaggtgctttttaaatggaaaacaagcaaagtaagcttagtattctgacaagaggcatcattaaggaaaacccggtactcgtacttatactcggtacatgtccgacgcttgcgacaactacgggtgcaattaatggactcggaatgggcgtttctacgatggtggtactaatttgctcgaatataattatttcgctgttaaaaaatattattcccgataaagtgcgcataccgtgctacatcgtagtaatagcgacattcgttacgattgtgcagctgatgctcaaggcgtttttacctgagcttgacagtgcactcggtctttacatacctcttatagtggtaaattgtattatactcggccgtgcggaaatgtttgcgagcaaaaattcggtagtggattcagctctcgatggcattggaatgggtctgggatttacgctggcgcttttctttatgggagcggcaagagagcttcttggagcagggacgctatttggcattacgcttacagctaatatcatagagcctatggcggtgcttaagctggcgccgggaggattcttcgtattcggtatacttgttgctatagtaaataagcttacaaacggcaaggcgagcaaaaatgcggagaacggatgtatgaaatgcgcctgctcttctgtatgcggtcatgttggcggatgcacgcctacatgcgaagaagagcttttgcaggctatcgaagatgcaaaagttgcggatgaaatcaatatggatgaagagggaggtgctttataatgacagaatatatcatagttataatggcagctatactcacaaataacttcgtgctcgtgcaattcctcggaatttgcccgtttctcggagtatcaaagaaacttgattcggctttcggaatgagctgcgcagtaatctttgtaatgcttattgcaactgccgcgacttggccgattcagacgtatattctcgatcctaaaggacttggatatttacagactattgtatttattcttgtaatagcagcgctcgtacagcttgtggaaattacgatgaaaaaatatatgccgcctcttcataaggcgttaggagtatttttaccgctcataactacaaactgcgcggtgcttggagtatgtgtaaataatataaccgatggctatggcttcctcaaatcaatgctcagttcactcggagcgggactcggatttatgctcgctatggtgctctttgcaggagtgcgcggcagaattgaaaataatgactttctgccaagctttaagggaattccgtcgacacttattgccgcatccatcgttgccctatcatttatgggatttggcggcgtaattgacggcatattcggaatgtaggaggtgcaattatgggaatgtatttagatgcacttcttttactgggagctgttgctctgatagctggtatcgtacttactcttgcggctaagtttatggccgtgcctgtcaatgagatgcaggtaaagataagagaatgtctgccgggagcaaactgcggagcttgcggctttgcaggctgtgatgactacgctggcgctcttgccgatgatcccgataatgtaccgcttaatgcatgcgtgccgggaggcgcagcggcagcttctgcaatagctgaggtgctcggtaaggatgctgatgccgctggcggcggcgaggcaaaaattgcaagagttcattgcagaggtatagacggcaagagatgtggagagggcgaagctgcctgcaagtatggatgtatagcgtgcggagcctgtgtagaggcctgtcatttcggagcaatgaatataatagacggcgtagctgttgttgacagagctgcgtgcgtgggctgcggagcctgtgaggctgcctgcccgaacggtataataagcgttgcccctgcggattcgagagtttttgtagggtgcagttcaagtgataagggcgccgatacgagaaaggcttgcacggcgggctgtcttgcatgcggtaaatgcgcaagcacatgtaagttcggagctatagaggtggttgataatcatgcggttattgattatgagaaatgcaaaaactgcggtatgtgtgcaaaggtatgtccggcgaacattattatcgtaatgcctaagaacgcgtagtgttaaaaattgccggtagtgataaaatgcctgaaaaaagattaaaagctacaaaagctgatattgtgcttgcagtgttctttattgcagctgcggcggctgtgcttgtttggtctctcggatatttcggcggaagcgctgacagcgtggtcataacggcacacggtgaaactgttggtgtgtacagtttgtctgagaatagagagatagtcgttgacggtggcggtaatgttgttgtcatagaaaacggagcggtgtatatgaaaagcgctgactgcaaaaatcagcattgtgtgctgcatgcgcctataagatacggcaatgaacagatagtctgtctgccgaataaggtgcttgttgaaatagaagataacggagaaagtgagatagatacagttgcgaactaagaaacttgttttaaacagtatacttgtcgccctgtcagcgattttctcttatgttgaggctataattcccattccgctgggtattccgggaataaagctcgggcttgcaaatgtcgtgacggtgtttgcgctttataggcttggtttgagcagcgctgtactcataagtgcggtgagaataataattgtatcggctcttttcgcaaatccgatgatggcgctttacagcttagcgggagctgctttgagtcttgctgcgatgacgattctcaagcgggcaaagattttcagcatcataggtgtaagtatggcgggcggtgtttttcacaatgtagggcaggttttagcagcggcggcggttatggaaacggtaggattgttttcttatctttctgtactgattccggtgggaatgctgacaggtgtgcttataggcattgtatcgggcaaagcgatagaacatattaaaaagataccggtcgtatagatattattgaatgaacggcgtgattaaggattgtcatatattcacggcactcgcaataaggcgcgtgctgcgttatatatagaattttatcagaaaaggagaaaacaaagatgaaaaagttagtttcagttttactcatcgcggcaatggtatttgctatggttgcctgcggcggagacactgacgatggcgatcaagatgttgccggaggaagcactaaggtagggcttggaattaccgtaagtctttcggcgactgaagcaacagaggatgctgacggaaatgctcagcaggacggaacagctgctgccgtacttctcgacagcgaaggtaagatcgttaagtgtctcgtagatgttgcgcagaataaaatggcgtttacatcagaaggtgttgtgcttgacaaggataaggacttcgtaacaaagaagaaccttaaagaagagtatggaatgggtcctgtatcaccgcttgaagaaggcgaatggtatcagcagatagctgtatttgaagaatatgtagagggtatgacaagagacgatgttgccaatatcgcaacgactgtaaatgacagcggccacacagtaggtactgacgaagctcttacagcaggctgcacaatggatatttcggcatttatcgaagctgttgtacaggcttgcgacaaggctgtagatgcaggcgaggctactgatgttcatctcggaatcgtaagcgatatggcaagctcgacagacgcaacagaggacgaagatggcgttgcattttcgacttcgacttatgcggcaacggcaacagacgctgacggcaagatcactgctgctctcgtagattgcacacagtcaaagatcactatcggatcggatggttcagttgtagatgttcctgaaacagtaacaacaaagaaagatcttaaggaagattacggaatgggtcctgtatcaccgcttgaagaaggtgagtggtatcagcagattgctgcttttgaagaatatgtaaagggaatgactaaggacgatgttgcaaatattccgacagtagagaatgagcacggaatagttggtgctgatgaagctcttacagctggctgcacaatggcaatttctgacttcatcgctgcgatagttgcaggaatgtagttactcagtgcaaaagctactattgttttctaagttctatttcttacttatgaaggcggcgcttttggcgacgccttcgttttattgaaatgtgcatatattattgcttgcagcgaatgactatgaattttggaaagctgagctttgaaatttcaatttgattttgaagctgagcctttggcggtgcttgatcttttgattgagcttgattagaagcagtgtttgtaaaagatttgcataaggagtgaaatttatgaattataatttttgtgcgctggcgaagataagaagagcggtagccatactgcttgtttttgcactaagtttgggaattgtgtttggtaccgcgggctgcagcgagcctcaaaaagaacggtttcagaagacatatctcgatgcgtttgatacggcaatcagcgtcgtaggctatagcgacagcgaggaggcctttacagaaatggcggagacttatgttcacaatgagcttatgagatatcatagactttatgatatttatacggagtatgcaggaataaacaacatcaagaccataaatgagaatgccggaattgagcctgttgctgttgacggagatataatagcaatgctcgaatttgcgcgcgatatgtattatgtaacggatggcaaggtaaatatcgcgatgggaagcgtgcttgaattatggcatgatgccagaaaccacggcatcaattatcctgacaaggccaaattgccggatatggcaaagcttgaagctgcaagcgcacactgcaatatagaagatatgataatagacaaggaagcgggcacagtatttcttgccgattccgatatgcgtcttgatgtcggcgcagtggcaaaaggctatgcgactgaaagaattgcgcaggatctagaggccggcggatatacgaatattattctcaatattggaggcaatgtgcgggcgataggcgcaaaagcggacggtatgccgtgggtagtcggtatacaaaatcctgatcttacgagcagtatcgcgcatatagagactatagaaacggatgctttgtcgcttgcaacgagtggagtataccagagattttatgttgtggacggtaaaaattatcatcatataatagacggcgatacgctgatgcctgaagatagatatttatcggtatctgtactgacagaggattccgggcttgccgacgcgctttcgacggcgctctttaatatggattatgaggaagggaaaagctttgtcgaagagctcgcgcgcagtgtatcagcggagcggggtcttgcagcagggctttcggaaaatgcgccttcgcgtgcgggtgtgacagaagcggagacagatgatgcaaaagcggaagagacaggtgcagactctgttatagaagtgatgtgggtgatgccggatggtgagaaacgctatacagatggttttgaaacctacattgtgagtgaaaccaaataataggaaaactcaaaaggtgcgggggtgaacaggcttaataccttcattatgaagatttataggtaaagagcgttttcaaaggtttaagtaatatacttgcttgtgcaagtgaaagtgcaggcggtaaaataatttttatatagcgtatacagcagattggcggcaggagaaatgcattcttgccgctttttatattttcatcagaggtaacaaatagtaaataaattttactatttagttgacaaaatccactaaatgcttataatattaagtagacgatgtcaactaataaaaataggaggtcatatgagtgaatataagaaaataattgatacgataagaaaatttaatcgtttttatacggtaaatatgggctttttaaattcaaattatcttgacagtagttattcggtagcggaaacaagaattctttttgaaattaaaatgaatgaaagctgtacgcaaagtgacatcgtaaaaattctgcatattgataaaagttatctgagtagaattgtgcagcgtttatgcgccagaggtattatgcaaaaaataaagtcggaggatgataaaaggacaacaaaaattacgctgactgaaatgggaaagaaggaaacggacaggttgattgagttgacaaatatgcaaataggagcaaaggttgccggattgagcaaagaagactgcaatgagctatgcgatgctttaaatacgataattttaattttaggaaaagaggtaaactgatatgaagattattgagtttgaagaaaaatatcgaaaggattttattgattttaatactgactggattgtatcaaattttggctttctggaagaacaggataaagaaacatttgaaaaaattgatgaagaaatgaaggctggagctatgatattttttgctgttgagaatgatactgcgctggtaacatgtatggcgaggccaatggaggaagcgacttgggaaatatgcaagcttggctcaaataaagaactcccgcataaaggggcgggaagcgctgtatttgaagccgcaatgaattgggcgctggagcatggggcggaaaaactttttattgtttcaaaccgtcgattaaaaccggcgctgcatatttacagaaaatatggctttaaagaaataaaattggaaaactgtgaatatataaggggagatattgcctttgaatatacgaaaggaagtttatagtatgaaaacagtagtaaaaaaggaagatgcggttaaaaaagtttttaaaggagttttcctggactctctcgcactgggagaaaaatcgcaggtcacgaagatgaattatgtattggggaattttgcttcacctcatcgacatccgcatgagcagagcggatatgttatctcgggtaaatatgagtttattatcggcaatgagaaatacgaattaaatacgggtgattcatattctgttccaagtaatcaaattcattcttttagggtcatagaagcgggagaggttattgatgtgtttaccccgccaagagaagattacatttaaaaaagatagaagtatggcggcagtcctcgcttgaatatatcagaaaattatgataaaattatatcggcaaaagtataattattaaaagaaatattgtagatctgtaaggaaactgtgctaaggaggagtattgtgtataaaatcgaagtaggatttgcggatatttgcgaggcgtatacgcgcataaaaccgtatattgtaaagacaccgcttgtaaaatcagataagctttcagaatttgcgggcagtgatgtttggtttaaacttgaaaatatgcagccgataggcgcgtacaagctgcgaggcgctatgaacaatatgctcgcgatgagcagggaagatttagcacgcggcgtcgttgcggcgtcggccggcaaccattctcaggcggttgcttatgcagcgcggatgcagggtgcgagcgcggtggtgtgcgtacctgaatcaacgccgatgaataaaagggaaagcgcgatcaggtacggtgcggagctcgttgtatacggtgccgactatgcagcggcagaagaaaaagcgcatgagatagaaagagagcagggcagaaagtttgttcacgcatatgaatcgcctgaaacagtagcggggcaaggtacggtagcgattgaagcgctgctggaaaataatgattttgatgctgtaatagtgccgacgggcggtggcggacttctgtgcggtgtggctattgcagcaaaagcgataaaaccggacatagaagtttacggacttcagaccgacacttctgcgccgtggaaaaagtcgtttgaagaaaaacggcttaacaacgactgcccgtttattccatcaattgcggacggtcttgagggagaaattacctggccaaatgtggagcttgcgctcacatgcgttgacggtataattgttgtgagcgaagaatcgacaaaagagggaattaaatggatggctaaaaaccatcatttgatgatagaaggcgcgtcggcgacttgtatcgctgcaattcttgaaaggcacgaagagctcaagggcaagaaggtgctctgcatcataacgggcggcaatattgatcttgataagttctgtaaggtatgcgaagcggaatatccgccgagagcgtaaggcggctgcaataagagttatacggagaatagacaataaatatgaaagagtatttgacggtcgaatggaatgataccgaaagcagcgcgaaaggctggcttgtcatatataattatgtaaaggggtatacgggagggggtataagaatgcaccctgacgttaataaagaagaagtgctgcggcttgcggaggcgatggcgtacaagtacaaggcctgcgagtcgcaattctgcggcggctgtaagggcggcattgcctatgacagcaaggcacccgatgccaagggtgtacttcgcaggtatttgattgctatgatgccgtatattcgtgagggagtttcactcggtggtgattacggaactaattatagtgatattcttgctgtatttcgtgaatttggctttgatatgccgctgacaaagtcaatgcgcgatgataaaaaaattgtggaaaatgcggctgcgtataataagcttcttgagcagacagtggacacagtgcctataaacgatgtgatagcgggatatggtgttgccgaagctgcggacgaggcatatatgctgcttatggaagcacggaaaatatctaaagaaggtatcaacactgacgggagttttgacggtaataatatttggacctgtgatcgttatgtgagaggcagcaagggtcaaaaggcagatgttgttattcagggaatgggcagagttggaagcgcctgtgctaatagacttatgcagcttgggcatcgtgtagtcggaatgtcggattcaaaagtttttctttataatcctaacggtctcgatacgcggatggttcgtaaactgaagaaagaggggaaagcttttaaaagcggcgattttggtgacggaacgaaaattatgcagtcgtgcgaatggctttccgtgccatgtgatattatagtgccgtgtgcgctggcagacgcactgaatggagataatgcgggatatgtaaaggcagcgcttgtagttgaaggtgccaatatcgcaacatcggctgcggcagatgaagtgtttaagaaaaaaggcgtgtatatgatatgcgactttacagcgaatctgtcggaggcgtggatgtatgacgcagtatttttcggcacggtagcggcagagaaagatgtggtgcttgccgcggcagcagaactatgcagaagaaatgcgaggaagcagatgcagcttgctcttgctgagggcagatatgcgcgcgagagcgtgaaagaaatatttgcacctactgtgcaggattttcctgaaatttaatggacaaaatatcttttaattgcagaaggtcgattaaaagatattttttttgttttttgcaggtatatgagagcagtgagcacgcatatattgtacgaagaattgcatatgaagggggaaaagctatgagatatgaggatgatggatttgatccgactccgtatgaccgtatacttagtggaatacatacgccaaagagagcggcggcaaatgcagaagatatagatgcgtacagagcggcgcgcgaaaacagcgaaattcaaagggacatacaggaagaaagcctatcgcaaatagacgatgaaatggtgccgaaagctgcaagcgctggcgcaagtatggaaattgcggcagaagaatatgcacaggattttgaagaagattttgaggctgctgatacagattttgcagaaacagacggcgacattgaggcagagatagatagtgaattggcagcagaaacagacagcgaacttgcggaaactgtggaaaccgccgcagacaaagaattggcagaagcagaaagtgagttggaggaacgtgcagagccagtaagcgcagctatcgaaaacgataaaatgcaggaagaaagtttatcgcaaatagacgattatgacgatgaaataaaagacaaaaacgcagaagctgttgatgaaattacgccggaaagtgatattgcagatatggatactgaaatttcagaaaaagaggcagtagctaacaaggcagaaaatacagaaacggatgcggaggactacatctcatcaccaaaaatagaggataaaacagatgataaggaaacagcatccaaaatatcgcttgataacctgctcattgcaaatgaactcaatttcacggaaataagagatggcgaaagcacgcgcgtgtatatagaagaggatattcttgtacctgatattaaacctgatatggccaaaattctctctatggacggcagcgtaaagtgtgcagacaaagaaataaaaagcggacagaaaggtgaggacagaataaaggttaccggagatattacactcgaaacaatttacataccggaaaaaccggcagcagagccgattgtaaccattcaatcgcgtattccgttcagaacggactgggggatcagcaccgcgccgttttcatcggcagtcataaagcctgtaattgaaagtattgactatatggtgataaacgaaagaaaattccgagcgaaactgaccgtcgtacttacaatgcgcgaatacgcgggcaaatatctcgagctgttcgagggtattcgtggtgaagacattgaagtactcaaggaaaaaataaatataacggatattcttacgaaaaaaaaggatgtgctcgacatcgaggaaaacatgcttcttaaagagaacagtcctatgccgggcagaattttaaaatacggaatcaatgtggtggaaaaccacaagcagataacaccggaaaaagcagtaataaacggcactgtttattgcaacattctatatcttgccgagtcgcctgaagatgaaatcatcgagacgtctatggaagccgaagactttatggacgaaacggcggaaacgggtgcaagtgcagcagcgctgatacctgaccctgcattttatcagggaaaaattgaatttacacagtttatcccgctcgatatagacgacacgcaatcgggaagccgcatcacatttgacggaagtgacctttccgtgagaataaagaatttcagcgaggatgatgacgaggcgagcggcattggctttgcccttgaaggcagtataaacacaagtattgaaatatataaaaatgttgaagccgaaatcgtaacagatgtttatcataatgaaaaagaacttgcatacgacagtgaaccgtttacagccaaagccatagcaggaagcggtgtaacagagctgtctgctcgcgaaatcatcaacattccggcacaatacggcgatatagaacaggtaatatatatatccggcaaagtgcagaatgttgagtgcacagcggaaaacggcaaagaaacagtaagcggtgtaatagacgcagagcttcttgcaatcgcagcggatgaagagaaaacgccgttcaagatgcagcacagcctgccgttcaggggctcaatggacatttcgggtgcaaaggcgggaatgatagccgagagcgacatttatgtaaaagaactttggtttgataaaataaataacaagcaaatagaagtaaatgcgggcattttggcgctgggaacggtatcgggacacgaaacttgcagtctcatcaaaaatcctgtatttatacaaaacgaaaatgacggaaaacgtaaggcaagcatgataatttatatttcaagaccgcaggacgatttatggactatagcaaagaagttcagaacaaccagagaaaggataagccgcattaacggacttgatcccgataaagctatatccgaaggcagcaaacttctcattataaaataggaaaaaatgtatataaacccgcgactttggtgaaactcgtattaaagacaatcaaaacggaggggtttagatgagatttgataaaaagaggaatataattatcgcagcagcgatagcgcttatattcctcacgagtatatacgcatacggaagcacgagaggagccggttcagcagtgctttctggagttgataaagagtatagaggaatcgtgaggttccatgttatagctaacagcaacagcgattatgatcaggaaatgaagcttgcggtcagagacagagtactcgaggcgatgagtgaaaaacttatgaccgaaactgtaagccgttatgatgctgaagataaaggaagcggcagcagcgatgcgggtgcggaagtgtttgcggaaactgcaaagctcgatattgacgaggtaaaagaccttataacggaaaatctcgatgaaatcgaaagaattgcggaagaagtgataaaagagtacggaagcgactacgaaacgcacgctgaactcggagtgcgctttatacctaaaaaaacgtacggcgatgttacctttcctgcgggaaactacgaagcgctcaatataacgataggcgcgggtgaaggagaaaactggtggtgcgtactctttccgccgctttgcttaatagatccgtcaggcgcaagtctcgaaaatatagagacagacagcattggcagcggtaccagtgaaatacagctcaaatttaagacgcaggaaataatagaacagtggacatagcagaaagagacgcgctcatctgagcgcgtctttcattgattttacataggcaccaatatacggaggagcatcctttccgtattcttcaagaattttaacaatcgctgagcccacgatgacaccgtctgctatagctgccattttttttgcttgctcgggggtcgagatgccaaaaccgacagcacacggaatatcggtatttttgcgtatggcattcactatggaagcgatatctgttttgatttcgcttctcgcgcctgttacaccgaggctggaaacaatgtagagaaaaccttcggcttccttggctatcatagcaatacggttttccgaggttggagctatcagtgaaatgaggtcgacgccgtacttgcggcaaagcggcaaaaattcgtctttttcttcaaaaggaaggtcgggcaaaataagaccgtctatttctattgcgcggcaggctgaaataaagcgctccgcaccgtaggaaaaaacaacattagcataggtcataaataccatcggagtcttgacgtccttgcgcagctcgcgtacaaaatcaaaaattttatcagtggtgatgccgcccgcaagagcacgaatgttagcgccttgaattacaggtccttcggcagtcggatcggaaaaaggaatgccaagctcgatgagatcggcaccgttttcgcaggcgctgcgcacggcggctgccgtggtattaagatcagggtcgccgcaggttataaaggctataaacgctttgccatttgcaaatgctttttttatgttactcatgaatatcctcccctctgtaacgggcgatggcggcacagtccttgtcacctcttcccgatattgttataactataatctgttctttttccatagtaggcgcaagcttcattgcatgggcgacggcgtgggcggattcaatggcagggataatgccttccgtctttgccagatattcaaaagcgcatacggcttcatcatcagtaatggcgacatattcggcccttcctgtatcataaagatgcgcatgctccggtccgacgccgggataatcaagccctgcggaaatagagtaaacgggagcaatctgtccgtattcgtcctggcagaaatatgatttcataccgtggaatataccgatgcggccggtgtttacggtggccgcggtctcaaacgtatctataccgcgtcccgcggcttcacagccaataagccttacgcttttatcttctataaaatggtaaaagctgccaatggcatttgaaccgccgccgacgcaggcgattaccgcatcgggaagccggccttgtttttcaagcagctgttctttaatctctttggaaattacagcctgaaaatcgcgcacaatcgtagggaaaggatgaggacccattaccgaacctaagcagtagtgagtatccgaaatgcgggaagtccatt

SEQ ID NO: 4206 - DNA, 11473 bp, Unknown
  16S sequences of unknown bacteria
tcatacggggatcggatgcagtgttggccctcaggcatcaactgtcagaattttgtccttgacaaagggaccatttcagatcatccatgatcctggctgtttttttgtgttgatcgcgcttctgtccggcagggataggcatctccttcttttgttcatgattcacgaacaaatgtcgcaaatcatgaaatattctcttgcgctctgatggtttctcttttataatggagaccgtcaatcaggagcggtatgcgagagagtcaacgctgacaccgaagaatggaaaatttcaggtcatgggatcgcatgccgtgcacactctggagagttctgcataagacgccgaaggggcaagcccgcacaagggtgaatctctcaggcaaaaggacagaggatgcgccggtgatatccgtttttttgcgcctctgtcgatgaatggaggtttttttcttgaaacagataaacgaactgctgacagcgatcaatgatctcgtctggggcgcgccgctcatcatcctgctgctgggcaccggcatctactttacctggcggctgaagctgctgcagctgacccggctgaagctcgctttttcgctcatcttccgcaaagaggaaacggaaaaagaaggcgatgtgtccagctttcaggcgctgtgcaccgctttgtcctcgacgatcggcacaggaaacatcgtcggcgtcgccactgcgatcatggccggcggtcccggcgcgctgttctggatgtgggtcagcgcattcttcggcatggccaccaaatatgcggaaggcctgctcgccatccgctaccgcaccaaggatgaagaaggcaacatcgcaggcggaccgatgtattatctggaacgcggcctgcacagcccattgctggcaaagctcttcgcgttcttcggcgtatgcgtggcgctgctgggcatcgggacattcacccaggtcagatccatcagcgacgcgttgagcctgacctttcatgtcccgccgttcatcacggccatcgcgctggtcctcatcgtcggcttcatcacgatcggcgggatcaaacgcatcgcctcggtcagtgaaaaggtcatcccgttcatgtgcctcttttacatcggcggagtgctgatcatcctgctcactcatcttagcgccatcccttccaccctggccgagatctttgccagcgcgttcggtctgcgcccgatcatcggcggcgggatcggcgttgccatccagaagggcatcagccgcggcatcttctccaacgagagcggactgggcagcgcaccgatcgccgcagcggcggcacgcagcgattcctgcgtagaacagggactggtatcgatgaccgggacgttcatcgataccctggtggtctgcaccatgaccggactggccatcctgatcaccgattcccatctgagcggcctggaaggaacggccgtcaccacgctggcctttgaaagcggcctgatgatccccctcatcggacgctggatcgtcaatatcgggctcatcttctttgccttcaccaccatcatcggctggaactattatggagagcgctgcatctattatctgctgggcatgcgctcgatccgctggtaccggctcatcttcatcgtctttgtcggcatcggccccttcatgtcgctcgatatgatcttcatcctggccgacatcgtcaacggtctcatggcgctgccaaacctcatcggactgatcggtctgcgcaaggtcatcatcgccgagaccacgcaatacttccagagcgaaccggcgcatgtcctgcagggcgagccggcagaggaaggcgcataagccgcatcccggtgtgtcagatcgaagacacaccggttttctttgtccaaagatcccttgcggcaaagagatctctttgatataatccgctcagaacaccatgatcacgataacggaggtgatgtcatcttgtctgccaacaatgctcctggccgatatctgactgacggcatccggcaggcctttgctcagatctgtgccgataagctgcgcgatgaaggatatgtcgacatgaatgcgtatttcagcggccggatgaagaaagacgagatatccgccggcttaaaggcaagcggctctatctacgccgcgctgtatcaagacgcctatcccgacatcgaagatgtgcctgaacgctggtacgccctgatgcagaaagccggccccctgaacagcgcgccttctgcagaagaggccgccgccatcgtcaactgggcattccgggcgctgaagaccgccaaggaacgcgaagagctcgctcgtttcctgtttgccgaggatccccagactgccggcgtttcgctgcgcagcggcgtggcatatgacgaaaagcgggtcgatctgcatgtgttctccaccgtgtcagaggtcacacacttcatcgcctcgctggacatcggcgcggacaccttgttttaccgcggacatgccagtgcgaattatttcctgcagccttcgctcatgcggaacgaacgcctgcacggcaacgagagccggctgtatcatgagctgctgatcaattgcccggatgcgttcgcgcactgccattcccatctggagaagctggtcaagatgcagcactacggcctgccgacccgtctgctcgacatcacgcgcaatctgctcgtcgccctgtattttgcctgtgagagccgcccggacgagctgggcgagctgatcctgctcaccgcagaacaaaacgagatcaaatacccgcaaagcgatacgatctccatcctggccagtctcccgacatgcacgacagaagagcaggctgagatcagggaacaggcagtaaaggccaagatcgatgacacgctgtccgatgcggtcatatcccgattgatccaggaagtccgtttagaaaagccggcctttcacgcagggatcaagcgagagggccagctatatcgtctgcgcgctgaaggacaacaaccggatcgtcaagcaggacggcgccttcatcctctgcggattatcggcagaccgcaatgccctgggaaagttccgctgcaaggtcaacggcaggaccgtggtcatcctgttgcgcaaaaagcaacagatcctcgatgagctggaacgctattccatcaaccgcgcaacgctctttccagagatcgaatgtgtcgctgaatacctgagggccaaatacagctaaagcgctgaggcagcaccggcggatgatccgcccggctgtcccagcgctttttgtatcttactctacgctgacgatgaaggagtagaccggctgttcgccgttattcacttcaacttcgacgtcatagttgtcttcgatatgctgagcgatcgtatcggcttcttcctggctggtgccttcgccatagatcagcgtgacgatctcgctctcctcatcgatcatccgatcgacgagcatccggcaagcttccagcttatccgtgacagaagccacgatctctttctccaggatgcccatgaattctccggccttgatctccatgccttcatatacggtatccttgatcgcataagtgacctgaccggtcttgaccatggtgatcgcgtcgttcatctctgcgagattgctctcatagtccacatcgggattgaacatgatgcatgcgcacagtccctgcgggatgctcttgctcgggatgacgtgcacgttctcgccttcgcagacggctgccgcctgctgcgcggccatgatgatgttggaattattgggcaggacgaagatgtgctcggcattgagcttttcaatggcctccacgaaatcttccgtggacggattcatcgtctgtccgccgctgatcccatgatctgcgcgcagatcgaggaacatgttcttcagtccctctcccgctgccaccgtgatgatcgcatatggcttgcgcggctgctgcggcacattcgctgcagcgctcatcgcttcatcatcgatcaggttgtcgtgctgttcctgcatattttccgctttcagcttcaggaaggtgccatgccttctgcccatgcgcaccgccttggccggttcgagcgtatgcacatgcaccttgacgatatcatcgtcacgcacgcagacgatcgagttgccgatggacgccagctcttcccgcatgctgttctcatcaaagttacgcgcgccgcttggggaaagacggatgatgaattctgtgcagaatccatattcctctccttccatggaagccccggccttctccacgctggcggatgatgcctcttcacgcccgtaaggctgtcccttcagcgcggcgaggaaaccttcgaggatcgtgcacagtccggcgccgccgctgtccaccacaccgacttccgccagcaccggaagcagctccggcgtgcgctgcagcgattcctttgcctcgatgagcatcttttccagcacctgttcgcaggtgatgtcttctgcctccatcgcaaacgcgtacgtgtagtcagcggcctcacgcacgacggtcaggatggtgccttccaccggacgcatcacggcgcggtatgccacgcgcgatccgttgaccagcgccttggccagctgggccccgttcacgctgtccagcccttccacgccctgatagatgccgcggaagatctgagacgtgatgacgccggagttgccgcgcgcacccatcaacaggcctttagagagcactttcatgatctcgctgacgctgctgctctccaccttcagcgcatccttcacgcctgccgagaaggtcagcgacatgttggttcccgtatctccgtcaggaaccgggaaaacattgagggcgtcaatttccgcagcgcggttagacaggtggttcatcccgctttccagcatctgcttgagcatcataccattgatcgtttccatagccatcatcctacttcatcaccttgacaccctggacatagacgttgaccgcactgaatttgagctccagcgtcttttccatcatgtacttcactttcttctgtgcctcatgcaccacttcgctgatcttgatgccatgggagacgatgatataaagatccagttccagaccattctcgccctgacggacgacgacacctttcgcatagttctcctttttcagaagctccgcaatgccatccttcacaaatttctggctggccatgccgaccacgccataacattcggtcacgaccccgcctgcaagcgaagccacggcatcgagagagatgttgatatttccgtattccgtactcttagagattgacatacgattccctcctctatatcagaataattatatcataccgccgctgaaatgcaatcacccctctgcctgaaaagggatgatcgccagacatcaaaaaaggaagagctcaggctgtctgctctccagcgctctcttcctcttgtttcgtctcgttttctccgctgtccgcggcgttcgcatccttttcctcagccgagccctcatccttcgcgtcagtctccttgtcctgcttcttcttctcctcatcggaagattcgaactcgctgcaggagatcttggacatcgcctggttttctccgtccatatagaagcagacgttcttgccctccagctgttccagcgcagcctgatagatctgcagcagcccgaccgaatcatagctgccataaagcgtattgccatcgcgcatgacgatcttcatcatgttctggttgaaggatgtctcatacgggaggatctccgagatccgctcgatcagctctgcgcccacttcttcgctgacctcatcaaaagcctgggcgatgctgtccagctgttcgtcgctgaatccgttgagcagcggatagttcacgatgctgccgatctcatcttcctgcagcgtgatctgttccccgctgctgcaaagcagcacgtaggcgtcttcctgcaccaggtaaccgatgacatgcttttcctccaccttgatgcggatatcgccgttccagctcttctccacctgtacatcctcgatgaggctgccgcccttgagggcattttccatcaggaaggcgggacgcagcagatagcgggtatcatagcccacgccggccatctcgcagatctgctcatcgctgtaaaaccggttgccttccacgcgaagggaacgcacctttgacagatcgctcgcaaaataaagcaggatgagcaggacgatgcccagcgcgatgatcaaatgcagccgatgtcttctgcggatggtccgccggcgcctggccttcgtcttcttcaggcgctcctcatgctcatcatagagaacttcttccttgctcagctgttccaattgaatctctccacttcggtgatgagatcgatgccatactgctcgctgatcttctcctggatctcctggatcagctgatcgacatccttcgcctttgccgaaccgacattgacgatgaaattggcatgcttgtcgctgaccatggcgccgccgatcttcctgccccgatagccgatctcctcgatcagctgccaggccggatgctgcggcggattgcggaacacgctgccgcagttgggcagatcgagcggctgagagctcagacgccgttcgcggcgggcatccatcagcgagcggatctccttctggcagcttttgctcagctgcagcttgccggcgatgatcgtccattcaggatgagactgaaaggcggaatgccggtatgcgtaatccagttcttcttttttcatccagaccagggtatgatccctgcacacacagacctccttgagacaggcggagatatcgctcttgtatgcgccagcattcatatacatggctccgcccagcgtgccggggatgccgctggcaaactccaggccgctcagactgcggcgcatggcttcctgcgccagcaagatgatcgaacagccggcctccgcgatcagcgtgccgtcttcctcgaaatagaaattgttcagatagcggtcaaggcagatcactgccccatgataaggctcatcgctgcacagcaggttgcttcctttgccgaatatggcatatgggatatgccgctcctgcagcaggcgcaggatgcgcatcaggcacaggatgctcttcgggtatatgaaataatcacatacgccgccgatgcgaaaagtggtgtgcttggtcagcgattcattttccagcacatccgcatacggcttcaacacattcaatatattcatttttttattccaccttttaattcttcgcaccagtccaggatatccgcacaggcgtgcggcttgcccagcgatctggcgtgtgccttcatctcttccagacggatcggatcgtccatgacggcagacacggcctgcttcagcgtatcggcgctgagatccttttcctcgatcatgagcgcagcgcgggcatccaccagcacgctggcattgtaaaactgatgattgtgggcgacataagggctcggcaccaggatggccgccacccccagcgcggtgatctctgccagcgtcgttgcgccggcgcggcagatgatcagatcgatatgcggcagcacggcaagctgctccacataatcgacgacatggatatccggacggtccgcgaacaccgcaggatccatcggattgttgcgcccgctgacatacaggatctgataacggggatccacggcgcgaagcgcgtccttcatcatctcattcaccgaactggaccccagcgatcccatgacgaccatgatcgtcggacgggcaggatccagcccgagcgagcggaaatatctctcgtcaaagcgggcctgcgcggccacgctggcgcgcgggttgcccagcagcctcgtcttggccgcatgctctttgcaaatgatccgctcataacagcaaacgagcgcatccgccttcttcagcaccagctcattggccttccccatgatggaattctgctcatggatcatggtcttcacacccagctgatgcgcggccaggatgaccggtgcgctcacatatcccccgaatccgatcacgatatcgggctgaaattctctgatatatccagcggccttgcgacgtgccttcagcatctgcagcacggccctgctttttcctctgatcccgccgaccagtccgctcgtatgaagaggcaaaaacgcatatcccttctgagggatcagcgacgcctccatacggtcatcattgccgacgaaaacaatttctgcttcattgccataacgctgcacggcggcatcggccagcgccagcgcaggatagatatgaccgccggtaccgccggtcaccagcatcatcttcatctcatacactcctcataccagtctattctgtctgtggatgaaaagctcgtttttccatctgtttgtcgtttcgttcaggttcgcatccgcattataacacagaagtgtcagcttgtgtgatgaaaatacatgaaataatgcatccctgaggatgcatcattggtttgccacagcgatgagcaggcccatggcgctcatcatcaccaccagcgaacttccgccataagagataaagggcagcgtgatgccggtcaccgggaacaggccgaccaccacgcccagattgatcatcacctggatggcgaacagcgcaatcagcccgaccgccacatagctgagaaacggatcgttcttcgatcgggcgatgcgcacgccctgatggatgagcgaaaggaataggccgatgagcagcacacagccgatgaacccgaactcctccgcgaacacggcgaagatgaagtccgtctgcggttcaggcagatagaaatgcttctgcatggaacggtcgaagccgctgcccagcagtccgccgggcgcgatggcaaacagcgactggatgatctgaaacccgctgcccagcgggtctttccacggatccagaaacgaggtgatgcgcgccatccgatacggcgccgaaaggatgagcgcgccaagcgcgctgagcgccgcaaaggcgagccgcacgaaatagctcatgggcgcatctgccgccaggatgatgaccacgaccgtacaggccatgacgatcccgctgccgaaatccggctgcatcaggatcaggccgaagccaagcgcgatcagtgcaaaaggtaccagcaggtcgcggcgaaagctcttcacgcgctgacggcgcgccagataatcagacacatacaggatgatcgcgatcttgaagaactcgctgggctggatgagaaagctcccgatgccaaaccagctgcggctgccgttgcgcatgacgcccagccccggaatgagcaccagcaccagcgtggccgtgctcagccagaacaacagacgcgcgtgcttccgcagcaggcggatcgggatgtgcgcacagacaaacatgcacccaagaccgatcagcgcaaagatcccctgccgccacgcataatagaacggatcatcaaatttatactctgcccataccctggagctgctggccaccatgacgatcccgatcacgaccaaaagcaggacttccagcgtcaggacacggcatctgcgtgaaaacatgtgatcaccttcgtttcagtatatgtcacatggatgggcgcatgcaaaaaaacgcctgacgttcatcagacgttctcccttattgttcgtagcggatcactccgtcaaagttctgcagccgcgcatgcagcaggatgcggtattccgatcccacaccatagtccagatcgcaggtcgacagcatgatcacccggtcattttcgctgatctccccgacatcatgcgtatacatggcttctgccatcacctgatccagatactctgtccaatagtgattcggcgcaaagccgatctgataatggaaggaatccgatttggtcttcgtcagcgccatgatctcacagcggtagttctgctttggcgtgagcaaatacacatagcggtgtgattcgaagaagctctgatcctcaaagaaggcaagctgggtgaacatggcatcgctctgcgccacgctgtgtccgtaaatgatcgtattgagatcgctgaagtcgctggacgctgccgcatccaggaagatcgaaccgatcgtattgacgttcctcatggaagaatgatccagataatactcattgtcgcttccctgcacgatcggataattgatcacggtatccgggatgtagatccagcccacgatatccgggttggtgctctgcaaggacgcccagtccggatcgagcaccaccggttcgctgctttcttcctcttccgtgccgtcctgatcctcctggtcttgtttcttgagcaccatgctgtcccattccttgcgggtctcattgtcctgatgatcctggatcagcagcgggatgagattgcacgcggcaaagatcatcacgccgaggaaaaacagtatggcgatattatacagccatttacgaatgtttttctttttttccatttcaaacacctcgtaacacttataccacaaaaaaagtcattattccacacatgaacgtgtaaaataatgacttttggatcagcggctcagcttgcttgcggcagcttcatcgacgatgacgacgacatcctgatgattctgcaggacggatgccggccattccggtgtcggctcgccttccaccatcgccttgatggcgtcagccttgttttctccggtcgcaaccagcaggatcttcttcgccttcatgatcgtggcgatgcccatcgtgatcgcatgggtcggcaccttgttgatgtctccctcgaagaagcgcgcgttgtcctgacgggtcttttccgtcagcgtcacgatatgtgtctcttccgtgaacggcgtgcccggctcattgaatccgatgtggccgtttgcgccgatgcccagcacctgaatatccacgctgtagtcttccatggccttctcatatgcctcgcagtccgccttggtgtttccataaggcacatgcacgttttcttccttgacatcgatgcccttgaacaggttctcatgcatgaacgtccagtaagactgttcgtggttgcggtcaatgcctacatattcatcgaggttgaatgtcacgacatcggcatagctcgttccgttttcttcatgatccttgatcatgttcttgtacagtccgaccgggctgcttcctgtggcaaggcccagcaccggcgccttcttggaagtcacgacctccttcatcacctcaaacgctttttcactgactgcgtcgtagtcttttacaacaattacttccatgtgatctcctcctattgttgatttcttttaccattatagcacagcttgaccgctacagaaacggtttttcacaatattgaaacgctttcgcccgacgatcagaacacctcgatggcataggcggtggtaaaggtctggcccgcggagaggatctgcgttccctcacggtgatagaaatcttcctttacctcagaaaaatcactgtgtccataccatggctccaggcagatgaacggagcgtccgtggccgccgtccataccgc

SEQ ID NO: 4207 - DNA, 10494 bp, Unknown
  16S sequences of unknown bacteria
acatttccgcatcacttggcgcggatcatggtactggagcagctgtaccgggcggaatccatccaggcgggcgcaaaatatcacaaataagaaaggacacggtaagatgcagctatttgacacccatgcacatatggacgcggatcggtttgacccggaccgagcggaaattttgacggacatgcccaagcaccaaatccgttatttgatgaacgtcggctgcgatgcatcgtcgtccctggcgtctgtgcggttggcggaggaatatccgtttatctacgccgccgttggttctcatccggatgatgcggcggcgataggggaggatctgatcgccctgtaccgggagcttgccacgcagcatcaaaaggtccgggccatcggagaaatcggcttggattaccactatgaggatgttccccgggcgcagcaaaagcgctgctttatccggcaattagagttggcgcgggaattaaagctgccggtgatcgtccatgaacgggaagcccatggcgatgcgctggaaattctgcaggattttccggatgtgaccggcgttttccattgcttttccggcagcgcggaaatggcgcggcagctggtgacgtgggggtggtatatcggctttaccggtgtcattacgtttaaaaattccagaaaggccgtggaagtcgtggaggacatgcccctatcccgactccttttggagacagactgcccctatatggcaccggaacccttccgcggcaagcggaatgacagccgctatctctaccgcatggcagaacgcgtcgccgaaattcgcggcaaaacaccggaggagattgccaagattaccctggaaaacggcctgcgtctgtttggcattgcggaagaaacggcataattttagtccatgcagttttatttgacatcggtgcttttctctggtattctaatattagtcatacatatttttgttaattattcctaaataatttgagaggaaaggcaaaggcgtttttcttttgggggagatgaacgtattggaaaacaaggggaaaaaggtccaatccgtggagaaagcaatggcgcttttagactgcttttgggtaggccgaaaggagtactccttggcggagcttgcagcacagacgggttgggccaagagcacgatccatgcgctgctctgctcaatgctgacaaacgggacgattgagcaggacgcgctcagcggaaagtaccggctgggatttcatacatttgaattggggtgcgttgcccaggaacggtggagcgtccggccgttggcggcccaggctatgcgaaagatcacagagcgcatcggtgaggcgctgtatttgggaatgcggtgcatggatgaaatcctgctggtagaaaattcagagaattatgacaattttaaaatcagctcccccctgggtgcgcggatgccgatgtatggctgcagccagggaaaggtgctgcttgcccagatgacggacgcggaattagaagcctatttgaagagaaccacatttcgcacctatacgccgtatacgattcgcgatgcagcacagctgaaaaaggaactgcagatggtgcgggtacagggatttgcggtcgagtatagtgaattgcggacgggcattaagtccgtcgcagcaccgatttttgaggaaaacggggtgtgcgactatgccatcagcgccgtgacgattgccaagggttctgcgaccggagataactttcaaaagctgcaggaaattgtagtacaggctgcggcggaaattacaaaagagctgcaagccccatctggctggtggggaagataaaaaaacacaggaaaagcgatgcatcgcttttcctgtgtttttcctagtttgcagtttcttttttctgcaaaaggtgcaggacgtattccggatttgctggcagcttctgaatcaggataccacaggcgtcatgaatcgcattggtgatggctggcgcgccggggatcgtcaccggttcgcctagacccttgctgccgaaggggcctgtcggctccggggcttccattggtgtgatccagattttttctgggatatcctgaatcgtcggaacgagataggtctggaaatttttcgttttcgggcgtccatctgggccaaactgatagtcttccaaaacggcgtaccccatggccatcacgatgccgccttcgcactggccttcatagccaattcgattgattaccgtcccggctgcgggtaagatctcggtggctaggacagtgacttttccggtcagtgtgtccacctcaacgcctgtgacctgggttacatgggtgtgaatacaatgcaggccgatttgaatctgcagatcggtgatcgggaccacaaatttcccaatggcctggcagagctgctgctgtagccgggggtaaaccgcctgccaggagagcacaacaccgtcatacaaaaggccgtcttttgtcaattcgacacggtggccacattggcggaaaaattccaagatgcggttttgaaaccgcttcacggcgtcacagatggcatttcccgcgacataagtggagcgggaggctgtcgtcgggccggcatcgggggcaagatcggtctcacccaaaatgatttctacctgctccaggcggacctgtagctgctcggctgcaatcatatggcaggtcgtaagcaagccctgccccatatcggccattgcgatgctgatggaaaaaacaccgttgggcttcaattccaagcggaccataccctcatcctttaaggcgttgcccagcccgttgccgtgctggccgctggcgatgccgatgccgcgtctgcaccagggatgggagacggctgctttaaattcttcctgatgctgccaaagccagctttggcgtgcggcacagaagctatcctgtaagccggggcagccgccgtggagatggccataggagagccggtgtccggtgcgaatgagattcttttcccgcagggtcaagcggtccatttgcagctgctctgcgataagatcaagctgcatctccagcccccaattcagctggttgttgccaaagccccggaaagagccggtgtgggcgttgttggtaaaaatcgcctcaccgtggatggagatgttgggaaaatagtaggccccacaggcattttcgacgccatagttaaaaacggcgacactgatgccagtatagggaccgacgtccccatatgcttcgacctggtgcgcaaggagatggccctcccggtccgcagcggttttcatatggaaagtgaaggggacgcgctttgtgctatagagaaaggactcctcccggttcagatacagccggacagtttttcccaatttccaggcggcgaccgcagccaacggctgcagcgccatatcgtcctttcctccaaagccgccgccgatgggatgggcatggcagtggatctgcgctggagagagtgccaaaattttggaaagctgcgcaatatcccggtacggatattgcgcgggggcccagatttcaataccgccgtccggcgtgggactggcgatggcgacttccgtctccagataagcatgctcctgatattgggtctgataatccttttctacgacgacggcagcttcagcaaaggcggcgtctgggtcgccggttttccaggaaaagctgctggcaatgtttgtatcagcctggacggtgatactgtcagcgcgccgcgccgctttcacatcggtgaccagcggcagcggctcgtaggagatggatatctgctgcacggcagcgcgggcgaccgcttccgtctcggcaatcacgacggcgatggggtcaccgataaaccgggtcttatcccggcagaggacaggttggtccggcgcgccgatcccaaaatagttttctcccggaatatcccgccaggtgagcacgtcgactaccccggatacagccagggcgtccttcgtgtgaatctccaaaattttcgcatggggatgcgcggcccggtataccgcgccgtgcaggcaattctccggctgcagatcgccaaagaatttgagctgacccgtcgctttacagacggcgtcatcccgtggaatacgggttccgatgtatgcgggcatacggtcacgcctccttttccaaatagcgctgatagatcagattgcagagaacgtcccgccggtactgggcactcgcgcggatatcgtcgatgggggagatatccgtttgcagcgcgtgtgcaaacgcctgttttgcctgcccgcgctgcgaaaagagcgcttcgcactggcgggcgcgctggaccgtcggcccaacgctgccgcaggcaatgcggcagccaaactgtggatgctgcagcagcgcggcactggccacggagatctgcagcgcgctgcggggcccgaccttctggtaaacgccgcgccacggctgcccttgcagcgggatgcggagcgctgtcagcaattcacccggctgcaggcaggtgcggccggggccgcaggccaattcctcgacagcgacgctgcggctgcccgcagcatgctgcaggacggcggccgcaccgaccgcagccagcgtcggcgcagtatccgctgcgggggaagcgttgaccaaattcccggcgatggtgccgcgctttcgaatttgcgctgcgccgacgctgcggcatgctgctgccagaacggggcaccaggtctgcaccagcgggtcattttgaatttgcgcgtgggtacacagcgcgccgatacaaagcgcatcatcttgcagagaaatctctgccaatgcggggcgcagcgcctgcaggtccagcagttggggagagaaggacttcccagcccgcagctggggtagaagatcggtcccgcctgctaaaatggtataaggcgcgtcctgcagcagcgccagtgcttcttccagggaattggcgcggacaatgcttttaatcataccgatccctccccagcggcctgctgcacggcggcaatgattttgacatagccggtgcagcggcagagattcccttccagcgcttccttgatctgcgctgcagtcggatgtgggttgcgaagcagcaatccctttgccgagagcagcatcccaggcgagcaaaagccgcattggatcgcgccacaatcgacgaaggcttgctgtaagggatccaggatgccgtcctttgccagcccttcgacggtcatgactgcgtgcccatcgacctgctgcgcgagaaccaagcaggcattgactgcctggtcatcgagcagaacggtacaggcgccgcattctccctgtccgcaggcttcttttgtcccggtcaggtgaaatgtgtcccgcagcaggtcgaggagccgtgtcgcaggtgggacgtccgccgtgacggggctcccattcaaaacaaaggaaagttccattgtagtttgcctcctctattgctttgctgtttcaacagcagcgggcgcgtcttcgtggatctttttgggcagaagcaaattgagaagaattgcgatcaaagccgttccggcaacaccggtcagaagcgtctgcaccagagacggcagctgggccagggcgcttgaatcaaaatagcagcccatgccgacaccgagggagacggccaaaatgacggtatcccgggtgtgcagcttttccgaggtaatgacttgaatgccggagacgacgatcatcccaaacatcataatgcacgcaccgcccagaacggggtagggaatcagggtaaagatggcggcgattttcggcacgaatgccatgacggtcagaatgatcccggcatagacgacgacaaaccggctttttacgccggtgaggcgaatgagaccgacattctggctgaaggagacgttcggggcacagttgaagagggcggaaaaggaggagccgaggccatcgcaaatattgccgcggcgcagctcccggtccgtcgggagacggttctccacggcgaaggcgacgcccgtcgtgcagccgacaaattccatcatcgaggcaaagtaaaggattaagatgggtaaaatcgcatcgagatggaaggagatgccaaaggccaggggccgcggcagcgcaaaccaggcataattgcgcagctgcgcaaaatcgaccattcccaggcaggcggataaaagatacccggcaatcatggcgataaaaacagagcaggagcggacaaagccccgcccgacggtactgagcagaatcccgaggaccagaacaaatccggcgacggcaaggtttttcaccgagccaaaatcagcgctgccggtgcttccggcggcataattgatgccgtagctgagcagagaaacgccgatggccaggacgacagcgccggtgacaaccggtgtcagcagatggcggcatttttgaatgatccactggccgaggaccgcctgcagaaggccgccaatgatgcaagcgccgataaaagcgccgtaacccaagtccggatttgtgctgatggcgcagcccgcgccgacaaaggtaaaggtaccggccatgacgatcggcagctttgagccgacgggcccgacgccgagagcctggacgatggtcgttaccccggcggcaaagagggagcattggacaataaaggcagtctccgcggttgaaaagccgactgccgccgcgataatgagcgcgacggccaggttaccagtgaacattgcagcgacatgctgaaagccaagcgccagcccaacgccgaccggtgttttatcatttagattgtaggcgacggttttgtgctgtttcatatgcgtgatcctccttgttttgacggttaattttagcacaaccggtttggtggggacgccgccattttgcaatgacggcgccccaatggggttgcgcacaatggacgtgattagaggctcaggccaaaccggcgcaggtcggtacgaacacgcgcatcgatctcctcccactgcgcggagggctttccggtggcacggtcgtagcactcgtagtagctttgtcccttgggttgatcggcgacatgctcttcgtaatgccccaggcagtaattgacaatctccagtgcctggtccaaacggagcccggcagcagccttgaagacgtcggcgcagaaataggcttccagcggcgtgagatagtttttcagcgcgccgcccgcacttctcgggccggttgtcagctccatgccagaaacgcaggtcgtgatgagcccggcggcgttggtatagagaatatcctccgtgcaggggccggcggtctggttgatgatcttgtccagaatggtgtgggtattgcgggaggtcgcctggacggacatgctcatcgcccaaaggccggtgcggcagcagacggtattttgccgcacatcgaacatcgagcagttggaaatgtcggtgccgaagagggcaaactgcaggatatccgaggcgatattggcgatggcggagccttccggtgggccggagtagccaccgatcatggaggggcagccagtgcggaggaagctgccgcaggaagcggcggtcaggactttattgaagttgcagtagtttgttttcaattccgagggctgcaggcagatcgcgatccggggattatggactttgtgatttgccatgaagcctgccataaagccaaattctgtcacagaggagctcatgcccatttgggcgatatccggtcggcctgcccgccagatggcttcttcccgcagctgcgcctctcgaatgcctgcggcggtctcaaacggtgtgccggaaaaggctgggtggccgaaaatcgtatcaatagagggaccctgcagaatgtcgataccccggtagcggatcaggccgctgaccagctcagggtacaggggttcatcaatctggatggagagggaggtgcagaagaggggctttgtcgtatcctccggctttcgggcctttagggtgacacggtccgtgccgctgcccagcaccagggcttccggcgcttgctgcagcgcgttgagcaattccttacgggtgaaacgaatcaccgtttcggtatcggtgcactggacgccaatcagctcggccaattccaacccggcctcgaaataacggtcggccaatgcaagatcctggttgacggggatatccggatgataggtccccatcagatcgtactttttcagaattttcttcacagctcgcgggacgactttgttatcccagtcccgggtgctgcaggggtcgccatctttgatgcgggcgagaatatcggtgagataccgtacggatgccatagggtgttcctccttttttgttccggctttcacggtgtgcgttttatatcgccggtgtgcctagcatacagggcgggcgaaaaaagcacaagcgtttgccggagcaaagcgggcagggaatcttgcctagtattttagcggaagatttgggagaaattacggaaaaattatgaaattggctaacatgctcacagcgtttttggaaaaattgccggtcaaattggatgattttccaatgccgtgctttgattcggcgtggtgtcatctggtattcggcaggggcgaatccaaaatcaggaagagctagataaaaattcggcaacggaaaataattggacgaaactcaaattatgagcgggttcccaagtgtatagatccgtggtataataaaaaaacgcgcgggacatacgaattgcaaacacgggagggatcgggatgctgcaggtaccgcaggcttggcagggccttttggaggacatatgccgggaggaatatttccagcggctggatgcgctggtaacgcaggcgtatgaggctggggaggtttatccgccccgggcgcagctgtttgcctgcttggaggctgtgccgccggagggcgtgcgggcggtgatcttggggcaggacccgtatcacgggccggggcaggccaatgggttggccttttccgtcgcgccgggggtaaagctgccgccgtcgctgcagaatatttttaaggaattacaggcggacctgcaggtgccgctgcccagctccggcgatctgacgccctgggcgcagcaaggggtgctgcttttgaatactgtcttgacggtggcccgggggcaggctaacagccaccgggactttggctggcagtgctttactgacgcagtcatcgacgcgctgcaagccagcacgcagccgatggccttcgttctctggggcgcgcaggcgcagaaaaaggcggcagccattacaaaggctgccgcaccgcggctgattttaaaggccccccaccccagcccgctgtctgtctaccggggtttttacgggagccggccgttttctaagatcaatgcatttctgcagcaacacgggcaggcgccgatcgattggcagctgccgtagcttgcggattacatcaatttggagttagagactatgttgtcgaaagtggggagaatatgattttactctttctcaatatcgctgttattattgctgtgcttagtactctgggcaatgcggacaactttggcggtgcgtttaccggcacattgtttatcttgtttgttttggcctggtttgacatctttgttgccatcccgatttggaaggccatgttgggcaaagatgatgcgccctccgtcccatcgccgcctgtggtgagtgggacgatgcgctgccccacctgcggagcggatgcaaccgtccacggggaccagtgggagtgcggttggtgcggggattgtggtgtgtttgacgctgcgccgaatttcgattctgcggcctctccgactgtgacagccagacgggcggttggaaaggaaacgtgcgccgttattttaaagggactgggagaagacaaaatcgctgcaataaaggccattcgggaatggacgggtatgaatctaaaggatgttgcagattctgtttgtcaattaccggcgacgctatggaccgcttctgccgacgatgcgagaggattgcttcagaatttgcagaggactggtgctgtggcggaattgtctgttgcggcggagagcatcaaaaagaacagggatgcgtacccggtcgtcttatgcgagattggcaaggataaaattgcagttgtcaaagtcatccgggaatggacggggctgagtttgaaggatgcggtgaattatgttaaccaaacgccgatcaccctgcgggccacctccagggacaatgcggcgcagatccttcacgatctgcaggaggctggtgcaacagtggagatgcggtgattgcaatctatgataagcaaaacgggcacggatgaaaatcagcgcccgttttctgtatgctactgcgggagaaatggccttgcgtggcggtttggccagattttttactgcttgctgccgcgcaggaattttgtgtaggcccgttgattgggaaattcttcgtttttgcaataatcctcggagatttggtacgatccggcaaagtcgccggttcggatggagaaatagcagcttttgaaaaacagtgccccggtggagcgggtaccgaattgggagagcggatg

SEQ ID NO: 4208 - DNA, 5685 bp, Unknown
  16S sequences of unknown bacteria
ggccggctcgggcgtcatccacatggtcggcggcgtcatggccttcatcggcgctgcgttcctcggcccccgcatcggcaagtacgacaaggacggcaagccgaacgcgatcaacggccactccatcacgctcggtgctctcggcgtcttcatcctgtggtttggctggtacggcttcaacggcgctgccggtggcaccaccgcgcaagtcgcgcagatcttcacgaccaccacgatcggcgctgccacggcttctgtcgcggccatgatcttcacctgggctaaagacggcaagcccgatgtcaccatgacgctcaacgcgtcgcttgcgggcctcgtcggcatcacggccccctgcgcggtcgtcgactccattggcgcatgcgtcgtcggcgtcgtcgctggcatcttggtctgcgtcttcgttcccttcatcgaccgcaggggcgttgacgacccggtcggcgcttcctccgtgcacggcatctgcggtgcctggggcgtcattgccgtcggcctgctcgccaaccccgagattctgagcacctacgatgtggagatcaaccccggcctgttctacggcggcggcatcgaccagctcggcatccagttcctgggcatgctcgccatcctggcctggaccatcgtctgcggcgtggttctgttcgccatcctcaagcacacggtcggtctgcgcgttgagagcgaccaagagctcgagggcctggacgtttccgagcacggcctcgtctccgcatatgccgacttcgtcccggttgttcccgcggtcgcgtccgaatctgcggcgccggtcgacctcacgggcctcgagccggttcccgtcaaggctacgggcgatctcacccgcgtgagcatcatctgcaacgaggacaagttcgttaccttgaaagacacgctcgcgcagatcggcgtgacgggcatgacggtttccaccgtgatgggctgcggcatccaaaagggcaagagcggccagtaccgcggcgtcaagaccaacatgaacctgctgcccaagcttcaagtggacatcgtggtctccgaagtggaccccggcctggtcgtggcagccgcaaaccgcgtgctccatacgggcggtgcgggcgatggcaagatcttcgtctccggcgtccaggatgtcatgagggtctcgacgggcgagatgggcacggcggctctcaacatggaggaagagatcgcataacgttaatgtccacggccgcttggcagtactgagtggctttcggcaggcaccctccttgagcgtgccgaaagaataggagctgggcgaataggacacaacagctccggctagggtcgaaggcccgggtccgcgcaagcgctcccgggccttcaccctcgtttatggcacgaggggccgtgggtatcgtctcatgttgacacgaggggccgtgggtatcgtgccattttcggcgctgctagcactgaaacacgcagtgcgcgatgataacgatgatcgtcgtgaggatgccggatacggcaagggcaactccggacattgcgccttcgagctcgcccatctcgatggccttggttgtgccgacggcatgcgagcacgcgccgatggcgacgccggttgcgatgcggtttttcacatggaagatcttcgccatgaggggcgagaagatggcgccgaggatgcccgtgatgatgacggcggcaaccgtgatcgacgtgattccgccgagttcctgcgaagcggcgatggcgatgggggtcgtcaccgacttggggataaacgaaagtgccatctcgctccccagcccgagcaccttgcacagcgtgtaggcgctgaccatcgacacgacggagccgaccaggcagcctgcgaagatggggacgaagtgctccttcaggatctggcgctgcttgtagaccgagtaggcaagcgcgacggttgccggcccgagcagaaacgagaagatagagacgctctcctcgtaggtatcgagcgggatgttgaagagcgtgagcacgaggatgagccccacgagcgtgacgagcagcgggttgagcagcggcgtcttcaccttcttgtagagcagcacgcacagctcgaacaccgccacagaggcgatggagcccacaaggagcatgagggcaaaatgggtgcttggcagactgaagtcgatggtgccatcggcggcaaggatgaaaggtacttgcattgtcggtgctcccctacgcgcgcgtctctgtagaggccgccgcgcgcttgcctgcgatgcggttcatgaggcgcgaggtggcgatgacggtcgccgaggtcgcgatgaagacgatgacggtggtgacgatgcacacgaacgcgaacttgagcgcgctgccctgcagcagggtgaagcaccccatgatgccgacgccggcggggatgaagaagatggacatgttgtcgatcatgtaatcgcacgcgccgccgatgtgcttgcccttgaggacgcccgtggcgagcaggacgagcagcagcgccatgccgacgatgttgccgggaatcgcgatggggaggtagcgggagatgatgcagccgacctcgtagattgcgatcagaacgacgagctgggcgaggatgatgcccgcgcgcttgagcttgcccataactgtgtggctttcagcctcggtagtgggggagtcggaaagcgtggactcgtgcacgttgtgcgcgatgtggctgccagcttctctcagcgtctccgtcgcctttgccgtgttcggcactgccttgaacgattgggttgactcttgcatttgcgcggtcattttgtgtgagtttcactcgattcatgctcgtgggcggtcagatgtgtaacggctcgaaacgatactccttttgcggagaaatagttcgacaattttgcccggtcgggttattttgcacatcctgcgtgagatgcgtggcactgccacatatgccgtgcagaaaacgcgagatgtgtggcactgccacagctcccgtgcatacgtgcgcgatcccggctctcctttgcgcgtgataccatcgaaccaacaccaccgtcgggaaggggattgctgtggaagacgagaagatcatcgagagctttcatttgatgtgggacacgttccccgggctggcgaggctcatcgacgcaaaccatacggtcattgcgtccaatcccattgcgcaatcgaagggcttcgtccagggcagcacatgcgcgaaagttggagatcccgcctcccacaggggatgtaagctcgccaaggcgctgcagagcggcgagacggtcaccgacaacgagctctcagaccggattcgtggctggatgcccgtccccggtcatgaagacctctgcgtccatttcgccatactgctgcccaccgaatcctgattcgggagacgctaactaccccataggggcgcctcatgctctgcgaatgtggggctacagcggatgcccgcccgctaccgcagctcgacttcgtggatgcagtcgacgccgttttcttcgcaaagctgtgcgagcttcttgtcaagcgtgaagagcgttgctcccattcgacgggcgaggacgaaatagaacatgtcgtaagtggaatggttcagccgaatgccctcgttcatcgcctcgatctggagttccgtcatggggtagaactcgtcgatgaggtccatggcaaccgcgagcatgctccccgcatcgccttttgtgaccttgcccgtcactacgagcttgcgtaagacgctgactgcctcggcgcggatgagctcgacgctgattactttttcttcgaccatcaacagctcttggagcgcgcgtccgcgatcgctcttccgcaaaatctcgaagagtgcacagttgtccaagactaccaacgttcctcccgtgcggctgcaatgaggtctgccgtgtcatcgaagccttcgggcagatcgaacgaggggaggctgttgatgcgctcgaaggttcttcgccgtctcgccagaaagctaagctccgccatttctggtttgttgctggcagctgccggtgcgagatgcccagcgtcggagcacggtgctgtctcgggggcgcgcacgccaaggtactgctcgataatggtgagggtctgctgcgatatgctgcggttttctcgtgcggagcactctctgagcagctcatatgtttcggcaggacaatctttcacttgcagggccggcatgtcagctcctctccgcgtctccaattcatgattcagtatagcatgaaaaaagcatgcaaaatggatgaactacgcttgcatgtacaggagaaagtaggtcgaacaatccatgcgatggggcgggcatacggtacgagaaccgctgagggaacacccatgggaatatgttttgggtgactgcaatttttgtgaataaggctgagagcaggccagcaatctcaacacggcagcatgcgcgagatgtgtggcactgccacacatatcaccagcttcgcacgcctgtccgtggggtcggcggcaatctcgatgatgcccttttccgagagcgcgttgagcgcgtaggtggttttgggcgctgctagaagcagcttgtccgaaagctcgctcgggcgcatgttccgctgctcctcgatcagcgcaaacacgatgcgcatctcgttgatctgaaggccgaattcgcgtgccaacttcgtggaaagaagttcaacgaatgaaaatgcgtgaagcgtctcgaacgcatcgaaaaaatgcccttcgcggattctgttgccgtactgcgtggcactcgcggtgatttccgatccgacgacgaccatcgcgcgtaggtttggagacagcggagaaaagtacgactcgtgtgcgagcatcaaggcgatgtctgcgtcacgcgaaaggtagacacctgcttttgttagtgacgccttcaggcgcgttctgccattgtcttcttgtactacaaatacgatgttacgctctttgagctgggaaataaccgttgtagccattgcgggtgagataccgaggattgaggcgagcgcactgggggagctgccgtctggatggtcgtggagatacgatgtcatacggtattgcacaaaaagaaggcctagcaatggccgctaacgagattctggttgacctcgagcgctgcacgggatgctggacctgcgcgttttcctgcaagttcgcacatggcctagatgatgacgactggcgcatcgtcgcacgcacgctgggaagcggcgaaggcatcgacaagcccgctggcacgtggggcgatctgcacatggagtggatgcccgtctgggcgaccaagtgcatgcgctgcggtgcgaacgactgcaccgagagctatcccgagccgttctgcgtgcacaactgcccgacgcgcgctctgtcttttggcgatgtcgaagacgagtcggcgccggcaggggcacgtgccgccgagctgaagaaggccggcaggcgcttcttcaagatgtccgagttcgagcagacgcgaccgggtatcacctacgtgaaccgcaagaggtaacaacgccataaggggcagcgggcgttaaaagaggggagtcggggtcaacccggctccccttctggttttgtggggttgggcggatgcgggctgccgcgggaggctgcgagggcgacggattcgggccccgaaacgtctcccttggcccgccccgcggcgaaatccgtctccct

SEQ ID NO: 4209 - DNA, 5613 bp, Unknown
  16S sequences of unknown bacteria
cgttgaaagcagtccgcatgacgatcgcccggcaggaaaatgtgcctgcctatgtggtcttctccaatgccacattgatggatatggcggataaagcgccttgcagcatggcggaattcctggaagtcagcggtgtcggagaagttaaggcagaacggtatggtcagatattcctcgatgcgatcatcgcttatcaacaggaacactgatcggcaaacggcgctttctgcataagggaatgggcagaacaatatccactagaggcgaaggcgcagcggggccttcgcttttcttcaggaaaatgcagggaaaaaggacaaaatctttaaaacgaaagcaaaatattacaattccttttttgctataatgaaagcggaaacaaagaaaggatgatgagatgaagagattattgagaggtctgcttgcttcggccatgctgacgacgacagtgctgagcagcggaccaggtatcgtatttgcggctgacgacagtggcagtgcagatatggagtatgaggtcattgaggatgcatatgtcagagccggaggcaatgcgaaccgcaactacaactatgagaacattacaaaggcgcatggtgagcaatatgtcggcaagaatcttaaggcattgagcacgaagaataacaacggttcttcgaatgagatcatgacgctgatgaaatttccgattccggatgcagcggagatcgaagaaaagcagctcgatcattttgaactggtattccatatcttcaagaatgcggattacaataccggagatcagacttaccgcttctattattccacggatacagactggagcgagacttctgtaacatggaacaataaaccagaggatgtcacgcgtgattctcagcaagtgctgtttgactttgacatcaaacagggcgatgagtatgaaacaaagccggatgccgaaaaagagatccatatggatatcacggagacggtggaagcgctcagtgaccagggagtcaaggagatcacggtgttcacggcagccatcaacagcatgaacacctcgctgatgatccaggatcgttccagcggcaatgcgtctgcggatgaaaacgggatctatgcggcaagcatcgtcgcttctcatgaaggcatcacgctggagcagttgaaccagctgatcgcggaatgtgaacagctggattcctctcagtatgaagaagacagctggcgtgctttttatgaacagctgagcatagctaaagagtttgcagcggctgatccgcaagacagcagagagatcagggacatgtatcatgcgctggaagaggcaaaagatgcgctgatcacgctgatcgatccgaccgatccggacaatgttgcttaccggcgtccggtccgcagcaatctttccagcgctgatgctgagaaggtcaatgacggcgatctgtccaccagctggtccggaaagttctatccttcctatgtcgatatcgatctgaaagatacctatgacatcagtgagatcatcatgaactttccggaagggaagacattatactatacgctttatggaagcaatgatggcgagcatttcgatgagatcgcacaagtgcacagtgacgaggccaaggatgctgcgggcgatgtgatcacaccagaaggcgattgcagctatcggatcatccgttattacgcggaatataccgatggagagtctccaacttatctctctgagatcaaggtgcatggcgaaaagagcggtacaaacactgaagcgctgcgtgaaggcacctttgaagagatcaccggtattcaggcatttgatgatacggcatatgctgaagagatcagtgaggaagagaccattgaaaacgtgtatggcatcatcgaccgcatgatcggtgcagagtatcgcgactggttcagctttgaaatcgcgccaaatacagaaaacgacaacgattactttgagctgagcgattaggatggaaagatccacatcaagggcaatgaaggactttccctgacgaccgggctgaattactactataagaattatgtcaatgtgcagatttctgaggagacgatgcagaccgcgatgcccgaacagatcgttgcgatcaacgatgtcgtacgtaaagaaacggatatgaaggtacgttacgcgttcaattattgtaccttgagctatacatttgcgttctttggcgaagaggaatggcagcgtgagaatgactggctggcactgaacggcgtgaatgtcgtattggatctggctggtcaggaagcgacatggatcaagttcctgatgaacttcggatattcttatgatgacgcaaaagactggctgaccggtcctggttattacgcatggcagttcatggacaacatggaagtgttcggcggaccgatcccggatgactatgtgatcgaccgggtggaactggccagaagcacacagcgctggaagcgttccttgggcatgcagaccgtgctgcagggctatgccggcatggtgccgacaaacttcaaagattactatcaggatgacatcgagatcatttcccagggaaactggaacggattctcccgtccgaacatgatcgcgaccgatagtgaagaatacgatcagtttgcacagctcttctatgaagcacaagagttcgtctatggcgacacgacggattactatgcggtcgatccgttccatgaaggcggtatccgtccttctggactgacggatgacaagatctctgcagaggtgctggaatcaatgatggcatatgattctgatgcggtctggaccgtgcaaggatggcagagcaatccgaccgatgctttgctggaaggcatgggggataaccgggaagatcatgtgctcatcgtcgacttgatcaaatatccgatcaccagcagtggtgaagagcagtataaggaagatgagttccagggcacgagctgggcatggtgtctgctgggcaattttggcggcaatccgaccatgaacggtgagctggagacgatggtcgacgagatcatggatgccagaaaagacagtgaacatctgtctggcatcggcatcatctcagaagcgacctacgacaatccgatgatctatgacctgatcttcgatctggcatgggccgatgaagactttgatctggatcagtggatcagcgattatctgatcagaagatacggcggacagagcgacaatgcggaacaggcatgggagctgatcaagaatgctaactatgattcaggtgtccgtctgactccggaattgtttggattgcgtactggcggtgtgccgaagaacattggcaagaaagatatcggctatgacgcagaagatctggaaaacgcattgcgtttattgctggaagattttgaccgattcagcggcagcgaaggttatctgtatgacctcagcgagatcatgcgccagatctgcagcaactacacggtgctgaaatatcatgaagtaatcgatgcccgtgacgctaaggatcttgaagctttccgtcaggcaaaggaagaattcctcaatgcctttgatgtattgaatgaggtacagaagacaagacagaatcagctggccggagagtggatcggcaaggcgcaggatcgtgcggcagaatatgatgatttctccaaatcgacatttgagatgaacgcaaaatctctgatcaccacttggggcagctcaggcggatcactggtggattatggattccgtacttatgaaggcatgttcctggatctgatcaagtcaaattggactgagtatctggatcaggtggaacaaaacctgatcgacggcacagcgatcgatgtcccatcgaatacaagaggatatatcgaaaagtattggaaatgggtcatcggcgatcaggattatactcgtgatgcggcagacagtcctgaagaggtgctgtcgatcgctcagcgtgtcatggatgagtgtgtgttcactggagagcttgatccagacatcggcaatatcgcccttgatcgtgaggccgacatcgatggagacgcagaaggcaagacatcctggctgacggacggtgaaactgatcagcaggtatctgtatccgccgatcagtcagtgacgatcgatctgctggcagaatttgatctgacgggactcagcatcgtgaccgctgatcctgaagcacagtatacgctgtcattcagtcaggacggcagcgagtggaatgaggtgcagggaactttatccgttgatgcggagaacggcatcgttcacatggatgatctcagcgtcaatgcccgctatgtgcgtgttgttgctgaccgtgatgtctcgctcagcgagatccgtgtctatggcaaccagatgctgcctaccgtcgagcagctgcagcggctgatcgaaacggcggagcagatgaatgtgagcgcgaatccggatgatctgatcacatcattccaggaagcgcttgaggaagcacgtcaggcggcagaggaagcatctgcggattccatgaataccgcatattggaatctgtatggcgtgatgatccagatggatacgagcggtctgatcaatgtcgcgctgaataagccgaccaccgcgcataatgatccaagcggtaattccaagaatgtcaacgatggcagcacatcgacaagatgggattccggcagactgagcgcaacgggcaaaccatatgaagatacgatcaccccaggctgggtcatcatcgatctggaagatacttatgagatttcagaaatcagcttgtctttcgccagctcgacgatctggtatcaatatgaactgtactgcagcatggatcaggaagaatgggtgaagatcggtgaaaagaagaccgagaccgcgccgaatgaacaggaagatacatatgaatttgaaccgcagcgtgcacgttatgtcatgatgcggacgaccaacatccaggaagacagcagtggaaagcgcaatggttatctggtcagcgaactgagcgtcaagggcaagctggcatctgcagacaagactgcgctgaatgaagtgatcgatgcagcgaaggccatcgaagaggaaggctatacgacagatagctggagcgctctgcaggatgcgctggcagccgcagaaacgatcatggccgatgatcacgctgtccaggaacagatcgatcaggcagcaagcgcattgaaggccgcgatggatgctctgcaggtcaaggcgagcgcatctgcgatccaggcattgcagaacgtggtcaataaggccaatgcgctggagtctgatgatgaagcattgaacaatgcgatcgaaaccgcacaggcactgctcgatgatcaggatatcgcgtccgtgacggcagtcgtgagtgcactgctcgatctgagcgaagcgatgcaggcgctgaacatcgatgaaagcacagatgccttgaaaaaagatgttcaggcgacgatcgacttcatcaacgaaaacatcctgaacgatgtagaaggactccgtccgggcaaggtgaaggcgctgaaagatgccatcacggcagcgcagaaactgctcgccaacgaagatgcagctgctgatcagctgaaagcagcgaataaagcgatgaccaaggcagcccaggagctgtgggagat

SEQ ID NO: 4210 - DNA, 7366 bp, Unknown
  16S sequences of unknown bacteria
gatcgccctgatggcagctgcaggcgcagcggcaattgcagcttatcgcagaaagcgaagctgaatcaagacgaaagacgggtgacggcccgtcttttatctatgtatcgtctttggtgaaatgatcgaccatatcgaacaggatcggaaatgatagctgccgctcaacatgagaaagacccgcctgaggcgggcctttccgaattaggggatagaatgatatacgcaaaatagggattttctagggatgttttgcgtagacagatctttttcatctgtcactgtcagtatacccggatcgaggggaataatttgtcgaaattactgcacatcttcatttttgatcatttctttgatgtacaggtcctgttttgggtagggcatttcgattccttcctggtcgaagcgcttttttacggcgatgcgcaggtcggagagcatcgtgaaacaggtgccgttgtcattggaatagatggtcgcacgcagctcgatgccgctgtccttgaagtcggtgactcggacgaccacctgatctgcgccttgctgcttctcctcttcgctgcggggatccacatagtccggatgcgcggcgaccgtttcctgcaggacgcggatcgcttgttccagatcagtgtcataagagacgctgacataaaggaagtctgccttggccgtgccgatgtcggagatgttttccagcacggaagtattcatctgagaattcgggatgatgacccgagtgttctcgaatgtctcgatgatcgtatggcggatggtgatctccacgacggtgccgacatattcgccattgttgacgcggatcagatcaccgatgtgaaacggacggaaagtgacgatcatgaacccgctgatcagattgcccacggtttcctggcggcgagaccgacgaccacggcgacgatgccgccgctggctaacagcggatccagtatggtcttggcggggatgaacagggtgagtatgccatagatggtgatggtgatgatcacatatttcttgaccttcagccagatgggcagattgcggaaattccgctttttcatcaaccgggtcaggatccgtgagatcaccatggcggtgatcaggatgagcaggatgatgatgatcgtatccgtcaggccatattgcaggacgctgtcctttccccattgattgagctgttcaaaaaactgatccatgagatccctcctccgctcttaagagtcattataacagagtggatgatgggaaacaaaggggaaataaataaaaataagtggaattatgtgaatgtattgaatcacttttggaatgaactataataatgacaagaggtgtttcctatgcagttgaagagcaaaattctgaaaaaatggaaccttccttcctacggtgtccggttagggaagatcacatccaagccctatccgatcctcatcgctttcctgggcggaggagtcattctcatcctggtgcgtcagccggtcttcggcatcgccgtgtgcgcgctgagcttttatcagctgtgcatcggccacaatgacagcctgtgtgagttttacgatcaatatgtcgtgttttacagcccgaaggagccggatgactgctacatcctgttttgggaagatgtggcggaatggaaataccacagcggggtgacgcatgatacgctgcatgtgctgctgaaagatggccaagtgctggatttctcctcgctttcccgacgcaagacggagcatttcttccggcggttcgtcccgcagctgaaatcctctgtgcataaacagcaagtttgaggcctgtgtgaacaggcttttgttttccgggattattttgtataatggtagggaattgaggtgttgatatgtttcgcaatctttaccatgagatcaaggcgcatcaggatctgaaaaaggaagtgcttcagttttccgtgctcagcatcctgtactttgtcttatacacgctgctttccgcatttctgggcatgttcaatcatgacgcattgactgtggcggtattctgggtcctgaacctgatttccacctatgtctacatgcgttttttctttcagatgatcgcgcgttcaagagatgaggagcgcgtggtggggctgaagccctgcctgcgcatgctggtgatcgaaagcgtgatgtttgccttctctgtgctcatgtattacgcgttcgtctattttatcgaattatatcttctgctggcgctgatcagctatgtctatctgtttttctgtgtggctctccagctgttttgtttctacgagatctatgagggcaccggcggtttcctcaaggtcgtgacttcggcgctgcggcagatgggccgtcatggccgtgaggtcgtggcagcctgcgccatgctgtgcatcggctatatcctgctgtatgtcctttcggtgggcatcgagggaacagtggccgtgctggcgccgtatacggccatgctgaacatcggcgtgacgatgaatcgatggatggaagtatgctcggtgctgttaaacatgatcatgacccagaccttcgatctggtctatgcgggcttcctcgccgttcagctgctggccgcggtgatcttctcgatcctttatgtgctgtggatgggatggatctgcgtgatccgtcagcggcagtaagcagatcatggaactcaaggcgctgcgcatcagcgagaagcgagaggaacagctggtctccatgggcatccatacggtggaggagctgctttcctattatcctttccgctatgaagtgtttaaggaaagagcgctgtctgaatggcagatcaacgatacggtgacctgtgaggccacgatcctcagtcgtccgcatgtgatgcggctgggcggaaagcgttcgatgacgcgctttgctgttcaggtgcaggatcaggaattccaggccgtgctgttcaatcggccgtggacctcgcagtttcagccgggacgcgtgatgacgctgagcggaaaatatcagggaaaaggccggatcacggtcgccaattatcagatgaagccgctcagcgagctggaagggatctatccggtatacagcctgaaggaaggtatgcaccagaaagatctgcgcagactgatagaaaaggcgatgtcgctttgcctggggcagatggaagatgtcctgcctcgtcctttgcgtaagcgttatcggctctgttcccgtgcgcaggcagtccgctggatccatgcgccgcgatcccgcgaagagatcaagcaggcgctgcgccacctgaagtatgaggagtttttccggtttcagctgatcatgcaggcgctgcgggaggagaaccgcgcttatgcgcaaggcagcgccaagcagttttctgccgatgaagtgttttctttagaaaagacgcttcctttccagctgacggatgatcagcggacagccattgccgagatcctggatgatctggcgtcggagaggctgatgtatcgcatgctgcaaggcgatgtcgggtgcggcaagacgatggtggctgcgttcgggctgtatgcgtgcgttctcgcgcatcgacagggcgcgtttctggccccgaccgagatcctcgcgcggcagcacgctgagagcctgaaggcgctgtttgcggataccggcatccgtgtggagctgctgtgcgcgtcgttgaaaccagcggtgcgcaagcaggtgctgagagatctggcggaggatcagatcgatatcgtcgtcgggacgcacgcgctgtttcaggatgaggtgaagttttatgacctgggcatggtcgtggcggatgagcagcagcgcttcggggtgcagcagcgccgccgcttgctggaaaaaggcgagaaggtcgattttctgctcatgagcgcgacgccgatcccacgcaccctggcacagtcgctgtttggagacatggatgtgtccatcattgcacatcggccttcaggacggatgccggtgacgacgcatcttgtgcgctcctccagcatggggccgatcctggaggaagtgctgcagaagatcgatgaaggcaatcagtgttatgtcgtctgcccggccatcgaaaaaaacgaagagatgcccatgcgcaatgtgacggatatctaccagggcatgtgctcgctgttgggaaaacgatatcggatcggcctgctgcatggcaagatgagcggcgaggagaaaaacgaagtgatggagcgttttgtccgcggagagctggatatcttagtgtccaccacggtcatcgaagtgggcatcgatgtgaagaaggccaacctgatggtcatctatgacgcgcaccgcttcggcctctctaccatccatcagctgcgcggcagggtgggccgcggcagtcagcccgggtattgttatctgctcacctcctctggggatgaggaagcgctgcagcggctgaagatgctggagacgctcagcgacggttttgagatctcccgttatgatctcagcctgcgcggtcccggagatctgctggggaccaggcagagcggcgtgccgggcttcgtgctgggcaatgtcatcaccgatgaaaagatgatggaggcggcgcgcagcgacgcggcttaggcgcttcagcatctggaggatgaggagtacgcctgcctgaagccgatcatcgagcaggatgtaaaaaaatcagcttattttgattagctttgtgatataatgtcagacagacagcggaaaggagagagaaccatggataaggcaatgcagagaagacacaagatccgcgacaagagcttcttcttcgtctggatggcctgcctgctgttcacgctgttttttatcggttattttttctttctgcgaaccagcgaggtcgacgtcacgcagcatgtcgtcctggaatacagcggggaaagcggaagtgccagcgtggcggtgcgcagcgaggagatcagcgtcaatcagcggctgcaggatttctatgattccctggagtttaccgttacgccgagcgaagggctcagcaacggcgatgagatcaccatcacggccgactatgacagcgatctggcgcagcagtatcatcttgagccgatcaacctgacccgcacggtcaaggtcgaaggcctgccgaaccgttatggcagcatcagcgatatcccgcaagaattgctggatgggctgagcaagcacgccgacgcctatctggataagcacatgagcgcgatcctggataatgattttacggacttttactcgatggacgatgtgaagctggaaaatacggagatcgtctatcaggcgttcatgaagtcgaagacgagcgagaacagcgaccggctgatcgtcatctaccggctgcaggccagcggtcaggtcaaccgcagcgatgaacaggaggagctgcaggaagagcgcagcagcatctattacatggtggtcttcccatcgatcaatgattccggcgtcattccggatgccagcgcatatggcgagaaggtgctgctgagcagcgaaccggatgagaaggcgctcgatcaggcactgaagacgtatctggaaaataagggccggggcggctatcagatcgaagcgatcacgtcgcgtgaggaagcggccgcggaggatgaggctgcttctgatgatcaacaggaaaagcaggcagatcaagcggaaaacgaataaaaaaatatgtgcacatcgatggagatgcgcacatattttttattcgctgagcagcgcgcacagcgcattcaggtcctgcggcgcggattcgtggaattccagctgcagggcatcgtcttcgccatagcgggggatcaggtgcacatggaagtgcgggacgctctgaccggctgcctcatggatgttgctgatgacgttcatgccggccgcgccggtcttctccatgatgcgcaccgccagcatgcgggccgtcttcatcaggtgcgccagcgtctcatcatcgcaggtcagaaagctgtcgcagtgcttcctcgggatgacgagcgtatggccgcgggtgacctgggaaatgtccaggaacgccatgacctgatcatcttcatagatgatggatgaagggatctttccttcgacgatatcacagaatatgcacatatcttcattacctcctgtctcttattgtatcacaatcagcgcgaagcgggatgggaaaaacggccgctcatcggccaagagaaaagagggaccaagatcgtccctctttttgtgttttgcttgccgagcgcccgtcgatcgtctggggtccagctaaggaagtatctgatttgttagttggtcgcggtagtgtcgtcagcctcttctgcaagatccgggcgctgaacgagatattcagggttggatttgcgcagggcgttgaagatgtcgacatcatataccgtgaagttgtactttttcaggtagtagaccatggcgtcattggtcagggaagtgttgtcctgcaatgcttccgctacatcgtccttgatcgtctcataatccttggataccagtctgaccacatagtagttgccattggtcgtatccgggatgacctcgttgaccagcgtgccgtcctctgcgtcgttgagcttggtcagcacggctgtcggcaggccgctctgtgtggtgacgatctgctcgctgccatcataagtggtcgtttcgccgtattcttctgtgacttctgcgaaatcgccgccgtcattcagcgcttccagtgcctggctggcgctgtcctgatcggtggtctggaggatctgtgcctttaccggttcatattcttccaggaaattggcgttgtcatcatccatatacttggcattcagtgcctgctgcttgtagttgggcaggtataccttttcgatgtagtcatctacgctttcataacccaggtagatgacatattcttctgcggtcatgccggtatcctgcgctttatactgctcggcatactgatcatactcatcctgagcctgctggcgcatctcgtccgtcacttcgatctcgcgttcgaagatctgctcgcggatcatgctcagcgcgtagctgtagccgctggcgcttttcagcgaaccgtagatgtcgccgtcggtgatgctggtgttgccgatcgtgccgatgacatcagaaccatgagagatgttggcagtggcatttccgcagccgctcagcatgagcgccgcacccagcaccaatacgaacttgtttttcttcattctgctttgcctcctactcttccgggtccagaccggcgaactgacgcagccggttcatcatgttttcatccgtgaatgagatctccagttttccagcggcatcgaacaggatctcgctggacagcgtgtcgttcacatggatcatggatgtggccagagagggccatgcatcgtcattgtcca

SEQ ID NO: 4211 - DNA, 13848 bp, Unknown
  16S sequences of unknown bacteria
agggcatttttgcgaagccgtcaatgttgcagccgcgcaaagcgcggagcggcataagccgcaaaggcttgcggtagcaagacttcctgcacatattataccacagcttcggggcactttgcaatatccgtcgcaattttccgtcggagcttcgcccggcgaaagccgcgcggcgctcgaagaacgaaaaagcaccgatctccggtgctttttcgccgaggctttatatcatgcgcttaccaacgcttcatgaatccgcgtatcgactgctcggcgatctccgactgtacttcatcgggcggagcgtatgtcatcagctcatcgccgatatagagcaaatcgacgaggaagggatatgcgtatcccgacgcgccgaggagatcggcatagtgatcaagattttcgtaaagaccgtcgaggtctatcgcaatcgattcgacgcgcgtcgggcagccctcgccgtatcgggggaagatgaacttttcgagcagcccttcaagctcctcgcgcgtgatgcccgcgtcgcgcacgattccggcgacggtgaactgctgaagcgatgcctgatggtgcgcctcggtccaccaatagtcgtatccgccctcggcgtccgcgtatctgtttttgaggaaggcttcgttttccttaacatatgtccgcgccctttcgagtgcggcgttccattcatcggcacccacccgatcgatgagcgcttccgcttcgtccatcgggctccatttcttgtagacggtcgaatttatcctgtcgtacagtgcggcgcgctccttgctgtcggaatttttcagatagtcaaggagcatatcgcggaactcccgcaggatcggcatgatgttccaatccgtgcatctgcggaagcgctcgacggtgtccggctcctcgccgaggcagatcgggctgctgtagatccatacattataatatatgtcgcggtatttgcgcgtcggcattccggtttttttgatgaatgcgcggacggcggcttcggtcagcgccgtgtagtactcctcgtcggaaagggcgctccggtcgggaagctcagacggtcggcagatgagcggaagtacggcctgcagctcgtattcggtgaggctgccccaatcgagcagtccgacaacgtcgcgcggaatgcgcagatatgctttattcctcacggtgtcgtcatacggcacgggcggtcgcgacggctccgttccgttcggctcgccgggcatatcccgcgggaacattgcggggtcggtcgggtaatccgtcgaataccccgtttggacggcgtttttcgcctgcgcttccggcgaggcaggattctgctttgcaccgcatgatgcaagggtcgggagcagacaggcggcgctgagcagtgcggcgaatattcgccgtgtgtttttcgttgaaagtgtgttcattttgacctccgcagtttcggttgagatatcatttttcggattgtcgaagcagcttcgatcttcggctgcacggggatttaaaacgtcaaatcggattgcgcggcacatcgtaatgtgcgtcgcggcgtggtgaatgcggtgcgcggtccttgcggttcatgcgttgccggaggagggggatgcggcggggatcgcgttttcatccgcgtcggcgctgcgtatgcgtccggcgccgccgtatgcgcctgccgggactgcatgattttcggatttgttccgctccgacggttcgttgtcgggcgtttcggcaccggcgccgacggtgggcaccgcggcttcggttctgcgatttgccggcactgcggcattgcggcacgaaacgagcgctgccgaaatgcagatcgcggtgaagatgatctccaatgcgaggagtatgcgtttctttattttcctgttcatttcatgtgtgcggctccttttccgaagcctttcctttccgggcggggctgccgccgccgattttgaattatgtattgcgggaggcgggatcgatagggttagcaagtgcgaaacctcaactttgccggcgggcagtgcccgccgaagctgcggcggggattttcgcccgcggtgtatgaggtgttttccctttcacctataaagacggcattttatcggtttggttgcacgaaaacgaaaaaatttttaaaaaaattttatccgtcgggcgagagggcgcggaaatcgggacagtcgttcacgttatatttacatatgatgcgcttttttgctttagggaaagtaaaagaaaatgttgacacggcgagaataatgtgctaaactaaggcagaagtaaggttttatatgtagaaaccgactgccgacgcgcgaaaaaatgcgctttgattcgaaaggaggcgctttatgagaagggttttcggcattttgcggatgtgctgtgccgattgcggaatcgtactgctttggcgcaccgggagcgcattttgatgcgatgcagaatgcgcgtgcggacaatttaaatacatgccgactgcggtcggcgaaaataaattttcggaggtctttatgaaatcaaaaatatttaccgttgcgggacttataatgacggcgattttcatgatgtactttatcctggcggtaaactttacgaatgcgcttttccccgataagaattcgtcttacatagcgctcggcgtgtatgtcgcggctgcggcgctttccttcgtgatcgcgggagtgctcagaatcgcggaggcggcgagagacggcgaaagactgagccgctccgacacttttgcggcggcgggacttgcgctggcggcggtctttgtgccgttttctctgcgcgcgcccacggtatttgcgagatattcgaccgtcgcggtttcggtgtacggcgcactgacggcgatcgttttcgtgatcgccgtgatactgaaggcatcggagcagaagcgtttcggcggcgcggcgaagcggagcgattggcacgcgatgattccggcattgctcggcgcggttatggagatagccgctctcattctgttcgttatgagcctgccgggaagtccgaccgaatcgatcgtttcgatacggatcacggatgtgcagttcaagctgtatctcaccgttatgagcgcggcttttttggcggcggctgtaataaaattggtgaacacggcgaaaaaacggaagtataatgcttaattcaaaggaggatcgatcgatcctccttttttgtcggattccgcgcttttgccgcgtccgtcggcacggtaatcgcgttatttattccgaaaagggctttcgcacgcacgaaagcccttttcttttacatatatttcagattggtccgcaccttctccttctcgctttcggagagagaagcgaaaaactttttcgaaaagccgcgatcggtcattcgctcttcaagcggcacggtccacgcgcgccgctgtgccgacgtgagtccgtaatatcccgtgaggtcctcgccctttatccggtcgaaggctttgagataccgcccgacggcgctgtcgccgaaaatcatataggtatagtacaggcagtaatgaacgtaggaagccgcgccgagcccggcggcattttccgtgagagggcgcagcggcagatgcccggcgcggatatagtaaagcacgtcgcagaagtggctgagcggggtcgggcgctgcgaaagaaggtaaagcgaatttgcgtccttgtagtgatgcaggcacatcgagataaattcgccgacgggggagagctttctcgtctccgcgccgcagaccgtgcatttcacggtatccgaaagaaaggcgttcatatcgcatgtgcgctcgctctctccccagaagatgtccgtgttcacgtcgatctgaacgaacgggcagaaggggttgcgcgtctttttcgtgaacggcggaagctggtgcgtcattgcggactgaaagattatctcgcgccgtgtgaattcacgcagcgctccgtcctcgaccttgccctgaacaaatccgcatccgagaaggatctcttttacgcgcggcgcgtcgtcctttccgatgaggatatctatatcgccggagcggcgcgtgaagggatcgccgtatgcggcttgcgaaaggactgctccctttatcacggcgaacgggatcttgctttcttcaaatcggcgaaagacctcgcggcatgaggcaaagcgctcaccgacggcgatgcggttgacgatatcgtccgttcggatgcgtttctcaagctcctccgggacgtcgatattcgacagcaggcggcggcagttgttccggtagagaaattccgctatgtccgcggcaggctcgatccccgcgtcggcatcgcggatcgcgcggaatatacgcccgggatcggcgaaatcccgccgcacatcactgcgcccggggcgcggcgcgggatcagtcatgcaccgtcaccccgttttccgtgtagaaattttcgaattgtgcgttcttgtcggtgcggcggtatgttccgcccgcgttcggtgagacgcgctttacctcgtcgagaagcagattctcaaatccgcgcccgaaaacgcggcacgagatgaaaaaaccctcgatcacgggagaatccgcaaggcggacgaccgccgcaccgacgatgcccatatcgccgtacttatcggatgcgcgcagcgagaggacgcggtattcgtcggaagcgatgaagcggcgtacatcgtcctccgtatagcgcgcgccggagagattgaactgattcgttctctgcgagagctccgcgacgcgcggcgcgtcctcctcggagcagagcgaagtttcgacgcggctttcgagggagttgttatattcctcgacgcttttgcagcggagtttttccttttcgcgttccttctgatcgcggtactgctttgtgcggtcgatgtcggagtctgcgccttcaaagcatgagtcgatctttgcgcagagctccggatcgtcctcatcggcgcggatcaccgtgatctcggggatgagcgcggagacgagtccgatctcatagtcgctgtcatcgacaaatacaaagctgtcgggcgagaggttgagttcggcggcgatctcgcgcagggcgctcggcttatcgtttccgctcatctttgagatcaggatgtgctctctcttcagtgtcatgccgggctgacggaacgcggcggagatgttccccggctgattccggctgcaaatgcagagcagcacgcctgcgttgtacagcctgagcagctcgttctgcaccgcgtccgccgccgcgtcgattacggtcggctcctccccggagatgccgcgccacagcacgttgtcgcagtcgcagacgagcacctttttgagcgtgttcttcgagaaatatttttcgagcgttccgaacagcgcgttgacggtggaaaacttcccgaaatcgaggtcgctgtcgagcacctctatgccgaattcatcctcgagcgcgacgacgaactgaatgaaggcgatcgaggtcagcccgaaatccttgagcggcgtgtctccgtggagcgcggcgagaagatcggcggtgtgtccggtgacctcgctgagcagtccgaatatctttttcttgttttcttttgtcataattcctcccgaatcagcttgccgaagctgagcgttacgatctccattttgcggaattcgcatccgccgtcgtcggcgagcgggtctcccgtgagctgatccgcgttcgccatgcagcccttgccgcacttctcgcgcaggatgcagcgcccgcaggaataatcgctttcggcgcgggctttggcgatgccgcgcacccggcgcattccctccgcgaattccgtctcgtcgaaggaaagcgcgtttgccacggtgaatttaccgtcgtacagcccctgacagggctgaatcgagccgtcggtctttacgcagagcgacagctcggaatcgtcgagcgacagcggacatccgagcgagcacagcggaagctgcgcgtttgcgccgctctcttcgttgaggcgctgcaccgttttcatcaccttcagcttttcaagcggggtgagcgtcttttcgtcccattcgcattcgccgttcccggagcggaagataaacgcgaattccggtgtgaagccgagcgagagagcaagacggtagaatttttcgacatccgcgaggttgcccctcgacacgaccatcttcagccgcttttcggcgggcgaatctgataccgaacgtgcgaattcgactgccttttcaaaattcccgcgtccgcgcgtgagcgcgttcgtctcctcgcttgagccgtcgaggcttatctgcagcgtcatgttcttctgcgactttatcgccggtgcgagtaccgatcttgcggcggcggtggttccgttcgtagtgaccccgaacgaaagctgcggatagcgtgacggaagagctgcgatcttctcgaactccgagtggagcgtcggctcgcccccggagatcagtatccgctttgcaccgtatgccgtgaacgtcgtgatcatccgctcaagctcggtcacgccgatctccctcgtcacggtgttcagcccggagcggttgtagcaggtggtgcagttgaggttgcatctgtttgtaatttcgatataagcctttgatatcctcactttgtgagcacgactcctttcgaggtcatatccttgaggaagctttccacatccggtcggatgtcctcgggatttgccgaatagcttttgcacaggcgcgcgacaagctctctgatattgcacggctcgtcgagtgcgtcgagaattccggtgcccgtatcattgacgagatgggtgcagccgctgtcgggatcgaacaccgccgttgcgtattcgtcggtgcggatgaaatccattttttcgttttttctgtagactttcattatattactccttttgcatcggggaaggtctcccgtatttttctttcatattgtatatatatatcgcttttcttcgctttctccgcgctgtaggcgcagcggcggaattcccggttcacaagaagcgcgatgccgatcagctcaggcgggaaggcggcgggcgttctgccgttgacctcggtcacgcggccgatcaggtcctccgttctcacgtcctcgagccgcagtgcgttgtcccccttgaggaatgcacgcccgtcctcgatctttacgaggcggtggacggtcagcgcgcctttgtacaggaacacgaagatttcaccgaccttcggggcgtgcgctctttcgaccgtgatccaatcccccggcttgaacatcgggagcatgcttgtcccgcgcaccgttatcacggtgcttacgcggtatttcagatttgagcgcagcagggatgccattgtgcgtccgtcgagattatgcattttcgagcacctccgcggcgtaattcatatccttatatacaagattgcggcacgggacggagccgatctttgtcatcagcctgagaaattcgccgtcaacgggatacggtatcatcggcgacagcatcagctgatgcattttcgttgtacccgtcatatctattgcggcgttcatattgagggtacgcaggatgaagtatatcccgccgagctcgagcggtttttcgaccgggttgtccggctcatagatatagcggaacaattcaccctcgagcattcttttgagaggcggcagacagacgcccgccgcttcaagcgcggtgataccgccgggacgcaggcggagcggtgcggtgtacggatagacgcggagcgtttcgcggtctatcagaacgcagtcctccgttatgtatccgaagccgtgcgcggtgagatatgcgcaaagcgttgttttgcccgcgccgcttcttgcgagaaagacgtaagctttaccgccgcactcgacggcggaggcgtggaacgcgatgaccttatcgtcgaattccacggttttcagcatatagctgtcgaacgcgcggagcggaacgcgagtgcggtaaagcttttcgccgcactgcatattgaacgcccgtctgtacttgcttatgacgacgctgcggtactgcctgccgtcttcgctttcgtctgtcaggtatctgccgtatctcatgcggagaagcttttcaagatcactgttgtccgttgtgatcgaataggctgtctgatacggggcggacagatacaaggttttcgacaaagacattagtaaattctcctttttgtggaagttgtgagtatattatacaccattaccgaaaaaacatcaatagaatatctgcaattaattgaatatttttccacaaacctattgcattttgaaaaaaggtgtgatataatgatagcgtcgaagggaaaaccggatgctttctcgggcaaacggtcggaaaaaagagatcgaacacataaaatcttttatttccgcgattcgatgtcacggacccgggcggtacggcaattccgttcgggcgagtgcgccccgcagggagtagcgatgccgtgcgggaagggcggaacgatgcggctttgccgtttcgggacgccgttcgaaagcgacagctttcgggcacagcccggcacggcgtgtgcgccgtaaagggggctgcatcggtcggagaaatccgatcgaaaaaaggtccggagatgtttgccggaggcgagttcggaggttgggtatttccgcccggacagcgccgaaggtgagcaggattcggaaagactcggactgcggggtgagcccgtccggagcgtaaggctcggcggcagccgcttttgcgagtcggtcggtgcggtgtgaggtaaaagccgcatcggacaaaccccgcccggggattttcgggtaaaattcgtgcggatgatttattcagtctgtgcagaaaggagagctgactgtttggagaaaaaaaccggagctgaaaccgagctgatcggagcagcggcaagaagaggacaaagaaagaaaagagtcgatgccggcaggaagagaaacagtgctgccgcggtgactgcggtgaacgcaagaccggacgggatgccgcccgaggttgagtttatcaaagagccgggctatatgtacgatctgctttcgatgtttattctgtattttaataaggaatatttcctttcgaatatgataaactacgacaaagcgagtgcggatcaggaatactataaaagcattatcaaggaaatagagcctgtatcgaacgatctcagaatattctttctgatgaacgccaatgcgaaaacattcatgatggtcaactattttgatgtgtttaatgaagcgttctttacgacatataatctgaaagaggttcaggatgcacttcgggactgcgacggcgtgaagtcaaagatactcgaattctatcttccgaagctttcgaaaacgaagcgtgaggaatgtaaaaacgatcttgccgagctgagcaggcagatgaagatagcggatctgaagccggagatcaaaaacggactgtattcgttctttatcgagcccgaggcaactcttcagaaactgtcatatgagcttatctccaaggattttattctgaaaaagtggagagagagccacgctttacaggcggaacagatgtgcgagagctttaatctattcgagatatacaaaaagtttgatggggaaataggtcatgcaatttccaatatggacggatatgacaaattttatgtttcgttgactattgcggaaaaaaatgttgtaaaacattatctgtattcggacaaagcgctcattattttgggcgttgacagtctcagctatctcgactatctttccggtcttgaaacagctcccgatctcgaaaccttcggtaacgctctgtcagataaatacagagtaggaatactcaatctggcagcgaagaacaaagaaatctccataaaggatattgagtctgagctcggaaacggcggtgcaaacgtctattaccacctctcactcatgttaaaggctaatcttctccgtgcaaggaatcagggcagagcagtaatttatcgcttaaataccccatattttaactctgtacgcgatctgctactgcgctatgccgagccggaaaatgaagattcaacctcctgaggagtacctttcagatgcagacctggacaaaacccgaagtaattaccgtagaaagcatagactatatcaattatataagcgcagcagcagattcaagttcttccggaagcggcgatgacggtcatggcgaaatggcttgcattgcgcacgacttcaaatgagttccatggacagggagctttaccgcacgggatccgtccttgtgcctgaattttgaatatacccgccgtgtaatacccggcaggtatattacgcggcgtagctatagatatatttggtgccgagcgttaaatgcaccgaagtggttgtgaatatcttatgcctgccgttataattgcgtttcctttcataaaagtttattcgtgggaaaaatataccgccctccgtctttgggcggtatatttttttgtttctttgggcggtgcgctcgggcgcgcgggtgcgggaagtatccctcggcagtgcgccgagggcggacacgcgaaaaagtgtgtgcggcgcgggcttcggcgaatggttagcaatgggcaactgttcaaaaaagcgatttttttacaattagggatcaagaccgcgcggcgtgcgcagaaactgggtgttttggggattcacaaaacgaattacgttgtaaaagcaacggaattcgcgggaaattggcgtggtacgcttgacctcaagggttaagaaagcgcggaaacgcttgcggcgcgggctttggcgagcggttagcaatgggcaactgttcaaaaaagcgattttttcaattagggatcaagaccgcgcggcgggcacggaaacggggtgtttttgggattcacaaaacgaattacgttgttaaaacaacggaattcgcggagaaaccgcgcgccgggcgcgggaatgtgggtgctttcgggaatcacaaaatgaattacgttgttaaaacaacggaattcgcggagagaccgcgcggtggacgaggaaactgggtgttttcgggattcacaaaacgaattccgttgttaaaacaacggaattcgcagagaaaccgtgcggtggacgagggaaaggggtgttttggggatttacaaaacgaattccgttgtaaaaacaacggaattcgcggagaaaccgtgcggcgggcgcggaaactgggtgttttggggattcacaaaacgaattacgttgtaaaaacaacggaattgggggaggaaaccgcgcggcatgcgcagaaactgggtgttttggggattcacaaaacgaattccgttgtaaaaacaacggaattcgcggagaaaccgcgcgccgtgcgcggaaacggggtgttttggggattcacaaaacgaattccgttgtaaaaacaacggaattcgcggagaaaccgcgcggcgtgcgcagaaacggggtgttttggggattcacaaaacgaattccgttgtagaaacaacggaattggtgaggaaaccgcgcggcggacgcggaaatgaggtattttcgggatttacaaaacgaattacgttgtagaaacaacggaattcgcggagaaaccgcgcggtggacgaggaaactgggtgttttcgggattcacaaaacgaaaattacgttgttaaaacaacggaattcgcagagaaaccgcgcggcaggtgcggtcagcaaatggaaagctgtgcgggcggcggcacgctgtcaaaaaagtgtgcgaaaaacgcaaattggacgggcgcggcggcattatccccacggcggagaggttacgcggcaaaaattatgcgccggaaaaatgcgcggcggaaattcggcaagcggggaatcacattatcggaatccctgcggcatcatccgcaacatatggtagacggcaatgcggcgatggttgttcttcgccgttttttcattattataatattatcgtgacctttttgatctgtcgggattttttcgatcgcgccccgaaagccccgtaatacgggcgttccggcttgtcaagtccgcctgttttatatcgcttcggcggggcttgacaaatatttcgtgcggtggtataatatctgcgcaaaagaacaaatgttcgttttggcacgcggggtgtacccgaaccatcgtccggtatcaccgggcggttattttaaccgtaaaacagaacaaatgttcgattaacccggaggaggtcatgaatttctgacaagggaggagcgagaatttgccgagtgctttgcgcggacattttccgtaagggcggcggcacgcgcggcggggtttgatccgcggacggctttcgcccgtgcgagcagactgctcgaaaaggatgagatacgggcgttggtggcagaatgcgcggtatcatccggagcgggagcggagaagggtgcgccgcgggagacggataccgcagccgcggcggatgtatcggaagaaagcggaagatcgggtggaaacggaagatcgggtgcagcggatgagccggagaacggcggcgcggacatggcggtcggatcggacgaagcagccgcggcaaggcaaagcgaagcgggtgtaactaaagcggcggtcgaaaaagcggtcgaagaagtgttcggagaggcggtcgggcgcggtgcatcggacagagacggtacatcatcgggcagagactgcgcatcgggcggagactgtgcggaacacgggacggaaagcgatcggataatccgcgaatacgagaagatcgcgtttgcggacgcctcgctcggcgagatcaaggtatcggacaagctgcgcgcgctcgaccaataccgcgcgatgtgcgagaggaggaacgacggcggggagatatcgctcgtcgtgaattacgattatggcgaatgagataagcgtatccttcaatccgaccttccgtgaggcgaacgcgagccgcgcgcgataccgcatactgatgggatcggcggggagcggcaagagctacaacacggcgcaggattatattctgaagctttcggaccgacgcttctgcggggcgaatctgatggtcgtgaggaagacggaggcgagcgcgcggacaagtgcgtttgcggagctgtgcggtgcggtgaagcggatattcggcgcgcgcttcggcgagatctggcggatctcggaggacaggatgttcctcgagtgcgcggcgacgggcgggaggataatattccgaggggtctgctcggacgcgcagcgggagcggataaagtcggtatcgttttcgtcgggtaagctgacgtggatctggatcgaggaggcgacggagctttcggaggcggatttcgacatgcttgacgacaggctgcgcggtgcgctcggcgggataaacccgaatctgtattatcagatcacgatgacgttcaatcccgtatcggcgcggcattggataaagcggcggttctttgacgtgcccgacgatcccgatgtgtttatatcgaagtcggtctacacggaaaaccgttttatcgatccggattatgcgcggcgcatggagcgcaggcgcgagagcgatcccgacggataccgcgtgtatgcgctcggcgaatggggtgtggggagcgaggggctgatactgccgaattacgaggtcgggacgttttcgcgtgaggatttctccgaagtgtggtatgcgcaggacttcggcttcaaccatgcggactgcatcctcgagacggcgcagcgtgacggcgacttgtacgttctgcgggagatatatgtgcacggtcgggacacgtcggagataatttcgcttgccgagggggaaggattttcaaaaaatgcggtcatgtactgcgacagtgcggagcccgacaggataaagacgtggcggcgcgcggggtaccgc

SEQ ID NO: 4212 - DNA, 20121 bp, Unknown
  16S sequences of unknown bacteria
atcacctcttcccccgtttgtcaacacctttttctgttaagaattcggttttttgatagatttcttagaacatacattcgattttgtgcccatttaacgccatttgcgccgccaaaggcaacttttccaggtctgcaaccagcgaagaaggctttcccactggatcatcctgccgaaatggcacgaaaaaaacgttctgcaccggcatcagcgccccgatatttttggcgctttgcgaaagcccatcgttggtggagatggccaacaacacaggccggccatttctcagctgcgccttggccgccatggtgaccgccgtatccgtaatggcgtacgcgagtttgcccagcgtattgcccgtgcaaggcgcgatgatcaaaaggtccagcagctttttcggcccaatcggctccacctccacaatcgtatgccaaatgtcgcgcccgcaaatttcgcgcatctcttcgcgcgccttttccgcggtgtaaaaacgggtatcaaaagaatacgcgttctccgaaaaaatcggatacatttccgcgcccgtttgtttgagtgcccgccaggcgtcaaacgccgcgcggaacgtgcaaaacgagcctgtcatcgcgcagccgatgcgcgcgcccgcaagttccctcattgctcacagcccctttcccgatcgatcacggcctttaccgcccgttccagcgcttccgccgcgctatctgggcaatagcggcccggcacgccgctttcgcgccaggcttccaggcccatctcttgcgccgccgccaaatcgacgccgtacggcgcagaagcgagatccacaatccgcgcatccttacgcgcgtattgcaaaacatcttttgtaagaagcaaatccggcggcgtggaaaagacaaaatttgcctgcgcaagcgcttgcggcagcgattccacagcctgtgcgccgcgcgccatggcgcgcaagcgcccttcggcacggcgcgaatacaccacgggctttgcgccaaggcccaccaggcgatcgacaagcgcggcgccgatgcgcccatatcccaccaccaaacaaacgctccccagcaaggcgaacggcgcgcggctggcggccgctacgagcgcgccctccgccgtaaggcaggcgttttctcgcaaaaaagattcctcgcgcagcagcgcaaccgcgcttttcccgccaatcacccgttcttttgcggaaaaaatcatcgccaagtcctcgggctgcaaaggcgtttcccatgcatccagcgctttttcctcgccaaaaatgtaagcggtcccccgcgctttcccatactctcgaagcgcaaggcgcaatcgcgcaaaacgcgcgtcgccgcccaccacgcaaattctcatggcccagcccccttccaagcgcctccctggcatggtatgcccgcctggcacgcggtgacaatgggcagcaaaaagccccttgctcaattcggcaagaggctttgggcaacgcaatcacaccgcgtgtttcacacgatcgtgttcttcacagcgcttggcatcgttaaagcgatccaacgtacccactagatacccagtaatgcggcgaatcctatcgaacggcacatgcccaaaatcatagcgcaattccacaaaatccccatctaccgcgatatcaatggcccgcggttcgcggcgatacttttccctcgcccgatcgatataagcattaatctcttcctgcggcaaggtaccgcccgtcactcgtacttcacacatttgcgtcatccccctttggttttatcataccacgggctttcgcaaatgaaaccgcatttccgttaagtttcgcaataacataccatatatagtatcatcattttatcaacatacaatatattgaactcaatccactttcggcaggttcttcaggccgcgcgcgagatcctcctcagtgggaacataatcggtcatggtgccagcgttataggccatatacgccgccatatcaaaataacccgtacccgtgaggccaaagaggatggttttcttctcgcccgtctctttgcagcggagcgcctcgtcgatggccacgcgaatcgcgtgcgaagattccggcgcgggcagagtaccctctaccttggcgaacaatttcgcggcctcaaagaccttcgtctgctcgacggcgcgggcttcgtcgatatatccatcgtgatacagttgcgaaagaatggggctcatgccatgatagcgcaacccgcccgcgtggttggacgagggaatgaatccgctgccgagcgtgtacatcttggccagaggcgtaaccttgcccgtgtcgcagaaatcataggcgaatttgccgcgcgtgagcgaaggacaagaagccggctccaccgcgataaacttcggcgcggacttgcccttgagtttgtcttccatgtaagcgcacatcaagccgcccaggttggagccgccgcccgcgcagccgatgacgatatccggatattcatccagcatatccatggccgtcttggcctccaggccgattacgctctggtgcagcagcacctggttgagcacgctgccgagcacatagcggtatccctcgtgcgtggtagcgtcttccaccgcctcagaaatcgcggtgcccaggctgcccgtgctatccgggaattcggcaagcattttgcggccgacttccgtggtgtcggacggcgaggcgatgacgttcgcgccatacgtttccatcacagccttgcggtacggcttctgctgggcggaacatttcaccatatacacccgcaaatccaggccaaagaaaccgcaagccatggcgagcgccgtgccccactggcccgcgccagtttccgtggtgacgcctttgaggccctgctcctttgcgtagtacgcctgggcgatggcggaattcagcttgtgactgccgctggtgttgccgccctcgtatttgtaataaatcttggcgggcgtatcgagcgcctgctccaggaaatacgcgcgcaccaggggcgacggacggtacatgcggtaaaaatcgcgcaccggcccagggatttcaatataccggtcggtattgttcagttcctgctccgccaacttggtgcaaaacacatgcgaaaggtcgtccaccgtcacaggttgaagggtcgcgggattgagaatgggccggtgatcggtcttcatatccgcgcgcaggttgtaccaggccttcggcagctgcgattcttccagataagttttgtacggaacgctcatgatcatggtgttgtcctcctttttttgtgtgggggacagaaaaaactcctgtcccagattgtttgctgggacaggagcgaaactttctcctgcggtgccaccctgcttggcggaaacccgccctctcacgcgcactaccatgcgccggcccttgttgacggggagccacccccggctcgcctactaccatttcagctcgccctcatcggcccattcaccggcctccctatcgccacgcttccaccatccgcggctctctatcgacgggaaattccagttacttctccgaatcatcggtttcttttattatacgggaatgcctgcgtcgcgtcaagagtttatccaaaaattaacccatctgcgtttttagctgggaaaatttctggcgcgccgcgtccacttcaggaaccggcgcattcttcacaggataccaacccatctggttcatcttatcgaacaccatctgctggttggcggcgcaatcgttaaaattttcatccaacaccgcgcgcagctgcgggcaagaggcctcaggcaaaaacgcggaatacgtgtacatcaaatatttttcctgcgcgagcatatcctgcatgcggtcctcatcggttaggttgcagcactgcgcgttctgattctggttcatcgccgttcctccttatgcgtgcgcgttcaaatagttgaaaagccggtcataccgctggcaatgcgcgtcggcgatttgcgacgcgacgccgcgcaactgggcgtcctgcatttgctgcgcatagaagcgggctttcttgcacgcgagaaattcgtgctgaagctggtcttccaaaatggtgaggctcttcgcctggatcgaagttgtctgcgttgcctgcatgcgtttccctccctggcatggtttgaagcctttcggcctttttagcgtgccgcgaagcgcaaaaattatggttggaaatttttgcaacccaatcatcgactctttgttgcaatccatcatccaaaaatttaagcaagcagaaggactgacgccagggcaataccgcaatctgcattcataaaccgtttaggccatttgcgccatttcgttgtgcagcttgccgatgatccgcttttccaggcgggatatgtaactttggctaatgccgagcaaatccgccacttctttttgcgtatgttcctggccatcggccatgccatagcgcaactcaatgatttcgcgttcccgctcgtttaagcggcggatcgcgtcgtgcagcatttggcgttcggcgtcgttgtccaaatcccgggaaacgatatccggctcggtgccgagaatgtccgaaagcaacagttcgttgccatcccaatcggtgttgagcggctcatcgaaagaaacctccagcttcaggcgatttgtgcgccgcagcaccataaggatttcgttttcaatgcaccgcgaggcatacgtggcaagtttgatcttcttttcgggattaaaggaattcacggccttgatcaagccaatcgtgccgatggagatcaaatcctctatgccgatgcccgtgttttcaaatttgcgcgcaatgtaaacgaccagccgcaaattatgctcgatcagcgccgagcgcgccttggggtcgctttgcatcatcctttgcatcatttcttcctcctcatctctggtaagcggaggcggcagcaggtcgctcccgccgatgtaacataccgacccccgatgaaacctcacaatcaatccatacaccgtttgccgcacgctccgcgccgcccatgccgccatgccttcatcctcctttatcattgcgcctgcttccttgcgctttccgcgccaaccgtgcccagcaacgccggggccagcgcgcacacgccgccgggcatgcggccgggatacacgccaatccatatggctggcgcgcgcatccaacccgacgaataattcacgagcagctcgtccggccgaaaagcgctcaaatagccgttgccgcccatgccgccatacgccacccggcgaaacccttcgtgcgcctccccctcgcaaaagccatagggcaacagccgctcaatccgcctttgttccacaatcatcaccggcaagccgctaatgggttcgtgtagtcggttgcccgtatcgatcagcgccgtaaaccgcgcctgttggccgcgcttgaaggccaccacctgcacttcccacttttccatgcggttgatcttcgcccggaacagagaaagcaacagcagcgttcccagcgcgccgcccagcgccagcgccgcgccggcgcgcgcatgcaccacttccatggccaccagttgcgcgccgcccagcaacgctgagccgcccagcagcatagccatcgcgctcagcgcgtcccgcatgcccactggacgcagggcgatgaccgccataagaagcgttagcgcaatccgcagcgccggatgctttagcgcgctgaacgccgccaattgcatcaacaccgcgtacacggcgccggccgccgccgcgcaaatcaacgcgatccagcgcacttgtcctctgcagcgggctatcgcggccaacgtgaggaaattcatccccaggttgaccagcaaatagtattcaatgctcacctccacagcctgttccctcccgacgtttccagtatatggaaattcgaggccaaaatctgaattctattgtcgtattattgtacgatatatgatattttatgcgcgatatttcgcgcttattcgtgacaattcgcacaaatgcctatatccgtcatttctatatatcaatcgttcgattccgccagcggataaacgccgccgcgcgtcggcttgttgcgcactttttttcgctttgcgtaggtatcacaaaatgcatttccgcctttgcggcatgaagggcaggccagagcgcggcattcgcttttatgggaccgcccaaccttttcgacatatttgcccaaaccactcgtttggcgaatggccttccgcgcatgggcataaaaaaagcccccggtccattcaaggactgggagcgttgcgaatttccggcgtgccagcgatggcagcgcctattttatgcgataaaaattgcctatccccaatatttgcgatcgagcgagcggtattgcacagcttcggcgaggtggacatcctggatttcttcggaagcggcgagatccgcgatggtgcgcgcgaccttgatcacgcgcgtggcggcgcggttggacagacccatcgcgctgcaagcctgggcgagcagcgcgtccgccgcgcgcgtcatatggcaatgcagcgcgagcgaacgggcgtccaagcgtgcattggagcgaatggacgaattggcatagcgcgcggcttgaagctcccgcgcggccaccacccgcgcccggatggcggaagaaggttcctccagcgcagcgctggcgatgtcgtgcgcctccatggaaacgacttccacatgcaaatcgatgcgatcgagcagcggcccggaaacccggttgagatagcggcggatttccaccggcgagcagcggcattgcttggttttggagccataattgccacagggacacggattcatggagcacaccagcatgaaagcagaaggataagaagcggtcgcattcgcgcgggtgatggtcacaaagccgtcttccatgggttggcgcagggtttccagcaccgtgcgggcatactccggcagctcatccaaaaacaaaacgccattgtgggccttggaaatttcccccggcatagcgttggaaccgccgcccaccagcgaggcctgggaagccgtgtggtgtggcgaacggaagggccgttcggtgatcaaaccagcctcgggcaccgagccggaaacggaatggatgcgcgtgacctccagcgcctcttcaaagctcatatccggcaaaatagagggaatacaacgcgcgagcaacgtcttgcccgagcccggcggcccaatgagcaacacattgtgcccgcccgcggcggcgatttccagcgcacgtttggcggccttctggcccttgacgtgcatgaaatccgcgctaggcgtgcgctgggccatgagctgattgtagggaaccggaaccagcggctcaatgggacgcttgccggaaagatgcgccaccacctgttccaggttcccggcgggaaggatggcgattccatccacacagcgcacctccatggcgttcgcctgcggaagcacaatggcgctcaggcccagcgcgcgggcggccaacaccattggcagcacgccgcgcaccggctgaatggccccattgagcgaaagctcgcccacaaacgccacgcccgcaagcgccgcgccaggaatatcgcgcttacaggccaagagaccaaccgcgatgggcaaatcgaagctcgggccttcctttttccgatcggcgggcgcgagattgaccgtgatgcgctcctcgggcatcttataaccgctgttcaggatggccgcctttacgcgctcgcgggattcgcgcacagtcgcgtctggcaggcccacgatttcgaacgcgggcatgccaaagctcacgttcacctccgcgcgcaccggaaagctgtcgatcccggcgatgccaaagctcgtgacgatgtggagcacaggaatcccgtcctttcgtgcgttagaaattgtaccagttgaaccagcgcagcagcatcgcgtagctgcgcgccaccggcatgccggattccagcggatagaacatggcaaacaacaccgcggccgcggccaccaggaagatggacgcgcctttgaacgtccgcgcgtcgcgcgcccgaatccgctccagcacgaagacgatggccaggatcaaaaagggtacgctggcaaaatagtgatagatgaacgtgcagcgcgagatcagcacccacggcaaatattgcgaggcgaatcccaccgccacgatgaacatgccctggttcactttgcgttccgcagccagacgccacaggcaaatgatgagcgccgccaatcccgtccaccacacggcgggattgcccatgcaggaaatggaggacaccatattcgcgggcatgaaatccgcgccggaataataccacatgggccgcacgatcaggggccattcataccacggtgaggcaaaggaatgcgtggcttccagatcgttgtgataattgaacatggtgatctgcaaatccagcaccttttgcaccgtcagtccgccgctgggcagcatctgccaatagtacgaacaataataaatcaccagcggcaccgccacgaagaacaccacgcagcagcccagcgtaatggccagcttacgcgcaaatccacgcaccttttcgcggtcctcggcgcaaaaatattcgcgcgcgcgccaatacaccgtgaggaaaaagaggaatgccagtccgacggaggcatagattcccgtccacttgctggcccaggcaaagcccatgaacaagccgctcaggcccagtggcaccaacgtcttccacaagggctcgcggaagaagctcatctgcacataccggatcataaacaggtacatcaccatgatgaaaaacacgacataactatcgatggtagcgatgcgcgtttgcgtaaagtgcatggaatccagcgccagcagcgccatggcaatgcaggatagatctgtgcgcttggtgagctgcttggccagcaggtacatcaccggcagcatcaaaacgcccatcaccgcgcccataaagcgccagccgaacggcgtcatgccaaagagcttgatgccgatcatcatcagcaccttgcccagcggcggatgcgtccactcataggccgaagtgccattcaaatgctcataagccgtgcgcgcatggtagatttcatcaaagtatgtgccgttgtaataggatggatacggcggtacagtatcctgctcgtcggtcagcagagtaaagtccgtggcaaattcttccgccgcgccatcgcgggaaatgcccgaaatgggcaaaaccgcgccattttcatccaggaaagccacttcgtgcagggttaggcccacgcgctcggcgcgcaggcgcacatagcgggcgttctgcatgggatagccgctctgcaagggcgtgaattttccagaatcgctcatctccccgggctggtaccacagccagcggaagcatacgccttgggaaaactgcgcttcgtgcggttccgtccacgtcacgccatccgaggagagctccaccgtaaaggtggacgtgctcacgccgccataatacgtcatatggaacgtttgctccgttcccaaatcgatggtcacggtttcgccgggcgcggaagacgtccacgccgtctgcggcgctttcgtggagccgaggttggtgaaagcgagcacggaatagaccaccgtcacgcccgcgatgagcaggtaatccaaccgcttgaggttgagcttatagttcgccggggcgaggagccgctctttgtgcggatcggggagcgtttccactgcgaagggtttttcccgcccgcggacggtcacgtcaaacgccgtccaggcgaggcacaacgcgcccgccagattcaaaagcgccgcgatgcaggggtaaatccgctccgcgccggtgatgatgcgcgaaacctcatacagcccatcctgcaaaatcatgctcacgttgatgaacagacccgccgtaaggagcgtgaacgcgcagagaatgcgcttatcgcggcacgcggcataggccatcagcatcaaaagcagcgccgggaaggcataccgctcgtgcatcatggggccgaacacgaatagcagcgcgatcaagctcgcggcgatcaggaacaagtgcttggacgctttcgagcgcagcgccaggaaaaacgaaaacagataggccgccacaaacagcgcgaaggccacggcggtggccgcggggtgagccgccagcgaagcccagttcagcgagaacagttcatacaggttcatcgcgttgatggtcacatagcggtagcccgaaacggtgttggtatacaggttccaaagccacacaacggggttttgcccgccggagaacacgcaacccgtgagcaaaaagagcaccagcgcgcccgccaagcccacgagcgcatgcagacacgccttataatcccgcgcgcgcaccagcgcggcgacgacgaaaatcaggcccagcggcgcaaaaagcagcgcttgcggcttggtgagcaccgccagggcaaacacgggcagcgccaccggatagcggccgcgcaccagggaaaccgcggcaacggccagcatcagcgtaaacacgctatccacctggccccaggccgcgctatccaaaatggcaatgggattgaaggcatacaggcatgccagcaccagcgcgacgcgctcgcccgcgctttgcttggcgttggcatacagataggccgcgcccgccaaatcgaacaaaatgggcaccagcttgatcatcagccagtgggcgttgctatcgtaggcgatgccaaaggccgtgcgcagcgcttccatgggccagagcatcaaaagatacaccggcggataatcgcaaaaatagttgggatcggaataaaattccagcggcccggtatgcaacatgcggtacgcccaggcctcaaagcaattgatgtccaccgcgtagccgcgcaccgacagcgcgatcgcgcagcgcaaaatgagcgcgaacagcatcgccacggccagtatcccccgcgcgctgcgcgcgcgaagttcgccgtgcgcgcggcggaactgctgcgtgtaaaccgcgcccagcaaaaagacgaacagcacggcggcgagcaagatcagttcgttgtgcgtttcatagcccgacgccgcttcttcctcaaaaaaggaatcgctctgccccccatcgtcattgtccgcgggcgcaagggtcgcaaagctcacggcctgcgcatccgcaggcgcgccgtccaatttcaccatccgcacatcgtcaaaccacgcgcgcacgcggctttccgcgccataaaagcccacgcgcagcaaaaccaccacttccgtctggtccggccccgcctgacccgtcagcgtgaggttcacccattcgccatccgtttcgcgcgccgtgttggatttggaaaaggtattgtctatggaaatgttggcgccttcgcccgcaatatcgtacgcctcggccttcacccggcaggtaatttgataatacgcgccgggttccacgggcaccgcctggcaaaagcgcgcgtcgttgaaatccaggttgtaaatctgggccgcgccatcctcgcaggaaaaatgggtgatgcccgcatccgaaaaataggcataggtataccaccccaccggtagcccattttccacctgggaaaaatccccgttgacgatcaggttatcctcttccgccgccgcaaccgaaaaaaaggacaaaagcagcaaagcggccagcaaacaaaacaatcccttgcgcatactctatctccgtctcattgatcatgccatgcccgttgcgtcaaacgcggcggggatgtggttcacatgcccgggcgtgagttccacaacgtcgaatcgaaggcgcgcgtccatcaaatggtgcattgccgcgtaaatcttggcgcactgaatgatcttgcggcgcttggcgggcgtaaccgcctcggcgggccggcccaggcgcggcgtgctgcgccgcttcacttccacaaacacgatgcagccatccagttccacaatcagatcgatctcaccggtgcgcgtgcggaaattgcgttcgcgcaccttggctccgcgcgcgaccaaatacgcttccgcggcgttctccccggtgagtatgcggtagtgctcgctcatatatgcctccgaaccaaagcagtgctcccattataacacgcttcctcgcgccctgcaatggacgaaccgtaaataaaccaaagcaaaacgcccccattctacgctcccagggaaaacgctatggcccgacatagacttgcacctggtatttccactgcagtacgccggaaacgagcaccatcgccacgcaaaattccggctgcgcgccccactgcgtctttgccatgtgcaaaaggcgttccattgtgccgtcccgatcttgcgccgcgcaatccgcgcacaggtatttgcccgcgggcaaaatttctatcgcgtccaccggcacatagcgcttgcacagggcgaacatcctggcaacgccctgcttgaacaggatgcccgccgcgtcttccaattgaaattgctcccgcaagggcgcttccagcatggcataaaaatggcgcaaatagccccacaaattgtcgagcgcgggcgattccaaagagtccgatagcaaaatcgcgcgttccggaatcgtcctgaccgtcagttgcccggcgctttcctgcccgcgcaatttttcctcatagtctgccttggccaagcgaatcttttcttttgctcgctgtagcgccgcgatcttttcctccgcctttcgctccgcttcttccaggaaagcgaccaccgcgttcaaatcatcctcccgcaaaatttcctggatctttttgagcggcaaatccatttgctgcagcgcgcgcaccgtgtggaggcgcacgatgtcatcctgggtatagtagcggtaccccgtttcgctctctcttttggaaggatgcgccaggccaatgcggtcgtaatgccgcagcgtttctgccgtcgcatgagcctctttcgccgcttctccaattgtaaaatatttttccaaggccgtttcctcccttgacctttgtgtaacacaaaggcttatactccattttagcacagcgcaccccgctatgcaatccatccttttatgaaacggaggaaatcctatgaaaaaaattggttcttgcgccttgctttgcgcccttctcctctcgctcctgagcggctgcgcagcggaaacgttcaccgaagaacactacgccgcagatcccgcgcaaatctcgcaaattcagctcgacctgcgcgaccggcaagtggaagtaatcgcctccacggacgggcagattcacctacgctattctcaaagcgatagcgagttttaccgcatcgcagaaaaagacggggttttgaccatgaccagcgaaagcaaccggaagtggtaccagtatttcggttggaaaacgaacgaaacccatcgcatcgtggtgctggagcttccgccagaagcgcttggctcgctcgccatctccaccacaaatgaagacatccgcgtatccaccctatccgtatccgatagcataagcctatccgccaacggagggaatatcaccttcgatgggctacgcgcggaaggcgcaatttctctcactgtgaaaaacggcgatatccagggcacaattctgggaagctacgaggagtattccatcgaatgcgccatcaaaaagggtgagagcaacctcgcctctaacccgaacgacaccggaaaacccctaaccatatccgccaacaacggcgatgtagccatccagttccagccgtccacacagccataatatccatacccaaaatgcccgcccattccattccagaacgggcgggcgtttcaaagcgggcaacgttgccaatgaaaggagcggcgctttagcggtactgcacggtttcggcaagcggcttgcgctggctatgcgttgctaagggctttgccccttcggctgcatatcccaaatccagcagcatcaacacttcttcattttccggcagggcaaattcctttgccaccgcttctggatcgaaaaaattgagccagcagctttccacaccggcggcttttgcggccagcatcatgtgtgtggccacgatagcggcgtcttccacaccggaatcccgctttccgccaggataaacgaacacattgtttttgtcaaaggcgacgatcagcaccgtgggcgcgccatagcggcagggcgtcaccgcgtcgatcttggccaatccctgcgccgattgcaccacgtaaattttctgttcctgcaagttcttcgccgtaggcgccaggcgtccagcttctaaaatcgcattgagctgggccgcgtccacctgtcgcccgtcaaatttcttgcaggaatagcgattcttgaccacatcaaaaaattccatgcacttctcctccttatccctctttttcgtgccgctcttgcgttctcgagcgcctaagagcggccaatccttctctatccttccagtgcgttgaccatcttttcatatgcgccgccgcgccggagcaattcttcgtgcgtaccgcgctcgaccacgcggccttcttccagcaccaaaatctgatccgcgcgctgaatggtggtgagccggtgcgcgatgacgatcatggtgcgcgtaccagccaatccttctatggcgcgctggatttcccgctcggtgcggttgtccaccgccgaagtcgcctcgtcgagcaccaggatgggcgcgtcgcgcaaaatggcgcgcgcaatggccagccgctgcttctgcccgccggaaaggcgcgtgccgcgctcgccgaccacggtgtcgtatccctcgggcatggccataatgaattcatccgcgcaggcggccttggccgcggcgacgatttcttcgcgcgaggcgcggttcacgccataagcgatgttctccgcaatggtgccattgaagaggaacacatcctgcaacaccagcgacatctgcttgcgcagggaggaaagcgtcacatcgcgcacatcgtatccaccgatggtgattgcgcccttttccacgtcataaaaccgctccatcagcgaaacgatggtggtcttgcccacgcccgtggggccgaccagcgcgatcatttcgccgggccgggcctgaaagctcacatcgtcgagcaccggctcgcgcgggtcataagcgaagctcacatggcgaaattccacgctgccatccgtgcggccgatttcgatcgcgccgggcttttctacgatctcgctctgcgcgtcgaggatttcgaacacgcgcaccgcgcccgcgaacgaaacctgcacatcctccaccaggcgcgcgagcgtggtcagcggctgataaaacagcgaaagatacatcaaaaagcccaccacttcgctgatgcccagcgcgccgcccatggccatgtagccgcccaggcccacgaccacgaccgtgcccagcgaggtcaaaaattccacggaagggtggaacaagccattggccttgttcgcgcggatgttgacctgcgcgtatttgcggcggtaggcgtccaacttatcgtgctcccagccctccttgccgaaggcctggatttctttcataccggaaaggttgtcctgcaatgcgccgttgatctcgcccagcaccacttggttgatgcggaacagcggcgcgactttgcgcgaaaaccgcgtggacacaaacaagatcagcggcacgggcaaaagcgtgagcagcgcgagcagtggattgatcacaaacagcatcaccgtcacgcccagcaccaccagcaacgagctgaccaaatccggtagcgcgtgcgccaccagcatttcgatctggcgcgtgtcgttcaccatgcgactcatcaattcgccggtctgcttgtcgctgaaatagcgctgcgaaagcgtttgcagcttatcatagatttgaaaggtcaaatccgccacaaagctccacgcgcccaagtggctcaaatacatcgcgccaaagcggcacaccatgcgcagcgcgtacgcgcccaccaaaatcaaacacagcgtggccagttcgcccaccgtggccgcgttgctctctagcagcgccgtgagcctttgcacaatccccggcgtcaccagccccatcaccgccgcgccaatcagcgccagcgccgccacaatcaaaacgccccagtgttcccgcgccatcttgatcagccgccaagccattttcatcgctacccctccccataaacgcctatattatacgaacaaatccgcgttttggcaagaaaaaaagcggcgttttgcgggcattttctgcggattctcacgaaatcgcgcgcaccactttttgtaaaattctgtctcaagcttgcatagcaatccttgcgcgcgctataatattggcaaatatagaatgtaaatccaaattggccatgaggtgcgttatgaactatatccagcgcagcattgaaacccgcctgttgcaggcgatgaaggcctataaagcggtgctcgtgaccggcccccggcaggccggcaaatccacgctgctcaagcagctctttcccgcgcgcaaatatgtatcgctggacgatccattcctggaagaacaagccaaccaaaacggttccacgttcatgatgctcaaccagccgcccattaccattgacgaagcgcagcgcgcgcccatgctatttcgctacatcaaaatgcggtgcgatgaatcggaagaaaaaggcttgttttgcctatcgggttcccagcagttccggctcatgaaaaacgtatcggaaacgcttgccgggcgcgtcagcattctggagcttcccggcttgtctctacgggaattgcaaggcgatcctttcgctttgccctttctgcctacgatggaatatctgctggagcggcaaaaaacggtcaaagcgcccaaaaatctctggcaaatcatccatcgcggttcttatcccgctttgcaggatccggagctggagtgggccgctttttacgccgattatgtgcgcacttacattgagcgcgatgtgcgggaactttccgccgttcacgatctggacgctttccgccgctttatggtggccgcagccgcccgcaccgggtctgtgctcaattgctccaacattgcatccgaagtgggcaaagacctggccacgatcaaaaattggctatccatcctggaagcctcgggcatcgtttatctgctggagccttacgcttcaaccgcgctcaagcgcgccattcgcgcgccaaaactgtattttcgcgatactggcctggtctgttatctcacccgatggcttacggacgaaacgctggcttacggcgcgatgaatgggcccatctttgaaacgttcgtcatctccgaaatcctcaaatccttttccaacgccggcctggactatcgttacttcgcctcctattatcgcggcaaggacaaaatccagcggcagaaggatggagaaagcatggaaatcgacggcgaaatcgacctcatcctggaagaaaacggcgtactctatcccatagagatcaaaacggcctctcgcgcctctgcggatatgagcgtcgcttttcaggtgctgaacaaaattcccgagaagcaacgcggcatgggcgcagtcgtgtgcctgtgtccgcaaccaggacaattgcgagaaaatgtgctgcaaattcccgcctggtacatttaagccaggcagagcgcatgcaccaggcaacaaagggcacgagcaacgattgcgggcgtttttcacggcgtaacacaaaattgcttgtgcgaaacgggcgcatccgctataatggaaccgcaatgatggagaaagccccgcaaaccggtctttagagagcgcgcccacggctgaaaggcgcgcggccacgggcgcggcggctccggcctccagagcgcgcagaagaacgcgttcgcccgcgcggcggcgaaattctgccgggtcgctcccgatacagggcgcgaaagggcgcgtttgcgccgaagcaaggtggtaccgcgaagattgcatccttcgcccctgcaacggggcgagggatgtttttcaattccatggaaaaaggagcatccgtatgaaactgaaaaacctcgtcaccaagcgctacaaagaaaccccctcggattgccagatcgccagccaagcgctgatgatgcgcggcggctatatgaagagcgtgggcaacggcatcttcacgctttcgccggtcacccggcgcatcaccgccaaaatcgaggccatcatccgcgaggaaatgaaccgcatcggcggccaggaagtgctgttccccgtggtgatgccggcggcgctgtggcgcgaatcaggccgctatgaatctgtgggcagcgaactggtgcgcttcaaggatcgctccggcgcggatatggtgctgggcatgacgcacgaggaagcttccgtgcattacgcgcgcgacctggcggatagctacacccagtatccctttatgatctatcaaattcaaaccaagttccgcgatgagccccgctgccgcggcggtctgatccgcgtgcgcgaattcaccatgaaggacgcgtattccttccacacctcgcaggaagatctcgcccggtattacgacatctgctacgaggcgtacaaccgcatcttcgcccgcgcgggcttgccggaagtcgtggccgtggcttcggacagcggcatgatgggcggcaaagtttcgcacgaatacatgctgctcacgcccgtgggcgaggacaccatcgtgctctgccacgattgcgattaccgcgccaacatggaggccgcgccctgcatcacgcacagcgcgcccaccgagcccgccgagcgcaaaaaggtcgccacgcccggcgtcaagaccatcgaagacctgtgcgctttcctgggcattcccgcgaccgcgacctgcaaggccgtcgtctaccaggaaaacctcacggacaaatacatcgtcgccttcctgcgcggcgatttggacatcaacgaaaccaagctgcgcaattttgtgaaagcggaaatccaccccggcgaaatcacgcccgaaagcggcctgtgcgccgggttcatcggcccgctgggcctgcccaaagacgtgcgtgtggtgttcgacgcctccctgcagggcggcgggtattacgccaccggcgcgaacgagacggacgcgcacttcaccggcttcaacatcgagcgcgacctgggcgcggtggaatatgtggacgtggccaaggcatatgacggcggcatctgcccctcctgcggcaagccctccatctacaccgcgcgcggcatcgaggtgggcaacatcttccagttgggcaccaagtacaccgagagcatgaacatgacctatgtggacgcggacggttccctcaagcatcccatcatgggttgctacggcatcggcgtaggccgcctggccgcttccgcctgcgaagcgcatcacgatgaatacggccccatctggcccatttccatcgcgccctggcaggtgcacatctgctccctgcggccggacgacgcgcaagtggccgaagtttcgcagaacctctacgacgaattgaaccgccgcggcatcgaagtcatctgggacgaccggcccgtgagcgccggcgtgatgttctcggacgcggacctgctgggcgtgcccgtgcgcgcggtcgtcagccccaagaacctgaaaaacggcgcggtggaaatctccctgcgcgacaagtccctgcgcgaaagcaagcccattgccgaagccgcggacttcctttacaacctcgtgaaggcggaactggaaaagctggattgccacctgtaaacgcctagcatatcccctatcaaggcgcatcctacggggatatggctccaacccctcagtcggcttcgccgccagctccccttgtacccaaggggagccttttgggcgctgccgcgccacatggaggcacaccgtccaaaggtttccctttgttcatcggattttatattctctattttcccaataattttctgcgaatatatcacgctttgcacaactaatgtttgattaatgctattttctatgatatagcactttccaaaaggctcccctttcacaaaggggagctgtcggcgctagccgactgaggggtgcgcgaagcgcgcgcagtgcgcggagcagcgcgaagtaagcccagtaaggcaaagaaagccgcgagtgagcttgcgaacatcggaggcccgaagggctgaagtggcgagcacacg

SEQ ID NO: 4213 - DNA, 6584 bp, Unknown
  16S sequences of unknown bacteria
ggggggggggtaattattagcgagagcaaaggcagcggaatgcagctgacggcgagcaaactttcgagtgcagagtatgcggagaatggcgtgtcggcgatagcggaaagtgcctataccttgactgcgacggtaatgccggaattggcggaaaataaagcagtagattggtcggtgagttttgcggacagttctgcggaatgggcaaacggaaaggcggtgacggattatgtaacgatcacgccgagtgcggacggagcattgactgcgagccttgcgtgtataaaggatttcggagcgcagatagtagtgacagtaacgagccgggataatccgtcggcaaaggcggaatgtacggtggactatgcgaagaaaatcaaaagcgcgtatttagtggacggaagcggagcgccgatcggccagaacggagcggattgggtgacgggcctgtatgacaatttcacggaaacatatattccgcagtatatgagctatacggtaaactatacgtattcggaatatacggtagaagatacgtttgaaatgacggcgagcgcgcagctgaacggagaatttaagagcgggttgcaaagttatgtaaacagtcacgccacggaacagacgcaatacgcggtagcgatcctcggagctttgagcggcgagaaaaagaatccgataaatacaggaaatagttggtattatacggcgagcgcgacgggatttttgagtttattctatgcgaattattcgcaaccgagtgaaacggcgaaaaaacaggcgttgaatatgcttgcggagtatgtaaagtcgttgagtgcagggaaaacggcagcggtagaatatgaagtgacgttcactgggagtcattcgacgtataagcatagttttacgcaggtattgagcggagcgtcaatgacgtatggagtaacggagattgagctggaccaaacgggcgtgacgttctgaaaagaaacaaaggagcggaacaaggaaatgacagataagaaaacgcgggtattgtcgaatctgttgtcgctggtgctcggcgccggaattggcgccgggagctatgcgatcaaagagcagataaggcgcggcgggaatgaaagaatcgagcaggaagcccccacggaattagacgggggggggtaattattagcgagagcgaaagccagggaatgcagctgacggcgagcaaactttcgtcgagtgagtatgcggaaaatggggtaagtacgcaagcggaaagcgcctataccctgacggcaacggtaaagccggaggacgcggaaaataaagcggtggattggagtatcgcgtttgtgaacgcaagctcggcatgggcgagcgggaagagtgtaacggattatgtgacggtaacgccgagcgcggacggagcgttgacagcggtggtgacgaatttaggcgagttcggagagcaaatcaaagtgacggtaacgagccgagggaatccgtcggcaagtgcggaatgtacggtggattatatccaaaaggttatagaaccgtatctgacgatcggagagattgagtgtgtaaaaggcggagagacggaagtcgaatttgaaacagaagtggggggaaacggaccgggcggagtgatagatttcggggcaagattgtcggaagtatatacaatagaagcggaaattccgacaataagtctggacgtaacttatacatttttctttgaaggtacaggcgaaaatatagattttcacttaatagtaaatgccggagacgggtatagcctatattttgaccgtaggctatttatggacgatccggagaacggtcgggaagtgtatatctccggagagccggtaagcgaagagcaagtcaatgaatgggaaacagcagatataataagaatgctgctggaaatgccgtcggatccgctgatactgggttattcattctatacagagcaaagcgggacggtaaactttgaaacgcagatacaaataaacatagcagaagaaagccaagtgcaaaaagtaagtttggacaaaggagcattgaaattttaaggaacgagaagggagaccgagggaatgagtaaaagaagcagtaaagtaaaaacggctgtaatggtgatattggtgataatattactgatactatcgctcggccttttagggcggttaacgaacgtattcgggaataagattacagtgaggtataacggaacaaaaatcacgaaagattttgaaggactggaaatagaaagcggaacggaaatcgaagtgagggcgccgggagaatacgaagtaaaaatctatgcggcgggaacggaagccacggatttcacgttcacggtcggcggaacagaatatagctgggtggaagatatagcgggagcgaacggcgggcgcggcgaagaatttacggaagtattcgagatagagaaaacggagaaaggcttcaaaatttcaggcggaatcaaaaaagtattgaaagacatttggccggtggcggagatcgagctgccggaggagctccctgcgggagatagattccgaatggaaatacgaagcgggaaaacaacgctgacggtcggattttcggtgaaagagccgggaagcgtgggggtggagaaaatagagcttgccccgggtgagatcgtattttagagaaggtgacggagatgaaaacgctacatagacaacgaaagctaatactgacgattttgacagcctgcgcgatgttcgtgatcgggcttttctgcgcatataagcctataaaggcgaaggcagcggaaacaatcggattcagctttgagaaaatctctccgggcgcgtcggagtacgaggatccgacgctctccttttcggtgcgagtgggaagcacggcgttgaatggtttgaagcagggcagaacggcgagcagccgatcctatacggattatcttttagagattacgtattcgacgagcgcggcgggaagcggcgaggcggtaaattaccatatcgagcaatcggattatctgccggacacaccgggcgcgtcgttcccgtccaataacgatccgttatattcgccgtatagctatgactatactttcggcagcggctttttaagcagcgggcagggcgtgctgtcgatagcgattccttccgatttgcagacggaatattattaccgtgcgaaagtggtaaaggcgacgtacacggtggaatttgaccgggattacgcgggcagttcggggttttcgaacgaacagacggaagtaatagcggaatcctcggggtattacaaaaattcgatttggaatatcggcatgacgcagctggaaggaaacgagcctttgacggacgcggagcggtcggggattcaggagattttgggaatcaagccctcggcagccgagatttccgtgacgttgaaatataaggaattgacggactatgcgacgctgacggaaaagagttatacgtttcatctgaaaagcgcgtatgcgcaaaataaaacgcttgcggtatcgacgctatacagcctgacggattttagcaatatcgcggatttcaacgcggtctatacgggcgatttttggcgcgacgggtatcgatacacgacgcaggagcggatcatcttacaggcacgggatttcgagtacagctataacccgacgacggaaaagggaacgctggaagtaaaatacaacgattttcagtacaaggatctgtccttgcgggtgacgaacaacgatccggcgaacaatctgacgatagactattacacggcggaagcggtagcaggggctacgagcacgacgctgacgttcagatttgcagacatcgaggagcagctgcacaattcttgcaattggcttttcgatttcggaaaagacaatatccggatcacgggcaaaccggagggcgtgacgacgcagctgacggaggaggcgctgatcgtgaccttcccgaacgccaaagaaaacgagctggtgaatctttctttaatcggcgttgcggagattatcgaggacgtggaatacacgctgacatacgactacgcggagctgacattgaacggaacaaagatttcggaaacgtggaaaacgtcgtcgccgatcgtgaaaatgtatagtgagatcgtgacgtgcaactatacgaatttcatgctggattacggggacgcggtgagagcggcggtgaatccggagtttttggacggagcggagtattatattccggcgtcgatacgtaaggaatacagcgcgtatgattcggaaacgcatacctgcaaaatcacggtagagtattcgtataatacgcttttcggaatcacgaataactatgacgagagcattatattcaaagcgctggatcacagcagcctgaattacgggggagagtatttcgtggacagtatcccggacgggtaccgtgtgaaagagctttcgacctccaagcccgataagctgacgatagaaaacgcggaggattaccgaaacgcgacaatagaagtgcggacgagcacgacggcgaaagaggtgctgccggtagaggtcgtatttacagacagctggaaaatggtcgtcacatatttggaaaactatatcgattacggaatgaagcagggtgagaaggataaagacggaaagcctgtaaaagcgtgtttcgcggaaaagaaggtattttccggatcggtgaaagtcaaagacgtcgcggacatttaccacccgacaaacgcggaaatgtcaaaaatcctcggtcttgaaaatttggatattctgggcttggcgacggcggagagtatcagcgtcacctttgacggagtatcgacctatacggcgaagctttcgtattcgtatgcggcgttgaagcagatcgattataacgggaacgcgaaagaaataaaaatcccgttgacgagctatgcggattggtgcgaggaatacggcaaggattggtctattttgttcctgaatcggacggatcggcattatttcaaatattctaacgatgttacacgtgaaaacttgtacggctttttctcggtagcggtatttaaggagcaggtttcggatctgaatttctatttcaagaacaacacgggcgacggctgcatgacgatcttttcccaaagcgaagtgcgcggctccggggtgtataaatttttcagccgtctggcgacgaaaagcggattcatggggatattgcttggtacgccgttgatctcaacaatgtgcatgaatttatgcgagcttgtggacgacgataacgcgatgtattacagttatttcttctatctggacgggacgagcgaaaacccgtatctgtcgaacggcggggcggacaatgcggacgacacggacagcgcgataaagaacgcattgaacgacgcgaaggaatggctgaaagagacgtggcagaaggtgaacggctcgaatgccatgaaatggttgaagatcctgggaggcgtggcgttgggaattttagcgttgacggcgcttatagcgggcgtatataaaattttgaaacggtcggggatcatcaagccgaagaaaaagacaagcggaagcacggcgaaaaagaaaacgacgtcaagaaagaagaaaccgagcacgaaggcgaaaaaatgaacaagcagaagaacgcaaaaaagcccgccgcgaggaaacccgcagcgggtaagaaaaaaactataaatccgcagcggcaaaccgcggtgaagccgacgaaaaaatccggtaagcctgccgaacaaaaagtcaaaaccaccgagaaagaaaattttccgcattttcggaagcacaacacatcaaatcacccggcattgattacaggagaatattcggaaaaggaatatgactatcgaaaagttatgcatggagagaaagacggccgacacagaaatgaaaaggtctctccgaatcctaaccccaaagatccgagacctatgtatatagggaaacgtgtacggcatgacgaaaagaaaaatttcagtacatggaaatacccttggaaatatccttcgacaaaaaataagaagtaacgggaaaaccgttacttctgaatgagcgacacacgggttttgatattatctcaccattattttgttccttgcggaactcacgctactgataatagtatatcgtattttcaaaaggaagtcaagcaaaaatgttgaaaattctaaaactgatactgcgaatcgtgatatatgtagtcataatcttggcggtgctgtatctggtaagtacgttcaagcgggtattctgaaatggaaaaagaaacgagacggcaaatagactgccggacaatttatcatatcgtaagcgcggcggtattggtcggctcgttgctgttttctgttttttatttccgcgcggtattcttccggacaattcaggcgttcaaggacttcggactttcagtagcatactatttcacggagctttcaggctttgaaggacttatcaccccgacggtcggggaaatcccgaacaacgcgacggaagtattaccgtttcagccttcggagtttataacgggcctgaaagcgtacgggaaagccctgatttccaaagaaaacgcagaggcgttttttctgggactgtt

SEQ ID NO: 4214 - DNA, 4080 bp, Unknown
  16S sequences of unknown bacteria
agctcaacgctgccgccgcacccccgaccagctcgccggtgcaacgggcgcacagtggaaaacgcttccctttccagtgaaaagaccgatcgtccctgcaatggcaaccaaacagcatcggcaaaacgcggtacagccagggaatcatgcccgattaatacatcatggcactgcccaagcctacgagaatgacaagcgcataccagatcacgccgacaatcaccgaaatcaatgcgccgacacctgcgacttttgccgttctgggcttctgatctttccacaccaggaataggatcaagcctacaatcgggatacaaaaacccaagacgccccagccgatactgccgctgtcgttcaccggtggctgactctgataggaattctgctgcacccagtccacactagaagccgggggcggcgtctgctgtgcgctctccggattggactgctgcgcttcattctgagccgcgccacacttggggcaaaacgctgcgccctcttccagttccgcgccgcactgtttacaatatgccataaaaagttcctcctccgtttccaaatcatatcatgatagaactatataaatttattataccatacttcctgacattctgcaagatttgacaaaaaatctctctttttacatttggactggtggtttttaactccgtcgatttcagcaaacattgatatgaataaaaaaatatgataaagtaaccaaaagatgcattatgaagtgaataaatggaaaaatcatctgttttgtaaagatacagctcccgttcaaaaggattgaaaatcaaaaaggagaagttgaatggtacaaataaaaacgaagggaatcagttcattttccctacatattctggcaatgatactgatgctgtgcgaccatctttgggctacactgttccctgcccaagagtggatgacctgtattggaagagttgccttccctatttttgcttttatgatagtggaaggtttttttcatacagccaatgtccgcaagtatataagcagattgtttatttttgctatcgtctctgaaattccgtttaatctgatctatggaagctcgccaatctatccgttccaccaaaatgttctttggacttttttgattgcattattatccataaccctaatagaaaaagcaaaagtaaaaggaaaatggtggttaacatggccagccatcgtgataaccgcgctgattgattatcttcttggggcaattgcaatggttgactattttggtgcaggtgtgttgactgttctggtattttatatcttccgcgaaaagaaatggtggtgctttcttggacagtttatatgcttagctctattaaatatcaaggtaattggcagttatttctattctatatcccttgccggatatgaattccaaatcgtacagcagagctttgcgttgctttcgttaattcccatctggctttatcgtggcaaacaggggtatcattccaaatggttccaatatgcttgctatgctttttaccctgcccatttattgctgttatatttgatatggcaatatatgatataagctaatagctttgaattcacaaaacatcctcctttcatttaatggaaggaggatgttcacatatcctaaatcagtccaaagggtaaaagggaacaaaaacatcgcaaaaaagattcggcttgctcggaacaaagcgccgcagttgagccagttattactctcgcctgccccaaaacgccatgaccaccagcaatgcccctaacagcaggacagagctgatcatgcccagccatgctgcctggctgccgtccgacagaatttgaatgatcgaaagcaccgaagcaagaatggaaataataccaaacagcgtgatcacgctaaccaccatatcgttcctggcccgttcaatttcccgctggtgctcgatcaaaatgctcaattttccgctgacgtcctcaatggcctggggcacccgattgctctccacaaccacttgataaatgcgtttgatgttatgccagcgcgaaatattcgccggatccactgtgccgtacgcctgaaactccagcatgacctgcttcaggccgcgcagctgtttcatactctttttgtccgccgccgtaatcaactgcgcaaagcgcaggcaggtgtatttttcgtacagagccatcagaagcagcggaaggccgtcctgcgcctgagccgccatctcagcatcgatatccagcgtttcattggccataatataggaaatcgtttgtgaagaaacgcagcagccccagcgataggttcccaactcctgcgttttcaccgcgtaaacgtagtccacatcctcctccgaatcatcctcggccagtgcgttcggcgggctcatcaaatgcagattgaaagccgcccgccggatcgtatccagtgaccggaaccgctgcggcacaactgccacattatccacatacgcctccagcagcagcgtgctgccggaggcaaaaaagccttccaacccccagctgcgcagaacttcctccagctgcttttccagcacaaagccatgctcttggccaaatgcatccctataatgataatcggcacggctctcggcaaaccccaaattgcagatccagcgcagcacgcgcatatccccatacccgatgcccagacacaaaaacgccacccgcgtatggaagtagtaaaggtaagcatggtaaaaggaaaagggcagccgctccgcgcagccatttttgtcggaaacggaaaaagccgtgatgccaggcgctgtttccccgccaaacagcgcctggcacaacgcttccgcgtcgatttgatagcatccgccaatggacgccgtgtcatcggcataaaacaatctctttaccgtttcgctcaaatccatcgtcgtcacgtcccagggccttcccaacgcctgaatccggtcatgacgcagcgcgcccgcctcatagcgcagcggaatgataaaataagtgcccatgcgtgcctgtgccagaattggccgcatttcaaaaaattccgtcagagcagtttccagttccatctctcttctctccttttgcctccgcatcctgcatcccattccgcttactgcgcaggacgaaacagggcatccactgtagtgcccagtacctgggccaaatgaaacgccagcgccagggtgggatcgtatttgttgttttcaatcgcgttgatcgtctgtcgggaaacgccgcagcgccgggccagatcttcctgagaaattcccagctgtttgcgcaggacatgaatctgattttccacagcagcgcctcaccctccgtatttgtgcttgttccatgccagcgccagggtaaatatcaccgccatagccgtcagtacggaaaagggattgacctccattcgctgcgcgcggacgattgtgacaaccgtttccagcagcaaatatcccgcgatgccggtgaaagaaacaatgcagcttttccccacaatgagctgccgccgctcatcgccgatatccatacggatcatggaaacaaacatgccaataatcaacaccacgcatccggccagcaatcccaggaacagcatgccccacagcgcaaatccttcgcttcccataaaaatacccctttcatttcataggcgctatgtaaaattcttttgacattttcaaatataccataccctcctcaaaatgtcaaatactctttacatatcaaaaccaggaacggctttttcggaaaacctcagagcgaacgttccgcttccgctaccccaaggatatttgctccatgccgcagatgaatggccatagcgtgctccgctcccacttcatcccggcggcggaaaaattccatcagcagagcgtgatcgcgcgccgtgtcctccgccagctcttccccatgcttatccgcagcaacagcggtaatcaccgcccggctgatcaccggcaacaggcgcatcatgaactcgttgtgggtggcgcgaacgatagcggcgtgaaaatcccggtccgcattcgtgcggtcctctcccgcccgaatgcagttctccaccgccgcaccgcattgcaggatctctgccagctc

SEQ ID NO: 4215 - DNA, 32759 bp, Unknown
  16S sequences of unknown bacteria
caaggtataccgtggcatgggatccattgcagctatggagaacggcagcaaagatcgttacttccagtctaatgcaaagaaactggtaccggaaggcgtcgagggacgtgtggcatacaaaggaagtgtcgaggatacggtattccagctgatcggtggtctgaagtccggtatgggctactgtggtactccgacgattgaagagctgaaagagcgcggcagatttgtaaagatctcagcagcgtcattgaaagaatctcatccgcatgatatccatattacaaaagaagcgccgaattacagcgtagaaaaataaaacgattgctattttgacggcaggtgtcagaaaacgggcacctgccgtttttgtgcaaaaaactatgaaaaaaagagtgcatctatacgagaaatgttgtatactgttttcatctgtgggttaactgagatgggaaaataaaaagaattgagaatatctggtttgcttccagaacaatcagcgtggacaaaaaaacagcagccgttttgcgatgacagcagataaaggactgttttggcaaataaaacagatactggacaagacagaaaagacagcatacacggaggaactatgaaagataaaaaaagaaaaaaagaaagagagccgggaaagataagaaccggcagggtactggtctggactgcggcgatcgttcttactgcggcggcgattgcgattctgctttacctgatcccaaaggatgacaaagaagctgattcactgatcgatggtacggagccatttgtctttgagacagagccgtttacggaggctgagacggagggcggtgttgtgccgcgtccggatattgatgagcagctgcttacggtcaacgattattcgagaccgggggaaaaagtagattctgtcgattacgtggttgttcattatctggcaaatccgaagacaacagcgcagcagaaccacgactattttgaaagtttgaaagaccttcaggatgtttcgatgagtgcaaattttatcgtaggtcttgaaggagaaattattgagtgcgtaccgccaggagagatcgcgtatgcatccaattccatgaaccatctttctgtctcgatcgaaaactgtcatctggatacgacaggacgttttacggagaatacataccagtcactcgtgcacctgacagcctggctggttgaccggtacggtttggatcgggatcatattatccgtcactatgacgtgaccggaaaagaatgtccgctttactacgtagagcatgaggataaatgggaagaattcaaagacaatgttatgaattatattgaggaatgcagagaggcagcggaagaatgataagagaatattatgaagcggtatgtgcagaaaatgagacaagagcaaacctgatcgcgctgcgaagtgcagtgaaagatgaaaaagaaaagagggcatttgcctatctgcttggcggtgatttttctgtgctgtgccgcctgctggaacacgaagacccaaaagtgagaaaaaatgcagcattgctgcttggcgaaatggaatcggaagatttgcttccggttctttttgacagctacaaaaaggagaagacgctgtttgtacggccggattacctgaaggcgatcgcaggtatggattgcgaggctttcctggatgaaatggaagaacagctggagatgctgcgtgcaaaagagccgcttccggaagagaaaaaacatgtcagtgcggagatgcgtatgctgcagaacattctgctgaagtaccgcagcccgcggccgcatgtattccacggatatgatataatggagccgatgctgctgctcgtaaacagagaacagacaaaagcggtcgcggatgagatcaaagagggtacgcacacacttttaaagggcgggattcgggtgaaagacgcaaaaatcaggacgattcttccgattcggacctatttggagctgctgtttccgattcggaccaaaacgcttccggtaaatgcaccggaggagatcggaaagcagctggccgtttcggagcttaccgatttgatgatgcggcttcacgaaggaaaggcaccgtattattttcggatcgagccaaaaggacttgatgacgcaaaaaaagggaactggattcgaaaagtttctgatgcgctggagcaggaatcacaggcggcgtggatcaactcagtctccagttatgaaacagaaatccgccttttgatgaagaaggatgggacgatggctgcttttctgaaactgtatacgatcccggatcagcgatttgcctatcgcgtggaaagtatcggctcttccatgaatccggtcaatgcggcactgtgtgcacagctggccagaccgtggctgaaagagcatgcacagatacttgatccgttttgcggcgttggaacgcttctgattgagcggaaccgcgcactggctgcgaagacgatgtacggtcttgacattttcggggatgcgattgaaaaggcaaaaagaaataccgcactggcaaactgccgggtgaattatattcagcgtgacttttttacgtttgagcatgactatctgtttgatgagataattactgatctgccgcaggcaagcgccagcagaacaaaagaagagatccatcatctttacctcagcttttttgaaaaagcgcagcagcatttaaacgacggcggtattgtgatcttgtatgcggcttatccgcagtatgcggcggaagcagtccgcagatatgaaaatttccggatggaaaaaacctttcttttaaatgagaagacaaagatgacgctgtgcattgtgcgatatcagaaataagagtcagatttgcacagggaaaagccggagagggaagacgggcagcgaagcggattgcgaatatccgctttgtcttttgacaaccggaccagagactaaaaataataacatgaaagagaaaaagggagttttacagatttaaatgaaaacgagaatgaaacgctatattggtgaccggaagttttacgcgatgctgctcggcatcgcaattccgatcatggtacagaatggtattacaaattttgtcgcaatgatcgacaatattatgattggcagagtcggtacggaacagatgtccggtgtcgcggttgcaaatcagctgatgtttgtatttaatgtgagcatgtttggaatgctttccggcgccggaatttttggcgctcagttttttggaagtaagaacgtggatggattccgaaatacgtttcgctttaaggttatttcaaacctgcttctgactctggccggaattttgattctcagtatctggggcgagcagctgatttcattatatctgcatgacaataccgggactgggatggcagatgcgacgcttggctatggtatgagctatctgcggattatgatggttggaatggtaccatatgcatttgcacagatttatgcgagtacgctgcgcgagatgggggagacagtagcgccgatgcgggcaggaattatggcagtagttacaaatacgctgcttaattatatcctgatcttcggaaaattcggtgcgccgcgtcttggcgtagagggcgcagcgatcgcaacggtgatctcgcgttttgtggaatgtgcacttgtcatgacatggacacacaggcgggccggccagtttacctttatcaaaggtgcgtatcagacacttcgtgttccgccagagctgaccggaaaaattttgaaaaaaggttcgccgctgatggtgaatgagattttgtggtcggttggaatggcagcgctttcccagtgctactcaacttacgggttggaagtagtggctggaatgaatatttcttctacgatctcaaatgtctgtaatgtgatctggctggcaatgggaaatgcgatcgcgatcattatcgggcagctgcttggagcgggaaagatggaggaagcaaaggacacagaccgcaagctgatctttttctcggtggcaagctgttttgggattggagcggtgctgatcgggctggcatttgtatttccgcagatttataacacaagtgagaccgtccgcagcttggcaacgcagtttattattgtggcggcctgctatatgccttttcaggcctttctgcatgcggcttattttacgattcggtctggtggaaagacggttatcacgtttttctttgacagcgggtttatgtgggcggtgactattccgctggcatttgtcctcagccggtatacgccgcttccgattctggcgacctatatcctgtgccaggcggttgatattatcaagtgtgtgattggatatgtgcttgtaaagaaaggcatctggatccagaatctggtggcagaagagaagtaacatccttcttaagaaaaaatgcggaaaattttttcaaaaaaggtctggtaattttgaaaaaaatatgttacagttctattacaaaatattaaaaacttatcggacttgttaagaatgttggatggtggacaaatgaatttattccgaaagctggccggaaggccggaaacgaagaaaatacagagcgtaacggagaatgaggtacaggaagtactgcagtatatggaaggattgccgcttccgcacccaaacaaaacactaaagctggaactgcttgacggacggaatctgaccagacgatgcaggctggctgttaaggcacagtggtatcttctggtttttgatgaagaagggcagggagctttcaatgccggttatgtgctgaagcaggggcaggagttactgcgtgcaaggcggatcgccacgaagattttgcggcagataccggaggaggctgcagaccgccattgtcttggagttttggcgatcggtacgaagcatgtgtctgctgcagatatcagatgggaggaaacggagcattttcttatttgtcagaagagcgaagagcgctggattgaaaaagtttttgccacatcaggaaaaatgctgacagctgatatgcagaccggcgtgcgcatcatccggaaagagaatgcgctccacattgcagcaggcagctgttttggaagaaatcgggaactttccgagttccatgccggtgaggtgctcggcgcactcatggccgctgcagaagagctctggatcgacctcaatatgatcgatctctatggagcaggagagacggcaggaccagattatctggtcacggtctgcagaacgcaggatctggaaacaatactgatcggggatcgggaaaacaaaatggcgcaggagagaaaacgacacctgcagaacaaaccggtaaaagagcatcgctggaaatacgcataagaaaatttagtattcaaataaaaaccgccgcaggaattcctgcggcggcgtttttatttgaatactgagaaagactcagacctgaaagactcaggctttgttatcgcttccaagaacgttaacgatcttatgagcaaccatttccttaacagcctgacgggccggtttcaggtactggcgcggatcgaaatgctccggatgctcagcaaagtacttgcggatggtacctgtcatagcaagacggatatcggaatcgatgttgatcttgcagacagccagcttagcagcctgtcttaactgctcttccggaatacctacagcatccggcatatttccgccgtactggttaaccatctttacgaactcctgcggtacggaagaagatccgtgcagaacgatcgggaagcccggcagtctcttgatgcactcttcaagaacgtcgaaacgaagtggtggcggaaccaggatgccgtctgcatttcttgtacactgatcagcagtgaacttgtaagcgccgtggcttgttccgattgcgatagcaagggaatcgcagcctgttctgcttacgaactcctcaacttcttccggacgtgtatagctttcgtgaccagcctcaacaacaacctcatcctcgataccagccagagtaccaagctcagcctctactacaacgccatgagcatgtgcgtactcaacaacctgctttgtcagagcgatattctcttcaaagctcttggaagaagcgtcgatcatgacagatgtaaatccgccgtcgatgcagctcttgcaaagctcgaaagaatcgccgtgatccagatgcagagcgatcgggatatccgggttttcagctacagcagcctcaacaagctttaccagataagtatggttagcgtaagctcttgctcccttggatacctgaaggataaccggagaatgcagctcgcctgctgcctctgtgataccctgaacgatttccatgttgtttacgttgaaagcgccgattgcgtagccgccgtcgtatgctttcttaaacatttcagtcgtggttactaatgccataattaaattcctcctttagtattatgaccttcgatggggatttttggtattccgcatcgatacgaatgtattctatcacataatttgcagattgacgagaaaaaaatccaagattgataaaaaaatatttatatcggtgctgcttctgatttaaatgccttctgcaatacgggtgacagcaacataaatgtcctggatccggtaccaggtgcggcttccgacgaccccgtcctgagtcaggccgaaaacagactggaaaacttttacggcttcctgtgtctgcgggccaaagatcccgtcaggaacaagctttggaatcagcggataattgtcggaaatccggttcagctgctcctgaattttcataacatcactgccggaagaaccaagagaaagcggaaaaccgggataggaggccggtacaccggagacttcctctgaggaattgatgtacatggactctccgtaaaaggcgtggatgatctcgatcgcacgatagccctgctcgccgagcgccatgctctcccactgacgcagccactgcggacactgtacacgctgtccatcacagtactgggtcaggataggctgacggacgtttgggcgggagaggtagttgcggaaaacatcttcgacagcctcatcgatgctttcaaagatatttcggccatacatccatttctgatcaaaggcggtagaggaggtgatcgtaaaattatagcccttgttccgataccattccgtgtagacacggttcagtgtaaaggactgaatgacaagaatatttgcgatcagtgtctcatacggccaggtggcgtagatttcactgcttgcgacatttttgatgtaatctttgtagcgcacataataattggaagcgctggaatcgcgcggtgtgccgtcatgcacgacgataaattccgggattaccacttcatttaagacaatttcgccggtgacatcaataggcttcgtctctgcctcggcaattttgggcggatagcttccatataaagtgtgtgccgggatgacgactgtgtccggggcttcggacgattcgagtgggcggagcgtgatgcgttgcagtgcgcactggccggacagaagctgtgttccgtttatcacagcggtctcatagcctggagctgtgatccggatcgtatattctgcataaggctggatctcgtttgaagactcaagactgtactcgatcggtggtgtagagaggatgagggattctgttcggccgtcagaaccggtctgtgtcatttccagcacctgatccgggtctccggtaaaagagacagagacgcgggcatccggaacaggaaggtttcgatcggtcagcgcggtgatctgaagttcgccacggtcgggaagctcgtttgggagcgcgtgaatggatgaggaagaacgcagataatgcatgagacctccaaaggcacttactggtagtttattcggcaggagaaaaaatgtgaaaagggcggctgcggttcatctgacaataaaacatttacaggtttgctgtgtaagaaatcaatttggcaaaattttatgaaagaaccagttgaaatattgagaggaatgtggtagaatcgttacaatttgagcaaaaatactgctgagaaaggactacggtgatagtatgaaagcatttctgatactggaagacggtacagtatttaccggtcagagcatcggtgcccagcgggaggtgatcagtgagatcgtttttaatacctcgatgacaggatatcttgaggtactgactgacccgtcttatgccggacaggcagttgttatgacttatccgctgattggtaattatggtatttgttatgaggatatggaatccgacagaccatggccggatgcatttatcgtccgtgagttatcccgcattccaagtaacttccgttcggaagatacaattcagaacttcttattaaaatatgatattcccggtatctccggcattgacacaagagcactcacaaagattctccgtgaaaagggtaccatgaacggctgcattacaacggatgaacattatcagatcgatgaaattatcccgaaactgaaagcgtatacaaccggcaaggtggtagagaaagttacctgcaaagaaaaatacgtattaaacggcgatggaccgaaagttgcactgctggatcttggcgcaaagcgcaacattgcacgcagcttaaatgagcgtggctgtgaagtgaccgtttatccggcacttacttctgcgaaggagatccttgatgcggatccggatggaatcatgctttccaacggacctggagacccgaaggagtgtacctctataatagaagaaatcaaaaagctgtaccagtcagatgtgccgatttttgcgatctgtcttggacatcagctgatggcgctggcaaacggtgcggatacgtacaaaatgaagtacggtcatcgcggcggcaatcatccggtgcgtgatctggagacgggacgcgtttatatttcctcccagaaccatggctatgtggtagataccgatacgctggacccgtccgtggcagttccggcatttgaaaatgtcaacgatggaacgaatgaaggactggcttatacgggaaagaatattttcaccgtacagtatcacccggaagcatgcccgggaccgcgggattccgcgtatctgtttgaccgtttcatgaagatgatggagggaaataaataatgccgaagaatccagatattaagaaggtacttatgattggttccggtccgattatcatcggccaggcagcagagttcgattatgcgggcacacaggcctgccgttccctgaaagaggaggggatcgaggttgtattgctgaattccaacccggcaaccatcatgacggataaggatattgctgataaggtttatatcgagccgctgaccgttgaggtagtggagcagctgatcttaaaggagcagccggacagtgtgcttccgacgctgggaggacaggctggactgaaccttgcgatggaactggaagaacgcggctttttaaaagagcataacgtccgcctgatcggtacgacggctgagacgatcaagaaagcggaggatcgtcaggaatttaaagatactatggaaaagatcggggagccggtagcggcatccaaagtggtacacaccgttccggaaggcgtggagttcacgcagacgatcggttatcccgtagtgcttcgcccggcttatacgcttggcggaagcggcggcggaatcgcacacaattaccaggaactggtagagatcctggaaaacggcctgcgcctctcgcgtgtcggagaggtactggtagagcgctgcatcgccggatggaaagagatcgagtatgaagtaatgcgtgactcggcaggcaacgtaatcacagtctgcaacatggagaacatcgacccggttggtgtgcatacgggtgacagtatcgtagtagctccgtcccagacgctgggtgataaagagtaccagatgctgcgtacctccgcactgaatatcatcagtgagctgaagattaccggaggctgcaacgtacagtttgccttaaatccggacagctttgagtactgtgtgatcgaagtaaatccgcgtgtcagccgttcttcggcgctggcttccaaggcgaccggttatccgattgcaaaggtagcggcaaagatcgcgcttggctatacgctggatgagatcaaaaatgcaatcacaggaaagacgtacgcaagctttgaaccgatgctggactactgtgtggttaaaatgccgagacttccgtttgataagtttatcagcgcgagccgtaagctgacgactcagatgaaggcaaccggtgaggttatgagtattgcaaacaacttcgagggcggcctgatgaaggcaatccgttccctggagcagcacgtggactgtctgctttcctatgatttctcaaatctggatcaggatggcctgatgcgtcagctggaagtggtcgatgaccgccggatctgggtgatcgcagaagcgctgcgccgcggtatttcttatgagacgatccatgcaattacaaagattgatgtatggtttattgataaactggccattctcgtggagatggagcaggcgctgcagacgcagccgctgactgtcgaccttttaagagaggcaaaacggatcgaattcccggacaatgtcattgcacgtctgaccggaaagacagaagatgagatcaaaaagatgcgctacgacaacggtatcgtagctgcctataagatggttgatacatgtgcagcggaatttgcggctgagacaccgtattattactccgtattcggaagtgaaaatgaggcggtggagacaagcggaaagaagaaagtgcttgtgcttggttccggtccgatccgtatcggccagggtatcgagtttgacttctgttccgtacactgcacctgggcctttgcaaaagaaggctatgagacaattatcgtaaacaacaacccggagacggtcagcacggacttcgatatcgcagataagctgtattttgaacctctgacaccggaagatgtggaaaacatcgtaaatttggagcatccggacggagcagtcgtacagtttggcggtcagacggcgatcaagctgacggagtccctgatgaagatgggtgtgccgatcctcggtacttccgcagaaaatgtagaccgcgcagaggacagagagctgtttgatgaagtgctggagaaatgcagcattccacgtccgtcgggccataccgtgttcacggcagaggaggcaaaaaaagcagcgcatgagctgggatatccggtacttgtccgcccgtcctacgtacttggcggccagggtatgcagatcgcgatcaacgatgaagacgtagatgcatttatcggtatcatcaaccggattgcacaggagcatccgatccttgttgacaaatatctggttggaaaagagatcgaggtagatgcagtatgcgatggcaccgacgtgctgatcccgggtatcatggagcatatcgagcgcgccggcatccattccggagacagtatctccgtatatccggcacagagcatttctgcaaagatcaagcgtgtcattgaggattacacaagaaagctggcaaaagagcttcatgtcatcggactgatcaatattcagtttatcgtaagcaacgatgaggtatacgtaatcgaagtaaatccgcgttccagccgtaccgtgccgtatatcagcaaggtaaccggtatcccgattgttccgcttgcaacaaaggtcatccttggtcatacaatccgtgagcttggctatgagccgggtctgcagccggaggcagattactttgcgatcaagatgccggtattttcctttgagaagatccgcggtgcagatatcagccttggaccggagatgaaatccaccggagagtgccttggtatcgcgaagacgtttgatgaagcactttacaaggcattcttgggtgcaggcatcaatctgccgaagcacaaaaatatgatcattactgtaaaagattccgataagcttgatgtgatcgatatcgcaagaagatttgaggcgattggctaccgtattttctcgacaagaggaacggcacgtgcccttcaggaacatggcgtgcacgcacgtatgatcaataagattgagggagaatcgccgaacctgatggatctgattcttggtcatgagatcgatctcgtcattgatactccatcccagggtgtggagcatgcaaaagacggattcctgatccgacgcaatgcgatcgagacaggtgtcaacgtactgaccgcactcgatacggcacaggcgctgatcacgagtctggaaaataataacatcaataaattatctctgatcgatatcgcgacggtagcgtcacggtaagcagagaaaacgaaaggggctgcgccttgaggtgcggctccttttctcatggaagccggatgatttcgcaggaaggctgcagacagtctaccttgtgaacgatccgctgccgcatgagccttacggacatttcacagaaaatttgcagactcggacttgaaaaaaggagaaaagagaagtacactgtgcagtggagcgcagaagcagcgaaagcggcggataggatgtttatgtcagccactgaaaacggaggaaaatgaaatgcgtaaaaaatcacatatatcacttgcaggctacctgattggggaactggaatcagaacagctggaccggcacaaaaaggcgttttatttcggctcgatcctgccggacctgacaccgaaaatgtttgccgtaccgcatgagtttcagacttcttaccgcgaactgcaggaaaaagttctcggtctcattgcctatgtccagaccggtgagggaaaagaacgtgtggtgtggaggcggcttggtgttgtcatgcactatctggcagattattttacttttccgcataatacggtgtttgacggaaatctcaaggatcactgtctgtatgaacgcgacatgaagcatgcgatgcgtgcttatatccatacgggggatgcgagaaacatttttcaggcacagcggatgcgcaaggggcagatcacagatgttgcacagctctttgactatatcgagaaaacgcatcagacgtatcttggtgcggtacacaatgtggcagatgactgccgctggatcgtggagatgtgctcctgggcactgatcggactggtgaatattatctgtaaggcagatgagaggctgcgtccgcttgcatggcagtgcgcgtgagaaaaagaatctctgaaataaaaataaccgaaagagaaaacggcagaaataacagaaaagaaggacagattcgatgaaaaggaatctgttctttttatttctcacgaagtaaagaaagtattgctgcctgtttgcaggaatttgacagaaaaagcattgtattgtttattataatctgatatgatgaggacagaatgacatataataaaatgatggagggtcagatatatgggattaataaaagcattgatgggggctgccggaggcacaatggcggatcagtggaaagagtatttttactgtgaggcgatggacgcggatacgctggttatgaaggggcagaaacgtacgtcgcgccgttcttccaaccactcgggcagcgataatatcatcacggacggttccggaatcgcagtggcggacggccagtgcatgatcattgtggagaatggaaaagttgcggaagtctgtgcagagccgggcgagtatacatatgacaacagtgcggcaccgagtattttcggcggaagcctcggagaagggctgaaaaagacgtttgccgagatcggaaaacgtttttcctacggaggccaggcagcgggcgaccagagagtttactacattaacacgaaagaaattctcggaaacaagtatggaacagcgacaccggttccgttccgtgtggtagaccggaatatcggactggatgtcgatatttcaattcgctgtaatggcgagtattcgtactgcatcgtagatccgattctgttttatacgaatgtgtgcggcaatgtttcagatgtttatgagcgttcgaaccttgacagcatgctgaaaagtgagctgcttacggcgctgcagccggcatttgcaagaatttcggatatgggcgtgcgctacagtgcactgccgggtcatacactggaactggcggatgcattgaatgaggtactctcaagaaaatggaaagagacgagaggaatcgtcattgcttctgtcggagtgaattccgtatctgcatctaaagaagatgaggatatgatcaaacagctgcagaagagtgcggttatgcgtgatccgacgatggcggctgcacagctggtgggcgcacagagcgacgcgatgcgtgcggcagcttccaattcaaatggtgcgatgatgggatttatgggcatgaacatggcatcgcaggccggcggcatgaatgcacaggatctgtatgcgatgggcgcccaccagcaggcagcacgtcaggcgcagcaggcggcgcagccggaaaaagcagtatcctctgctgcaccggagggcaactggaaatgcagctgcggcgcagtgaacaccggaaagttctgtgtggaatgcggtgcgaaaaagccggaggagggctggatctgtccgtcctgcggggcatcaaacaaaggaaaattctgcatggagtgcggcgcaaagcggccggccggagcaccgatttaccagtgcgacaaatgcggctggaagccgaaggatccggcgcatccgccaaaattctgcccggagtgcggtgatccgttcgatgaaaacgaccaggtgaactgatagagccaaagaggagatatgacagagtctggtccggtctgcgaatatccgctttacaacgtctgcttccatgaaaactgcagaccggatgaaaggagaatggaatgagcgatattctggaatacaaatgcccgtgctgcggcggtgcgattgagttcaacagccgcctccagaaaatgaagtgtccgtactgcgacacggagtttgaactggatacattgaaacagtttgaggaagaagataaaaaagaggcaaaggatccacagtgggatgctgacaatgtagcgcagagcaacgagcagattggtgatgacggtacatttaagacatatgtctgcgattcctgcggcggcgagatcattacggatgacagtacagcagcaacgagctgtccgtactgcggcaacccggtagttgtgccgaagcagtttgaaggaatgctgaagccggatttgattattccgttcaagctggataagaagcaggcagagcagaagctgaaagagcatctgaaaggaaagattctgctgccaaggctgttccgaagcgaaaaccggattaaggaagtgaaggggatttacgttccgttctggctctacagcagtgatgcggatgcggaaattcagtgccgcgcgacaaaggtgcgtacctggaggaccagtgattatgagtatacagagacttcccattttctggtaagccgcggcgggcagatcgcatttgataatgtaccggcagatggttccagaaaaatgactgatgaactgatggagtccatcgagccgtatcagtatgaggcagctgtcccgtttgaaaaagcatatctggccggttatctggcagataaatatgatgtgagttcggaagagtgtgcggagcgtgccaataagcggatgcaggagagcaccgttcgctcgtttatggatacgatcagcggttatacaacgtgtctgccggaaaaaacggatattcgtctgcgcaagggaaagatttcttatgccctgctgccggtctgggtgctgagcacgaaatataaggatgagatttatacgtttgcgatgaatggccagacaggaaaattcgttggaaatcttccgatggacaatggaaccgtatggaaaatttttggcggggtatttgctgcggtgtttattctggtgtttggtctgacatggctgttctgaaaaaaggagaaaacgggaatgaaaaaaataagacatttgtttcttcttctttttctgcttctgatggtgggagtgccggtttacgcagaaaatccggataaggtggtcgacaatgcagaccttttgactgacaaagaagaagaaaaactggaagcgcagtttacggagattgcagaaaaataccagtgtgatgttgttgtcgttacaacggataccctggacggtaagtcgccgatggattatacggacgactactattatgagcatgattatggatatggcccggatattgacggtatcatgctgatggtcagcatggaggaccgtgactggtggattgcgacaagaggaagtgcgattcagacctttacagactacggactggagcgcctgaaagagatgttcctgagtgatttgagcgacggagaatattacaaggctttcaaaacgttcggcacgactgcggaagcttttatggaagaggccgagtacggcgagccgtatgatacgaaccatacctattcagaaccgctgcccttttgggtacatctggcaattgcggcggttgcagcactgatcgtgagcgggattgtcattactgtgctcagcatccagctgaaatccgttgcgcccaaagagtctgcacaggattacgtgcgcacaggaagctttcatctggcaagaagaagcgatattttcctgtaccgcacagtagataaacagaaaattgagcatgagagttcctctggcggaggcagtacgacacatacgacatcggatggcggaacggccggcggtaccggcggaaagttttgaccgaatcagcaagcggattgcgaatatccgctttgccccaaacagtgaaaggaaactatggagaaaaaaacaccaacgggtgaattatatgaactgctcgagacctccggcgatttttgtgcagtggataaattgctggaaacagaaccgatcacatttacgcgatatctgaaagaactgatgaaaacgtatcagataaccggaaccggactgatgcgaaacagtcttctgagcaaatcttatacttaccaggtgctggatgggagcagacagccggagcgcaatgtagtgcttcggcttgctttttcacttggatgttccctgaaagaggttcagcaccttctggcgctctcaaataatggaatactttatccgaaaatccgcagggatgcggcgattattttcggaatccgccaggggtattcgctggcagaagagaatgagtttctggagaagattggcgagcaggggcttttataaataagagaataaaatttgtgatcatttttatgttcctgcaagtaaccagggcagagtgtgaagatccgctttggcagaatttgcaaaaaaagacagtcaggagtctgcaggagaaacgggaaaaatgaatacagatgcaaatcagaaaacgaagaagagaagagatcaggaaaaaagaaaaccagaagagatactgaaaaacagtacacagcagcagccgcttttttcacttaaggatacaccgcttgcatattacagcgtggtgacagtcctgaaggagagggaagaccggctggttttgcggatgaaagcagaccgggagatgtttccggaatgtctggtgctgaaatgggaaaaggcgggaggacggcttgaaagagaatacgaacttttgtctgctttttgtgatccctgtcttccaaaagtgcttggttatctgaactcggagcagggggcgtttctctggcgggaatacgttgaagggcagacattggaagagcaaatttcacagggcaaggcaatgacagatatggaagcggcagaaacggtggaaatgatctgccgttttcttgctcggctgcacagccggagaccgcaggtgattcatcgggatattaaggcctcgaatatcgtacagcggtcagatggaagcctttgcgtgattgatctggatggctgcaggaagtatcacgagggagagaaaaaagataccatttgtctcggtactgcttcgaccgctgcaccggaacagtttggctatggacaaagcgacgggcgcagtgatatttatggcgcaggtatgctgctgatttttctgcttaccggaaaagaagaacgtggtgcgttatcggaaatttcagaaaaatatctgcggaaaattgcgaagaaagcgacagagtttgatcccgggcagcggtatcagtgcgtggatgagatggcggaagcgcttggcgcattttccggaaaaaataaaccggaaaaaggaaggcagtggcgaaaaagcaggaaggaaaatggaagatggctgttggtttggctggttgccggactggtgactggctgtgttggaagtgcagctataatgcctttctttcagaaagaaacggctgccggagagaaaatttacagttttgtatctgagatggatcaggaagaaagtaagccggaagcgacagcccgaaagaatgtggctttccatggctcgatctgggaacaggcgatccgggaggcacttgggaaaagtaaggaagacgtgatctatacagatgaactggcacggattacctctctttatgtgtgtggcgaaaccatctgcgcagatatgcttgaggcgtttcagatttactgggggatggggctgcaggagccggtcaatccgtctgcagagccggattttgcggagcaggaagattttaagctgctgtctctgtgcacgaatctgagatatctgacgtgcgcagcctgcgacctgcaggatctcacaccactggaaccactgcagcttgagacactggacttaagtgctaacccggtcagcgatatttcagcgctggagaacatgaaaacgctgaaaagtctgtatctgaattactgtccggttggagaggaaggtctggagaatgtctgtacacttccgcttgagtatctggagattaatgatattggtgcgaaagattataaagcggtcggaaagatgaagaccctgcgcgaaatccgcgcgagaaatgtttcaaaaacggatctggagcagatttgccttaaaaatccgggattgaaaagcctgtttatatctggagagaactttggcgatttggagtcacttaccgggctttttggactttcggatctggaagaactggattttggggcttcagaactgaacgatattacggggattgagaagctgactggtcttaaaaaggtttacctggactggaacttcattgaagatctgagcatgctcagcaaacttgatcagctggaggaactgagcattcgggatctgccggtaaaagattacacgccgcttttacagtgtcctaagcttcgaaagatcatctgctatgatgagaaacagaaacaggagattgagacgcagcttggagattgcgggattgaagtgagcctgtgatgagggacaagaaaagactgaaaaaacaggctgcaaaaatctgatgcggccaataaaggaacggtgacaaaaacggaattgctatataaaaagagcaggggacgtaagcataattccctgctcttttcaaaataagcctgttcatggccggacaatgaatttatttagttatccgccaccgtttcatccgcagagtaaacctgtctctttctcgccatctcgtcgctctcaagatactcatcgtatgtcgtgatcttatcgatcaggcggccgttcggaaggatctccatgatgcggtttgcagtggtctccacgatctgatggtcacgggaggagaagagcagaacacccgggaacttgatcagtccgttgttcagtgcagtgatagactccatgtccaggtggttggtcggctcatccagaagcaggatgtttgcgccggagatcatcatcttggagagcaggcagcgtacgcgctctcctccggagagaacattcagatgctttacaccgtcctcaccggcgaaaagcatacgtccaaggaatccgcggacgtaagtagcgtccttgatctcggaaaactgagtcagccagtcaacgattgtcaggtcagaatcaaactctttcgtgctgtccttcggaaagtatgcctgagaagttgtaacgccccatttgtaagtaccctcatccggctccatttcacccatcagaattttgaagaaggttgtctttgcgagctcgtttccgccgacaaatgcaaccttgtcgttgtgaccgagcgtgaaggtgatattgtcaaggatctttacaccatcgatcgtcttggagaggttctcgaccatgagcacctcattcccaatctcgcggttcgggcggaagtcgatgtacggatatttgcggctggacggtttaatctcgtcaagctggattttttcaagtgcacgctttctggaagttgcctgtttggatttggaagcgttcgcggagaagcgggagataaagtcctgcagctccttgattttctcttcctttttcttgtttgcttccttcatctggcggatcagcagctggctggactcgtaccagaaatcatagtttcctgcatagagctgaattttgccatagtcgatgtcggcgatctgtgtgcacaccttatttaagaagtaacggtcatgggagacaacaatgacagtgttttcgaagttgatcaggaattcctccagccagttgattgcatcgagatccaggtggttggtcggctcatcgagcagcaggatatccggattaccgaaaagcgctcttgcaagcagcaccttgaccttatcgttgccgtttaagtccttcattaaagtgtagtgaagttccggtgcgatgccaagaccgtttaagagcgtagcagcatcggattcagcttcccagccgttcatctcggcaaactcaccctcaagctcgctggcacggatgccgtcttcatctgtgaagtcctctttcgcgtagatggcttccttttccttcataatatcatacagtctctgattacccatgatgacggtatcaagtaccggaaactcatcatatttaaagtggtcctgctccaggacggagagtcgctggccaggcgtgatgacgatatcgccgtttgtcgtctcaagctttccggaaagaatcttcaggaaggtagattttccggcaccgtttgcaccaatgacaccgtagcagttgccttcggtaaatttgatgttgacatcttcaaacagggcttttttgcccacacggtaagttacattatttgcactgatcatgtgatacctcgttttttcatttttaatatttccagctatcttaatatttccagctatctattgtacagaaaaacaggaaaaaagcaagtgtttcaggaaagaattttcaaacctgccaaagagcatttttcaggcatgctccagtctgatttccagcgcttgcatttccgaaaatggtgcgttatgataaaaaatacgacgccctgtgcaaaaaagaagccccaaaatcaggcacagaaagattccgaaagtacacaggagaaagaggaggatcgaaatgcaagtaaaaactacacaaaaaaacacatcaggcagcgaatctcatgccgcagcaaagcaatccgggaaaaaacagcagaccgttgatatgacccatggtccgcttaccggcaagattctgctgtttaccctgccgatcatgctgtcaagcattctgcagcttctttttaatgcggcggacattattgtcgtgggacggtttgcaggaagtaattcgctggcggcagtcggttcaaatggcgcgctgattaacctgatcgtgaacctgctcattggcctgtcggttggctgtgcggtagcggttgctttttactatggggcaaacgagatggggcaggtaaaagaaacgatccacacctcgatcgcgatcagtctgattggcggtgtgatctgcctggctgcaggaattctgctgagtccggttatgctgcggatgatgggaacaccggagaatattatcggaaaagcagagctgtatctgcgcatttactttattgggcttccggcaatgtcgatctacaatttcggcagtgcgatcctgcgttcacttggtgatacgaaacacccgctttattatctgatcgcggcgggtattatcaacattatattaaatgtagtttttgttgcaggctttcagatggatgtggcgggtgttgcggctgcaactgtgatttcagaaacggtatcggcggcgctgaccctgcgctttctgatgcggatggaagaggagctgcgcctggaatggaaaaaggtgcgcatctcaaaaccgaagctgatcaggatcgcccgggttggtattccgtccggaatccagtcggcggtattttctctttccaacgtactgatccagtcctcgatcaacagttttggagagctggcggtagcgggaaattcggcggcagccaatatagaaggatttatttacgttgcaatgaattccttttatcagtctgcgcagacctttacgagccagaatgtcggtgcacggaaatacgacaggatcaacaaggtactgctgaattgtctggtgatggtggcaattaccgggcttgtgctgggaaacggcgcgtatttcttcggcgagcagctgcttggcatttacctgccgggaaatgaggccgcgattgcgtacggcattgcgcgaatgggtgtcattgcggtgacgtactgcctgtgcggcatgatggacgtgctttccggatccctgcgcggaatgggagaatccgttctgccgatggttgtgtcgatgatcggttcctgcctgctgcgtgtcatctggatctgtacggtgtttgcacatttttactctctgcgggtgctgtattattcctatccgatcagctggattctgacggaaagcgtgcatctcatctgttatttttatgtcaaacgcagactcatacagcgtcacggtatggcctgacttaccggaaaatgcagaaaaaaccgtggaaaaggcgctgactgtacagcgaaaaatacaaaaaaatgggaaaaaagggaataagacaaatagacaaaaaaatagagttgtgctacaataaatccgtatgagatgttatagagagtatgccaactcttaatatcagcctgtcaaacggcggactgatgcaatataatccaaggaggaatattcaaatggctagaaaaatgaagaccatggatggtaatcatgctgccgctcatgcatcgtatgcatttaccgatgtagcagctattttcccgattaccccgtcatctgttatggctgaagcaacagatgagtgggcaactcagggacgtctgaacatgtttggacagaccgtacaggttacagagatgcagtctgaggccggcgcagcaggaactgttcacggttctctggcagctggtgcactgacaactacatatacggcttcacagggtctgcttctgatgatcccgaacctctacaaagtagcaggtgagagacttccgggcgtattcaacgtttccgcacgtgcacttgcaagccatgcactttccatcttcggagatcattccgatgtatatgcctgtcgtcagaccggagcatgcatgctctgcgagtccagcgtgcaggaagtaatggacctgactccggttgctcatctttccgcaatcaagggacgtcttccgttcatcaacttcttcgacggtttccgtacttctcatgagatccagaagattgagacatgggattacgaagatctgaaagaaatgacagatttcgatgcaatccaggcatggagagatcagtgtctgaatccgaaccatccgtgtcagagaggttctgctcagaacccggatatcttcttccaggcaagagaagcaatcaacccgtactatgacgctatgccggctatcgtacaggagtacatggacaaggtaaacgctaagatcggtactgattacaagctcttcaactactacggagctgaggacgctgagaaggttatcatcgcaatgggttctgtctgtgatacaattgaagagaccatcgattacctgatggcagcaggcgagaaggttggtgttgtaaaggttcgtctttacagaccgtttagcgcagaggctctggtagctgcaattccggagaccgctaagcagatcaccgttcttgacagaacaaaagagccgggtgctcttggcgagccgctgtaccttgacgtagtagcagctctgaagggaacaaaattcaacgatactccgatcttcaccggacgttacggccttggttccaaggataccacaccggctcagatcgtagctgtatacaacaatactgagaagcagaaattcacaatcggtatcaacgatgatgtgacacatctttctctggagctgggcgcaccgctcgttacaactccggcaggcaccatcaactgcaagttctggggacttggcgctgacggtactgtaggtgcaaacaagaactccatcaagatcattggtgataatacagatatgtatgctcaggcatactttgattatgactccaagaagtccggcggtgttaccatgtctcaccttcgttttggtaagtctccgatcaagtctacctacctgatccacaaggcaaacttcgttgcatgccacaacccgtcctatgtacgcaagtacaacatggtacaggagctggtagacggcggtacattccttctgaactgcccgtgggatatggaaggccttgagaagcatcttccgggacaggttaagaaattcatcgctgaccacaacatcaagttctatgtgatcgacggtatcaagatcggtaaagagatcggacttggcggacgtatcaacaccgtacttcagtctgcattcttcaaactggcaaacatcattccggaggagcaggcaatcgagctgatgaaggctgctgcaaaggctacttacggacgtaagggtgatgcgatcgttcagatgaactacgatgcaatcgacgcaggtgctaagcaggtagtagagatcaccgttccggagagctggaagaacgctgaggatgaggatatcatcgcaaaggctgttaccggcaagagacaggacgtagtagatttcgtaaacaacatccagcatgcagtaaacgctcaggaaggaaacaatcttccggtatctgcattcaaggattacgtagatggtaccacaccgtcaggtgcagctgcatttgagaagcgtggtattgcagtagatatcccggtatggaatccggaaaactgtatccagtgtaacagatgttcctacgtatgcccgcatgcagttatccgtccggttgcaatgaccgaggaagaggcagctgcagctccggaaggcacacagacactgccgctgaccggtatggctggatataaattctctatcgttgtttctgcacttgactgtacaggatgcggttcctgcgtgaacgtatgcccgggcaagaagggtgcaaaggcaatcgctatggcaaacatggaagcaaacgcaggctgccaggctgcattcgattacgcagtagagctgccggctaaggcagacgttgttgccaagttcaaagagaatactgtaaagggatctcagttcaagcagccgctgcttgagttctcaggcgcatgcgcaggctgtggcgagactccgtacgcaaaactgatcacccagctgtttggtgacagaatgtacattgcaaacgcaacaggatgctcctctatctggggtaactcttcaccgtccacaccgtacaccgtaaacgcgaagggacagggcccggcatggtccaactctctgttcgaggacaacgcagagttcggttatggtatgctgcttgctcagaatgcaatcagagatggtctgaaggctaaggttgaggctctcgttgcaggcgacgctccggcagatgtaaaggaagctggtcaggaatggctggatacctacaccgtaggagctacaaatggtaccgctactgacaagctgatcgcagctctggaggcatgcggatgcgacaaggctcaggatatcctgaagaacaaagattaccttggcaagaagtcccagtggatctttggtggtgacggatgggcttacgacatcggatttggcggtgttgaccatgtacttgcaagcggcaaggacatcaatatcatggtattcgataccgaggtttactccaacacaggcggacaggcttccaagtctacgcagccgggtgcagttgcacagttcgctgcaggcggtaaggaagttaagaagaaagatatggcaagcatcgcaatgagctacggctatgtatacgttgctcagatcgctatgggtgctgattacaaccagaccgttaaggctcttgcagaggcagaggcttatccgggaccgtcactgatcattgcttacgctccgtgtatcaaccatggtatcaagaagggcatgagcaaagctcagacagaggaagagctggctgttaagtccggttactggcatctgttccggttcaacccggcagcagagtccaagttctccctggattccaaggctccgaccgaggatctgatggagttcctgaacggcgaggttcgttacaactccctgaagagagcaaacccggcaagagctgagaagctgtttgctaagaatgctgaatgcaacaaggagagatacgagtacctgaacaagctgatcacactgtatggtactgagaaataaataaaattctgaataagatcgagaatcattcagacagagtccaagcggagtaatacagaaacggggtgtcctacggggcgctccgtttttttgccaaatcaggcaggcttactcgcgatgacggttatgtcctttgatctttccggaatatccgcattttacattatcgaaaatctgtgctatagtagagcatgtttgaaggatcattccgacagaaggcattttggggacatgctttagaaaaaaatgaaaaaccagggagagaacgatgcgaagaagaggcaaaaacagacagagagcagcaactcaccggaagaacagtccgatcttcggtattctgacgggcattgccggctttttctttctccttacatgttccgtggtactggtgctgaatttcagaccgttgtattactatgatgtacagtcactgcatctctctgaggagactggtctgtccgaagagacgatctgccggaattatgatgttctgatcgattacaatctcttctggaaaggagaggatacactcgcgtttccggattttccaatgtcggagcaggggcgcattcattttgaagaggtgaaacgtatttttgtggcactgcagtatgggatgatcgtcatgctgattttattcacaggtgggatcatctggaatgtacgccggaggtcgtttgaatttttgcgggcaacggctgtcacatctcttgtgatcccggcggtgctcggagcgctcgtggcgatgaactgggaacgcttttttatcggatttcacaaactgatgttttcaaatgattactggctttttgatccggcaagggatcctgtgatcctgatcctgccggatgaatttttcttccattgtgcggcggcggtgattgtctgtcttgccgcgggcggtattttctgtgagatggtatatcgcgcggtgagaaggaaagaatatacttatacaaaaacgatggaggatggcaaatgaattttgaaaaactgccgcagtatcggctgataaaacaggagaacctgaacgacattcatgcaatggggtatctcctggagcatagaaagacacatgcacgtgtcctggtactggaaaatgatgatgaaaataaggtatttaacatcgcattccgtacgccgccgacagacagcaccggcgtggcgcatatcgtagaacacacggtactgtgcggaagcagagaatttccgtcgaaggatccgttcgtggagctggtaaagggatctttaaatacatttctgaatgcgatgacgtatccggataagaccatgtatccgctggcaagctgcaatgatacagattttcacaacctcatgcatgtataccttgacgccgtattttatccgaacatttacaggcatgaggaaatcttccggcaggagggttggaattatcagctggagtctgaggacggggagctgacttacaacggggtggtctacaatgagatgaagggggctttttcctcaccggaagaagtgatcgaccgtgagatcatgaatacacttttcccggatacaccatacggtgtggagtccggcggtgatccggactgtatcccggatctgacatatgaggcgtatctggatttccatcggagatattaccatccgtcaaacagttatctgtatctttacggaaacatggatatggagcgtgaactggcctggattgatgagaaatatctgagctgttttgaagaactcagggtagattctgagatcccacttcagaaaccgtttgagaagatgcaggagctttaccgtgaatatccggtatctgaggaggaatcactggaaaacaatacttatctgacctacaatgtggtagtcgggacaagccttgatgtggaactggcgaatgcgtttgcagtgctcgactatgcgcttctttcttcaccgggtgcggtgctcaaacaggcattgcttgatgcgggcatcggtacagacattatgagcaattatgagagcgggatccgtcagccgttttacagtattattgcaaaaaatgcaaatgcaaaagacaaagaccgctttgtcaaagtgatccgtacgatattggaggatgcggcagaaaaaggaattgacaaaggggcattgctggccggcatcaatgtgatggagtttaaggcgcgcgaggcagattacggttcgtatccgaagggattgatgtacgggctggatgtttttgacagctggctttatgatgacagccgtccgtttgattatctgcattttgacgtgtacgaaaagctgagagaagatctggacaaaggctattttgagtcactgatccgaacatatctgctggaaaatacgcatggttccattcttgtggcagagccgcggcgtggccttacggcagaacatgaggaagaagtgtgccggaagctgtcagcttttaaggagagtctgagtgcggatgagcgccggaaactggtcgaaaagacgaaaaagctgcgggaattccaggaagcaccatccacacaggaagagctggagaagattccgatgcttacaagagcggatatcggaatgaaggcggcaggcttccagaatacggagtatacctgcaacgacgtgaagattgtacaccacgatgtattttccaatggaatcgcatatctggatcttttgtttgagacaagccgtatcagtgcggaagaaataccgtaccttggaatcctgaagtttgtgctcggtatggtaaataccgcggaacattcttatcaggagctgaataacgagatcaaccagaattccggcggaatttccggtggaatcagcctttatccgctctcagacggcagtgtgcgcagcttttttggaattcgcgccagcattctgtacgataaggtagattatgcataccagatcgcgcaggagatcctgctgacttctgatttttcggatgacaagcggctgcaggagattttgtcaaaactgaaatcacggctttccatgcgccttccggcggcgggacacagcacggccgcaggacgttccctgtcctatttttcacagttttcagcatttaatgatgcgatcagtggaatcagcttttaccgtgtcgtcgcagatctggaagaacacttccaggagcggaaagaagaattaaagacaacacttcgcagactgtgcagggagctgttctgcaaagaaaacctgattgtcagtgtgacctgtgacagtgagggactgaaaaagacagaagagccgcttggtgcgtttgtaactgcgctgccggaggcatccgcagagaaaaaggatcacacactggagcttacgaagaaaaatgaaggctttacgacggccggacaggtgcagtacgtggcgcgttccggtaattttgtaaaggaaggtttttcttacaccggtcttttgcagatcgtgaaggtgatgatgagctacgattatttatggcagaatatccgtgtgctcggcggtgcgtacggctgcatggcagcatttggaagaacgggagatacgacgttcgtttcctaccgtgatccgaacttgcggaagacaaatgaggtatacaacggaattccgaaatatctggagcagtttgaagcggatgaacgcgaaatgacgaagtacattatcggaacgatcagtgacctcgatacgccgctgacaccgtcgatgaagggacgccgttcccttggcgcatatttttccggtatcacagacgaggatgtccagagagaacgcgatgagatccttcgggcacagccggagcagatccgtgcgctggctccgctgatgcgtgcggtgcttgggcaggaaaatctctgtgtcatcggaaatgaacagaagatcaaagaggacgcggatctgttttacagtacgagagcgctggtgtgaccaggtgggctctcccctgtttcagctgcgagaagcaataaacagatatcgaataagctgggaaacagatcagacagaaatagataacaggagaaaaaatggaagatgcaaaatttaaatccggctttgcgacgctgatcgggcgtccgaacgtcggaaagtcgacactgatgaatcatctgatcggacagaagatcgcgatcacttcaaataaaccgcagacgacaagaaaccggatccagacggtctacacctcaaaaaaaggtcagatcgtgtttctggatacgcccggtattcacaaggcaaagaacaaactcggcgagtatatggtaaatgtggcggagcagactttaaaagaggttgacgtggtgctctggcttgtggaaccgacggatttcatcggaaaaggagagctgcacatagcagagcagctgaaaaaggcaaatgttccggtcattctgatcatgaacaagattgatatggttgcaaaagacaagctgcccggctttatggaaaattaccgcaaaatttatgattttgaggagatcatcccggtctgtgcgctgcgcggcgtaaatatggaaaaggtcatcagtgcaattttccgtttcctgccgtacgggccgaagttttatgatgatgaaacgatcacggatcagccgcagcgccagatcgtggcggagatgatccgtgagaaagcacttcgctgtctggacgaggagatcccgcacggaattgcggttgcgatcgaccggatgaaagagcggccggacggaagcgtgattgatatcgatgcgacgatcatttgtgagaaagattcccacaagggcattatcatcggaaaaggcggttcaatgctgcgcaggatcggttcacaggcccgtatggagatcgaaaaaatgatggagatgaaggtcaatcttcagctctgggtcaaggtgaagaaagactggcgggacagcgatttcatgatcaaaaatttcggctatgacaagaaggaaatctagcctgggcagctgcgaagcagacctgggtatttgatttgatcaggtcacagaagagacagaaaaggaaagaaaaatgagcgagccgcaaaaagtaagaggaatggtgctgcaggcatcatcctgcggagagtatgacaaacggatggtgatccttacaaaagagaggggaaaaatcaccgcatttgcacgtggggcacgccgccagaaaagtccgttgcttgcggcggcgaatccgtttgtatttggcgtttttacggtgtatgagggaagggatgcatatacattagcgcaggcggaggtctccaactactttatggagctgaaggaagatgtagtgggaacgtgttacggatgttattttatggaggttgcttcctattatacgagggaaaacctcgacggggcgcagctgctcaatcttctgtacgcgtcgcttcttgcactctcaaacgaaaagcttgacaatgagctggtgcgctgcgtgtttgagatgaaggcgatggccttaaatggagaatacccctacagcgtgacagaggatgcatcgctgcaggaggcgacacgttacaccgtggcttacgtgctggaggcaccgatccagaagctttatacgtttactctgaagccggaaattttccgggaactgcgcagggtgcaggaccggctgaaccggaccggaatcgaccgcgatttcaagtctttgcagattttaaaatctatggttgaaaccggcggcttttaacggtataatacgatagattgctgagataaaaggaggatggcaaagatgacagggagaaagattgcggtgacggctgttttgtgtgccggcgtcataatgatgggcggctgcagcatgctggatcaggaaaaagaatggaagccgcagaagtcatcggcgatatccgtcggaaaggacgggacgatcacagaatatgtaagcgacacgctggacgaatcctactacagcgatacggagcttcagagcatgatcgaatccgagatcagtgattataacagcaagaacggagaaaactcagtgagcatgaaggatttccaggtaaacggaaaggacgttcagctcacaatggagtacaaaaaggcagaagattatgcacagttcaatcacacagagttttattacggctcgatgatcaacgcgcagcttgcaggttatctgtttgacgtttcctataaagaagtgaaaaacggtgcggcaggaagtgcagagatatccggcacggatgt

SEQ ID NO: 4216 - DNA, 5365 bp, Unknown
  16S sequences of unknown bacteria
gacatagtcgaggacacggaggaactgaaagccggcgggaaagggactatcctgacgccagaacatcccgcgagacaactcattgaaaacattacgaaaatcgctccggtatacatggttttcggaaatcacgaggcgaatataagacggcgcgaagagctgaaaaaagaactccggtcgctcggcgtccggcttgtcggcggtaaggaagaaaaaatatcgctcggtgaaaccgaccttctgatctgcggaatggacgacccgagatgccttgattatctcgacgagaattccccggaggtacgcttcgcggaactcagagagcacaaaaaaagccgtgattccttcatttcttcacttatgcgccgtatccgcgacgatcggaaacgctctggcgggcggatagatatgtggaggaagattcagcgcgagaccttctctgacatcggcgaaaagaaggaattgacgcttcttctgtcgcatagaccggaggaacaggatttctacaattcgctcggcttcgacattgctttttccggtcacgcgcatggtggacagttcaggattccgccgttcttcaacggtctctacgcgccgcatcaggggatattcccaaagcttgcgggcggattttatgttgttcagaaatgtcgccaaagcacaaagcctgaaaggcggaaagtgttccggaaaaactgcggcataagcattgtgccggcgttctttcattcggtttcgcgagggctcgcggttgagcggttcccgagattctacaatccgccggaggtgtcgctgataacgattaccgattgtcaaaaccgctaaattgtgtgcatttttgcttttttcgcggacaggggttgccaaaacgccggaaatgtggtagaatttatgtagggcattttcgaatgcagcgcatctgaggatgcgtcgaacgcttttataaggatggatttttatgaaatactgctgctgcatggggcttgaaccgcgtaagctcgagattttgaaaaagcacgggtacgaggctttcgaggttggtttttcggggctgacgaacgctgaggacgagaggatcgcagagatgtgcgggaaggcacgggagctcggaatgagctgcgtttctcataacgggatgttcccggaaaatatctcgctgctgcgcgggaaagaggggtacggcgagatttcggagtacctcgagaggacgattgagaaggagaagccgcttgggtcgccggttgtggtgctcgggagcggcgtcgcgcggaatattccggacgggatgagccgtgagacggcttttgagcggtttgtcgctatgctttctgacgttgtggtgccttgggcgagacggaattctataactgtcgctatcgaggagcttcgcaaagaggagacgaatttcatcaataattgccgcgaggctatggaggttatccgggcggtggacgcgccggaggtgcggttgatggtggattattatcacgcgatgctcggaggggacaggctcgaggagattgcttcgtacggggatatgatacgtcacgtgcatatcgcgagtgtgcggaataagcggcattttccgatgattgacgacgtgggggattgccgtgggttctttgctgcgttgaaggctgccggttatacggggtgtgtgtcgcttgagggtagtgacggcggtaattttgagtcgtcgattgctgaggctataaccgtgatgaaggaagccgagaaggcgctttgaattaaaaaatcagctgttcttttggtagaacagctgattttttattgtttgaagtcttttgccaggcttttcttcagaaaagccgcgtaccccttacttagccgctatagcttccttagcttttgcaactatattatttgcggttaatccgtacatttcgaggagcggcgggacctttccggagcggccgaactggtcttccacgcctactctcttgacggggaccgggtggttgccggagacgcattcgcagacggcgcttccgagaccgccgatgtagttgtgttcttcggcggtgactatgcagccggtgtcggcggcgcatttgaggattaaatcttcgtcgaggggcttgattgtgtggatgttaactactctcgcggagatgttttctgcggcgaggaggtcgcgggcggcgagggcttgttcgaccatcagaccggtagcgacgagggttacgtctttgccgtcggcgaggactgagcctttgccccactcgaatttgtaggtgtcctggtcgaagagaaccggaacggcgaagcgtccgaagcgcatatagcagggaccgacgtagtttatcgcggcttcaaccatcgcgcgggcttcgacggcgtcggcgggctgcattacggtcatgccggggatagagcgcattgtggcgaagtcttcgaggcactggtgggtggcgccgtcctcaccgactgagattccggcgtgggtggcgccgattttgacgttcaggtgcggatatccgatggcgttcctgacctgttcaaacgcgcgtcctgcggcgaacatcgcgaaggagctgcaaaatgggatgagacctgcggcggcgagaccggcggcgactgttaccatgttgccctcggctattccgcagtcgaagaagcggtcggggaattttttcttgaatttaatggttttggtggcttcggcgaggtcggcgtcgaggactaccagtttgtcgtatttgtcgccgaattcggcaagggcggagccgtaggcttcacgtgtagctattttttctgccatgatcaaaattccttcctttgcttacttcgagagttcggcgattttttcgtcgagttccttgacggcgatttcgtactgttcctgcttcggagcggcgccgtgccagttgaccgcgttttccatgtaggagacgcctttgcccttgacagactttgcgatgatggcggtgggctgacccttcgtcgccttcgcctccttgacagcggcgtcgatagcttcaatgtcgtgcgcgtcgatcattatgacgtgccagccgaacgctttgaatttttcgtcgagcggggtggggttcatgacgtccttgacggcgccgtcgatctggagaccgttccagtcgatgatggcgcagaggttgtcgagcttgtagtgcgcggcgaacatcgcggcttcccagacctgaccttcttcgctttcgccgtcgccgacgatggtccagacgcgccagtcctgcttcaactgtttcgcggcgagcgccattccgcaggcggcggagatgccgaggccgagcgagccggttgacatatcgacgccggggatgtgcttcatgtcggggtgaccctggaggacgctgtcgatctgtctgagggttttcagctcttcgacggggaagtaccctctctcggcgagagcggcgtagagaccgggcgcggcgtgacccttcgagaggacgaagcggtcgcggtcgggcttctgcgggttcttcgggtcgatgttcatttcctcgaaatagaggtacgcgagtatctcggcgatggacagcgatccgcccggatgtccgctggcggcgctgtagacagcgtcgatcgcgtctcttcttattttataggcgatcttttgcagctcttttattctgctttcagtcataggatgattccccctgttttttcgttagccgatattctgaccgcgggtttgcggtcactttcctttatattatacaccagatttttgtgtttgtcaatagtcaaaaagacgagatgaaaaaaggaaaggcacgggagaccatgcccgtgccttttgaatatacgattcagttcaggttctcatattctgttatagcgttcgcgaccttatccttgattgaggcataagcggaggcgacctgattgcctgacgagctgaacattgtctgaaaagtgcttttcagttcgccgatatcatagagcaccgcgatatcgtatacacggctgtcgaggatgagatttatcatttccgtgtcattctcgctctgcgaatacttgtactttatcgcgttctccacataggcgtcccgaaggacgtaataggattcggctgacagaacgtccgcgatggatgacgagcgctcaacgtcgcttatggtcttcgggaggcacatgaaggagttgccccagcagttgacgttgcagcggtaatcctcctgctcctcgttctgcttcggtatcgggagaatggcaaaatcgaacgacagatcacgcatccagttgatcgagccgagtgcgtaaacgaagaataacagccgactgtcagagaacgccttcttgttcgcgtagttcttcttctcgaagaggatcgtgttcggcgagaagcgcgtcagaacgtccgtcatgcgtgagatattggcttcctcgccgaagacaagcttcagaccgtccttttcggatctgatgaaatcgccgcccattcccttgaagaagatgtacgaaatgcctttgttgcctccgagtccatattggtcggtctcctcatttatctttccgtcgccgtcgaggtcgctgtcggcgagcgtgtagaagtcatagagcttgtccatcgtccattttccgtcccggacgagagaatagaggtcgccgagctgatacttttcagcgagtgtcttgttgcagaagatcgcggaggtctcgttcgccgactgagtagatatcgcggaatccatgaaaaagagctttccgctcacggaggttgccgaaataaagctctgatcgtaccacggtttcgaccagtccacattgtcaatgccgagaagctcgttgtatatcccgtccgagacggaagccgctatctcgcctccgggcaggaacaccagatcaaactcatcgtccccggcgttaacgctgttcagcacggtgttcctgatttcctgcccccatctggctgtgatttttattccgagcaggtcttcgaccttcaggtttctgcggtatatcgcgtcagagattatgtctgacgtgtcctcgccgtcttcgatgacataatcgttatgggttccatatacgccttcacagccgattatcctgaactcatacccgtcatagttcatctctgggcgtatctccgggtaatcccgtgaggtttccggcgcggatgtcgtttcgccgccggtggtgtccgtggtgttgtctgactgcgtcgagccgcaggacgccgccgcgaggagcgacgccagaatcagcagggtggatatcgcgcgttttgctttcatgattatgcctccttgataatttttactataaataagtgtttctctgtatatatattatatgattatgcgtcatctttttcaatatatttcggctggcgaattcacgcaaccgctggttgcga

SEQ ID NO: 4217 - DNA, 2196 bp, Unknown
  16S sequences of unknown bacteria
ggatcttcggccccgccgctccgacgcagctcgagcgcgtcgacacgatgcgggagcacttcgagctcttctgcacgttttttggcacggagcacctctcgccgctgcgctcgcagctcgcgtggtacgtgaagggggtacccggcgccgccgaggtgcgcaaggcactgtccgaggcgtgcgaggtgcgtgacttcgagcggatctttgacgagggggagcggcgcgcacgatgatcgagggactctacctgcacattccgttttgcgccaagcgctgcgcctactgcgatttcgcgacggaggcctgccacgacgacgcacgtatggacgcgtacgtcgacggcctctcgcttgccatccgccgggcctcgcgcgcgggcctgctcggctcaatcaagaccatatacctcggcggcggcacgcccagctacctgggaacacgccgcctcaactcgcttgtgtacctcatctcgctttcgatcaacctcgaaaacgtcgaagagttcaccgtcgaggcaaatcccgattcgattgacgagcgcatggtcaaagacctgttcgcccttggcgtcgaccgcttctcgctcggggcgcagagcttcgatgacgaggtgctgcgcgcgtacggccgcattcacgccgcgcgccagatcgagcgggccgtggcgtgcatcaagagacgcgtcgagaacttctcgctcgacctgatctgcggaggtcccgggcagagcatggagtcgtgggaggacagtctggcgcgcgcccttgcaagcggcgcgaagcacatcagcatctacccgctcaccctggaggaggggacgcccctgttcgcgcaggtcgaggcgggcacgtgcgctcctcctgaccaggatgccgaagcggacatgatggagcgtgccagcgaggtgctcgaggcggcgggcatgcaccgctacgaggtcgcctcgtacgcgtaccccggcttcgagtcgcgccacaacagctcgtattggtcgggcgtggagtacctggggctcggcgcaggcgcggcgagcatgctgagctgcgaggactatcgcgcctgcatagacgcggggctgttcgcgcccgattccggatgcgatctttcaaaaggcgcggcccgtgtgcgcgtggagtgcgaggcggacaccacggcattcaacgagagcatgggcacgccgcacgtgcaggtcgagacgctcacgaacgcgcaggcgcagctcgaggacctgatgctcgggatgcgcaagagcatgggcgtcagcttcgagcaggtgcaccatgccgcggcgatcgtccccgaggtcagcggcgtgttcacgtcgctcgaggaacgcggcctggtcgccgaggagcagggcagatacgttccgacgaagcgcggatggctttgcggcaacgaggtctacggcgccatctgggggctcgcctgactggcagcagaaccatacgggcaggctcggcaacgcttcatctcgtattggtgacaaaaagttaacgattcacgcgaagccctgtgcggtaccccacaatgattcgcagtcagacgaatcgtatgggagatttcattggcgtacgagtactacgatattctcggtgtctcgcgtgacgcatccgagagcgaaatcaagaaggcgttcaggcgcaaggcacgtgagctccatccggacgtgaacaaggcgccggatgcggaagagcgcttcaaggagctcaacgaggcctacgacgtgctttccgacccgcagaagaagagcatgtacgaccgctttggcacggccgatgcggcgcagggctttggcgggggttaccagtccgtcgatatgagcgatatcttcggcggcatgggagacatcttcagctccttctttggcggcatgggcggaggcggcgcgcgtcagcagcgccgtaacggccgcgacatggcagtcggcctgcgcctcaccctcgaggaagtcgcacgcggcgtcaagaaggacatcgtgtacgaccgcctcgccacctgcgacgagtgcggcggcaccggctgtgccgacggcggcaaagaggtcgagtgctcgcgctgcaagggctcgggccgcgtcgtgagcgtccagcacaccttcttgggcgacatgcagacggccagcacctgccccgattgcggcggtacccggtttgcatcccggggggaagcctatgaagaggtttggacgcc

SEQ ID NO: 4218 - DNA, 32759 bp, Unknown
  16S sequences of unknown bacteria
cgccggcgttctccgccgcgctcaggccgccgccggccagccccacgtccgcctcccgggcctcgccggggccgttgaccacgcagcccatcaccgccacggtcatgggcacgcgaatgtcggaaagttcttcctgcaccctgcgggcgatggccgccacgtcaatgccggtgcggccgcaggtggggcagctgaccacgttgacgtagctcttccgcaatccgcaggcccgcaggatgtcaatggccgcctgagcttcagggatggggctgcccgtcagagatacgcgcaccgtatcgccgatgccctgcagcagcagcgccccaatgccgatagcgctcttaatgttgcccgagcccggcaggcctgcttcggtcacgcccacatgcaggggataatccgtctccttcgccgccagctcgtaggccgctaccgtcagcggcacactgctggccttcagggacagcacaatatcatgaaaaccggcttcttccagcagacgggcatggctcagggcgctgtccagcattccccgggcggtcacgccgccctcccggcgcagaatatccttctcgatgctgccggagttcacgccgatgcggatgggcacatgatgcattcgggcgcagtccgccacccggcgcaccttttccatgccgccgatattgccggggttgatgcgcaccttggctacgccccgctcgatggcccccaccgccagatcggcccggaagtggatatccgccaccaacggcaccggcgaaccgtccacaatggcgggcagcgctttcaggcagtcctcatcgtacacgctcagacgcacgatgtcgcacccggcctgcgccagctcccgaatctgctgcagcgtggccgcagcgtcccggctgtccgtattggtcatgctctgcacgctcaccggcgcgccgccgccaatgggcacttttccaatgaaaaaagaatgggtagcgctcatgcaaaaaccgcctttcaaacgcaaaatatccatcattcaatgaagggaacggcataccgccaagcggggcaggccgcatcaagggtgcgcagcaccgaggacgagcacgccgcgcagcggcagcgcagtccgaagcctgcgaccaagggaggccgaaggccgactagcgccagaaatggctgaaagccatgaagcgcgtagccaagcgcaagcatagcgcagggcttggccgccgtgcgcagcggagcagaccgcatcaagggtgcgcagcaccgaggacgagcacgccgcacagcggcagcgcagtccgaagcccgcaactcccccgcagggggtggagcgggccgtaatgattataacataaatcgcttcccaaaggaaagagacagcccctccatggaggaaacggagaaaatattgtccaactttttcccagcgttgacaggcccggttcaccgtgttatgctaacaatcgtatcctgtacataaagtggaggcctatgcggtttccctgacggaggcggatatgcaccagagccgtttttaccgcacacagctgacgcggctgatctttcaggcgctgttatatattgggttgttcgtttctttttttggacttttgtccatcagcaatccccagcttttgaatttgagccgtaccgcggccaccaccatgggtgtgtttgcggtatgtctttttgggttgaccatggtgtacggcggctttgagatcggccgcaagctcaagcgttccgtctttgccagcctgtcgctgaccacttttttcacggacgcgatctcctacctttttttgcagatcatgaacgtgaatcctcaaaacccggaggccaacgccacgctgaccctgtggggcgaggatttttatctgctgatgtgtgcctttgcactgcagatccttttgatttacctcattatttcgctggcctatttcttctatttccgcatcaacccgccccggcgctgtctgatcgtcacctcctcgcaggcgttggcggagcacgtggcggtcaagctgagatctttcccccagcgctaccggctcagcgaagtgatccactaccagtgcccggacgtacacgagaccattctggagcacgacaccatttttctggcgggcgtgcccgacacggaggaaggcgcactggaagccttctgttatcagtacaacaagagcatgtacctcatggccgagctggaggatgtaattatctccaccgcggaaagtaccgtgctggacgacacgccctttctgcacattcaccgcacggaaatgacgctgatgcagcggtttctgaagcgcgccttcgatattgttttcagtctggcggggctgatcctgctcagtcccattctgctggcgacggcggcggcgctgaagctggcgggcaacggttccatcttcttccggcagaagcgggccaccatcaacggcaacgtgtttgagatcatcaaattccgcaccatgtacgaagacgatccccagcggcaggcggattccctgtccgcccgggagggcgacgaccgcatcacgcccattgggcgcttcctgcgcaagtaccgcatcgacgagctgccccagctgatcaacgtgctccggggggaaatgagtctggtggggccccggcccgaaatgctggaaaatgtggaaaagtacacccgggaagtgccggaattccgctaccgtcagcgcatgaaagccgggctgaccgggctggcccagatcgagggcaagtacaacacctcccccaaggacaaggccattctggacctgctctacatcgaaaacttcaccctgagctacgatttcaagctgcttctgcgcacgtttaccattttcttccgccgggacagcaccgagggcttcggcgacaagcaatgcgactgcccccagatgcgtatggaggcgcgggaaggccggggcgaaggactcgatcttcccccgtccaagcaccgtcccgagcaggacgcatttctgcgcaaggcgctttaactccgtttttcaccccgtttccgcaacgggttggaaataaatccatgaagtatcgttactttcaaggaggaaaacaaggatggataagacgttggttgtcatggctgccggtatgggttcccgttacggcggcaacaagcagatcgacggcatgggtccccacaacgaagcgctgatgctctactccatttacgacgcggtcaaggccggcttcaccaaggtcgttttcatcatcaagcacagctttgaagcgcagttcaaggcgcagatcggcgatctggtggccaagaaggttcacgtggagtacgcctatcaggaactgaccgatctgcccgagggctgcaccgttcccgccgagcgcaccaagccgctgggcaccgttcaggcgcttttgtccgccaaggagctgatccacgagcccttcgccgtcatcaacgcggacgactactacggcgtgcccggctacggcatcatggtggagcatctgggcaagctggctcccgaaaagcaggcctgcatggtgggctattatctgaaaaacaccgtcagcgagaacggccacgtgacccgcggcgtctgcaagaccgacgagcacaaccatctggtcagcgttaccgagacctacaagatcaagcccttcccggacggcaccattcgcgacaccgagaacgacgaaaacggcgtgattctggatcccgacgcactggtgagcatgaacttcttcggcttcacgccgtggcttctgcaggaagcggagaagtactttgtcaagtttatgaagagcctgtcccccgacgagatgaaggccgaatatgtgctgcccgtgctggtggatcagctgatgcacgaggaagggctgaaggtagacatgctcaagaccgatgcggtctggtttggcgtgacctacaaggaagacaagccctacgttcaggccgagctgaaaaagatgcacgacgccggcgtctacccctcccacctcttctaagcaggggcagtgcccctgcaccccactccgcgcccaatgggcgcggggctgcttgaaaaaaagttggctggccggggttttaccgccgtgacccggaaggggtcacggctcgccgggctggtgtagcttcacgccggttgagttgcagcgcccgttattcgccgatgggctgctgtggcctgtaccccacttcgcacccattgggcgcggggctgcttgaggaaaagcaacttagctgcggaatcatcaccgctcggctacgggcctcgcggcttgccagtttggtgcagtttcacgccggttgagtttcagcgcccattattcgccgatgggctgcagtgttctgcaccccacttcgcacccattgggcgcggggctgctcgtagaaaagctggttggccgggggtttaccgccgtgacccgaaagggatcacggctcgccgggctggtcggtcaatgaatgccgggctgaaaagcgccggttgcccgccgcggtccgcaagctatttccggcaccaacgttttgccgaaaaaaccgtctcttttggttcttctcccgttgcggttcatccgcacactctaccaaggaggaacacacccatgaagattctattgaccggcggcgctgggtttatcggctcccacacctgtgtggagctggtcagcgcagggcaccagccggtgatcgtggacaacttctacaatgccagtcccaaggtgctggatcggctgaaaaccatcaccggtcaggacattcccttctacgaagcggacgtgagcgacgaaaaggccatgaatgccattttcgaaaaggaacgcttcgacgcggtcattcactttgcgggttataaggccgtaggcgaaagcgtttccaagccgctggaatactaccgcaacaatctggacactaccctgacactgtgcgagtgtatgcgccgctacggcgtcaagcgcatcgtgttcagctcctcggccacggtatacggcctgtgcgaggaggttcccttccgggaggacatgcgctccatgggctgcaccaatccctacggctggaccaagtacatgatcgagcagattttgaaggacgtggcctttgccaatccggactggtccgtggcgctgctgcggtacttcaaccccatcggcgcacatgaaagcgggctgatcggcgaggatcccgtgggcattcccaacaatctgatgccctacatcacgcaggtcgcttccgggcggctcaagcagctcagtgttttcggcgacgattacgacacccccgacggcaccggcgtgcgggattacatccacgtggtagatctggccaagggtcacgtggctgcggtgaactatctggcagatcatcacggctgcgagatcatcaatctgggcaccggcgtgggctacagtgtgctggacatggtcaaggctttcgaaaaggccaacggcattgagattccctatcgcattgctccccgccgcccgggcgatatcgccacctgctatgccgacccgtccaaggccaaggaactgctgcactggacggcggaaaagaccttggaagacatgtgccgcgacagctggcgctggcagaaaaacaatcccaacggctatcgggacgcctgatcggttacggcccaccctgcttgcgcgtcgtgggcttctggcttgcggtaccgctgtgcggtgtcctcgaccctcggtactgcgcacccttttcggaacacaaaaaggacggtctgcggaaacgcagactgtccttttcatatgccactttatgcctttttctttggtgcggtgagaatcccggatgatccacccgccagcaccagaaacacatcccggctgtaaaagacagttcccaaggcggcgactgctgcaaatgcgcagaacgccgtccagacctgtgcccggcagggactttgccgaaggcctttcagtcccccgcggagcataacgccctccatggtcaggaagaccgccgtgcccaaaacacccaagccggacagcagatcgagcacttcgctatgctggctcaactgcttcgtgccgcccagaagcgagcccaccagcggcgaagcgcagaatccttcccacgcaacacggtaatggctcaagcgattttccccttccagtgcgccgccctccaaggcagtcagcagctgatgcagactgtgggacacactgctcaagccctttgcgtcgcagaaagccgtggccgcattgaccaacggcacccggaacaggaacaccaacattaacggaaccagcgcccacagcagcgacgggcccgttttcagctttgccagcttccgcaggatcagcgccagtagttccaccgccagaatggccgcggtgaataccatggcgtaggtgtactggctcagcatcaccatgacggcctgcgccagcagaaaggccgtaaagcccgcccgtttccagccgcgattttccgaaatgcccacgcaggtaaagggcagggagaccaccgtggcatagacgaaatcatagccgccgatattgcgcagcatcaattccttcaaataggcttcccgccccggctccgcatagcccagcgaacgggaataggcgtagatcctgccgccccggagcattccctcgatcagccagccgatggtggtcagggtggtcagcgccatcgcccccagcagcgcccatttccagtaccgccacaggcgagggtcgttcttctggcggctgtaggacagatagatcagcgggaaccagagcatggcgttctgcacgtaaaatccggcgaaccccgtgccgccccgttccagaaagaaatacaggatcagcggcgcacaggccgcgcaaagcgcctgtcccaccagcagcgcccagtgggcccgaaaatattcccagtccagcaaaacacccagtccaaacagcgccactgccgcacagccggtcatggcccggcccgtggtctgaattgccgggatcagcagccacaccgtatacagcaccatggaggcggcgcacaggcgcacggccgcttcctgccgggacagctttttttcatcgttcatgaaggaccctccttattcgttccgcgaagggacgatcaaaaagcgtttcccgtgctcagcaggaaatacaggtagtacacgcccgaagccgcgtgccagcccatcagcgcaaagccgacggcataggcggccttccgtccggaggacagagtcttggccttcagaccggaaacgaactcccggaggaaaatgcccgccatgacgacccacagcacaaaggagctggaattggcggcccaagtgaagttgccgtggccttcccgcaggccggtttcccggaaggccatgccctccagcaggctgaaaaacaccatcagcagggccagcaccagcatccgatccttgaacattccttttttatagcagcacacgatggcatacagcgggaacacggacatcatcaccgtggagcgcagcatactcaggatgctgtccaacgtcacgccgaactccacgccgctggtatattccaccactacgccggtgtagtacaggtattgcagcagaaaatacgccaccgcaggcacaaacgccagcacgatctgcccgaaatagcgccagcagcgggggcggcggcacagctccaccaaaaacatcacaaacgccgccgggagcagcgcctgcatgaaggtgggcttgcaggccagactgcccatcagaaagaccgccagcaggatcacctctccccagggcagcagcgttttctcgccttcctctgggtagcgccgttcaaactcataccagcaatggcacagaaggggcagcaccatcagcgcagagaccagcaccgcctgttgcgtggggttgtgccacacgttgggggaaccgatggtatagccaaagccacggtacacccggtcgttcacgccggggatgaacaccgccgtcaccacgttgaccagcaccgccgccagtgtgagcgtgttttccttcaccttgccccggcacaggcccaccagcacccgctgggtcaacacgaaggtcagtaccttgcacaggctgcagatcaccggtgcggcccattcaatgggaagccccagctgatagacgcagctggtcatcaaatgccacaggggataggccagacggctggtgatggagtgcaggtcggtaaaatcgaaatccgccgcgatgttggcgtgaaccgccagatcggtcaaggaaaactgcatctcataatgatacagaaacagcgtggcggcgtagatcgccgccgccgagaccagcagcagccagccgggccggtgttccttccgccattcccgctcgttgagcattacatccaaagtcatttccgggactcctttcgggccgtccgccgggcggacgggttgggcgggaaacggcaaaagccccgattttccgctcttttttgcatgggtcagtgtatcaaaaaaggcagggagtgtcaaatggcggcccctgtcctgaaacggcgcgctttaggcataagcaaaaccgccgcatctttcgaagcggcggtttgacaggccttttgttttttcagcccaagaacatcagaacgatggaaagcgcgacgaacacaccagcgcaaatcttcgtcgtcagcgccagcttcgcttccatgcccttggccttattcttcccaaaaaaggtctcggcagcaccgctcacggcgccgatgccgctgctttcgctgctctgcagcaaaacagacacgaccaagatcagggcggatatcaaaagcaaaatgcctacgatccactgcatagcggtcatctggggtccctccttagcgaatgtacatgttatcttaccattctctcaaggaaaaagcaagcttttccgcaaacagagacggaattttgcgcgggtgcatcctgccgccgttcatgacagccgagcaggctcgcaaaagaattgaccctgcccttcccgtgatgatgttctattaaataaacgatctaagctgttccctttgcaattatcggacatacattagattccaatcgaatccttctccaaattcgccggagaaaaacactttcccgtctttggtgtaaattgttcctttatggtaatttcccgtatatgaatcgatacagcattcacagcggagacttccgtcctcccgatattctttcgcttcataatgaccgtgttcatttggttcgtagttaatccacacgtattcgtcattagactgacgcataataccgcatagcagcctgttttctgtaaaaactccctcttccactcttccatcatcccaatattggccaccctcgccagacatttttccattttcccattgaccgatatagtgccaatttatgccggaagaattggtcgtttcaaaaacaccaaaaccgttcggaatgccattcatggtttcgccagaataggttcccttgcgaatcacgtccgggagttcaagaacataatccattttggagacaaactctaaatcggtttcttctgccatggcaattgaaaatagacagacgagtactagaaccagcaaaaatatttttttcatgggaacgacctcctttttcgaagagtataggccgttgataaaagtaaatcaataggaaaatcgacagaaagcgcaatgttaatgaagacagcgatgcagaaactgcccgcagcagtacggaaaaattccgatgcccctaataaagcgggtgcatcctgtaacattcagcctgcgccttttccaattctggaaactatgctataataagttgttaagcagacttttcagctgccgcaaaggaggttcttcggatggaacgttccgcttctcagccgctggtgctggcctcggcttcccccagacgactggaactggtgtccctgctgggcattccctttgaagtgatcccttcccgggcggaagaaaacgacgtgaccggctccggcaaggagcgggtgcgggtgctggcgcggcgcaagggcgaggaagtggccgcccgtctgccggggcggaccgttctggcggcggatacgctggtctgtgtggaaaacgaggtgctgggaaagcctgtagacgaagccgacgcagcgcggatgatccgtttgctcagcggcagaagtcactgggtgtataccggcgtttgtctgcttttaccggacgggactgtccgggaggaggtctgcggcacagaggtctgcttcgccgagctggacgaagacgagattctgcgttacgccgcctccggcgagccgctggataaggccggtgcctatgcggtgcagggccgggcgggcgcgttcgtccgctcccttcacggcagccccaccaacgtgatcggcctgccgctggagaccgtggcgcggatgctgcgggaagcgggctggaaattgctgggctaaaaaacgactttcatactgacaatagattggatgtgattccgtgggctttgtagcgcacgatctgggcgttgatctgggtaccagcaatacgctggtctacgtccgtcataaaggcatcgtcatcaacgaacccaccatcgtggtggtggactccaccaacgagcgcaaggtgcgcgccgtgggcgacgacgcgaaaatcatgctgggccgcaccaccgatggcgtgatggccgtccgtcccatgcgggagggcgtcatcaccgactttgacatgacaggcattctcatacagttctttatgcgcaaggccatcggctccagctatctgctccggccccggctgtttttaagctacccctgctccatttccgccatcgagcgccgggccgtgggcgaggccgccaagtacgccggggcccgcaaggtctttctggtggaaaagcccttcgctgcggcgctgggctgcggtctgcccgtatttgagcccaacggctgcatggtggtggacatcggcggcggcaccaccgacgtggccgtggtctcgctgggcggcgtggtcatcagccattccatccgcgttggcggcgtcaaaatggacgaagccatcatcaactacatcaagcgggaatttaacattatgatcggcgaccgcactgccgaggaggtcaagctggatctgggctccgccctgccgctccacggcgagcgccgggcccgtatccggggccgggacatggtcaccaacctgccccagaccacggagatcacctccacccagatctatgaagccattcaggagccctgtcaggccatcctgcgggccatcaaatgggtattggagcgcaccccgccggaattggcggcggacgtgatgcaccacggcatctacctgaccggcggcggctccctgctctacggcatggatcagatgatcgccagcgaactgggtatcccggtgctcctgtccaaggagcctacggactgcgcggcgctgggccttggcaacatcattgaaaactacgaccttctgcagcatctgggccgcaccagcttcctgcatgaattctgacggggcgtttgacccttctgactttgctcaatacccggaggtgaacccatgaagctgaaggtacccaaaaaagagcggcgcaagagcggcgacagccggggcaaacacattctgcgcaatgtgatgatcgtgctgtgcgtgctggcgctcatggggctggcgggcactcacctgctcaagctcatcaccggcaacgaaatgctggccatcccggaaaacggcgtcgccgccgtcattacgcccctgcaaagcggctttgcttccgtggtcaactggatcagcgattatttttacaccttgaaactgcgctcccggctggaattggagtataataatctccggcaggagaacgagcagctcacctatcaggcgatgctcgcggaggaattacagcacaagctcagcgtctacgagaacctgtttgacgaggtttccgacaacgaacagctcaatccgctggtggccacggtcatcggccgggaaagcggcaactacttttccgttttcaccatcaacaagggcacccgggacggcattcaggattacatggccgtcaccatgaacggtgctctggtgggctatacctacaacaccaaaactaccagcgcttccgtgcgtaccatcatcgacagcgaggccagcatcgccggtctgatctccacttcccgagatcagggcacggtgcggggcacgctgggcatcgacggtcagcccatgtgccgcatgtattacctgccggaggaaaacctgccccgccccggcgatcaggtggtcacctccggcgtcggcatgtccttccccaagggcatccccatcggcaccgtgcgggaaagcacccgcggcatggagagcaacaagcagtacatcgtggtggagccttccgccgatttccagcacatcgagtacgttatcgtcctgcgctaccagccggaggccgaagccgtggaggatcgttcctccagcaccgactccctgacgctggtgccgctggagaccatcctgcccgtgcccaccgtgctgatcggcagcgacacctaccagctggccccctcgcccacgcccagcccggagcccacgctggcccccgacgaaacgcccgcccccaccgggacggcctctacgcccgggccctcctccagcggcggcgacagctatgaatacaaggtgccctccggcctgcaaaacggcgcgacggataacagctacggcttcacgctggcgcccaccgccacgcccacgccgaccgctcccccgctggatctgtcggtagaggaggactgaccgtgtttaccaaagccctgaaagtcgccgttctgacgctgctggcctaccttttgcaggctacggcggcggaatacctttccatcgcggacgtagcccccaatctggcgctggcgatcatcgccatcgccaccgtggcgctgggccgcaagtacaccttcgtcatggctctggccgtgggctacctgatcgagatcatgacccccatgctggattacatcagcctgatcctgtaccccgtagcggccatgctcagcgcgctggtcttctccgacaagagtgagcgcaagctggaagaagaacgcacgctgggccggcgaaccaaccagtggaaccctcacctgcgcacccccctgtgcgcggccctcagtgtgacggtctttgaggccgtccatctgctttacacctacttaagcggcgtttcgctggacgcgggccactggcggcgcgccctgatcgacgtactgtactccacgtttctggccggggtgctgcaattccccgtgcgctggtggctgggggtctataagctgaaaaaggcccgataagccgcactttccctttttatcgcccccgaaaggaggtctttccccatgcgaaaccgatttggccgccgtgaaaagcgggaaggctacaacctgaacggccggtacattttcgtgctggtggtcattctgggcatgttcgtctacctgttcagcggtctggcagagctgcagctccgctccagcaccgactatgaagaaaaggcggaaagccgccgcaccaccaccgtggtgcttcgcggcagccgcggcatgatcaccgacgcggacgcggtgattctggccaaggacgaacccatctacaacgttaccttttaccgggacgccagccagaacagccagtctcaataccgcaactttaccctgtccatccagcaggccattgagatcatcgaaaacaacggtaacgagctgtccgtcagcttcgtcatccgccgcaacgaaaacaccaacgattgggaattttacttcggctccggggtcagcgagagcgtcctgcagacccgggaaaaccagtggcgagacaacaactacttcaccgtcaccagcgttcccaccgccgccgacgccatgacgcggctgaaaaagcgctataagatcgtcaacagtgcggcggagctggaacagaaccgccaagaggccgaggctgccggacgttcctatgtagatgacgtggtcatggacgaggagaccatgctgaaggtcatggcggtctactccgaaatgcagatgaacctgttcaactcccagcccatcgtcatcgccaaggatgtgccttacgaaaccgtgattgagatcgaaaccaagtccatgaccctgagcggcatggagatcgccgtgggcaccaagcgggtctatccccggtctacgctggcggcgcaggtcatcggctacatgggcgctatcccttccgccgacaaatggtcggtgctgcaaaaaaaaggctataaatacagcgacaccatcggcgtggacggcatcgaggcctccatggaggactggctgacccagaacagcgatctgcggcagggctaccgggtggtggagcgcgaccgggtgggcaagatcactcgagaattgagctacaccgagccgcaggacggcaataacgtcaagctgaccatcgtggccagctaccagcagcaggccgagcgcgcgctggctgaaaacgtggcctcggtgcgcacctctcaggaaaagaagctgatggataacacctggctggaaaaaaacaagtccatcatcgaaaaccgcaactgggagcaatatcccctgtcgctggcccagcgcgccgccatgacggtcatcgacatggaaggccgggtgctggccatggccaactaccccacctacgacctgaacgccctgaccgccgctgggaaggaaagccgggagattctgtcggatacccgcaatgtgctgatgaactacaacatccacgcccgcggcacccccggctccattttcaagatggtctccggccttggcgcgctgatcgacggcaagctctacaccaacgagaccatctccgacggcggctacttcaccaaatacaactccgacctttccactgcgcccaagtgctggatctccgaatcccagcgctacaagcaccagtaccagaccatcgtggaggggctttcccacagctgcaactatttcttctacacgctgggcgaccggctgggcgagacccggctgtaccagtacgccgccaacttcggcttcaccagcaaaacgggcatcgacctgcccggcgaggtgcgcagcgtcgtaggctgccagaccagcctgtacgaccccgacaaggccatggacgaagcttcgcaggatacgtccatgcccatcatcgtattcaactccatcaagaagcacctgcgcaatcagggggccagccggaacatcacctatgatgacgagcgcctgaaccgctgcgtcaagcggctgatggacatggccgtcaacaccaatcaggcggactgggtgcagtccatgcgccccatcctgatggaagagctgaacatgacccgggaaatggttcacctgcaggtggtgatcggcgatacctacaattacctgaacgacatcaagtggggcggcagccagaccattcaggtggccatcggacagtccatcaccaccgtgtccccggcggccgtcgcccggtacgtggcggcgctgggcaacggcggcaaggtgtacaatctgaccatcgtggactccatcacctcccctgagggcgacatcgtcagccagcgcacgccgtcgctgatgcacgactttggcgaggattcccccaatacggcagaatatctgtcctacatcctcaaggggatggagggcgtggttgacgaaagcggtactgctgaacgttacttccgcaactggcagtatcagaaggacatctgcgccaaaacaggaaccgccgaggtcactacgctggatctggaaaacaacgcctggttcgtgatgctggcccccaaggaaaacccggagatcgccgtggcggtgttcatccccagcggcctgtccggcggtatggcgggggtcgcggcccgggaatttgtgggctggtatatggatcagaagaccctgcgttcggtggacgtggtgttcccgtccggcaatacgctggccccgtaacggcctcaaaaacccaaggaggaaaggaaaccaacatgagtcaatcctggctgatcgcgtccggcaagggcggcgtgggaaaatccatggtgacggcggcgctgggcgtagcgctggcccgcaagagtatgcactgctgctgcgtggacgcggatctgggcctgcgggatctggatatggtgctggggctgcaaagccgggtcgtgtacgacatgatggacgtggtgcgccacgactgcaaaatgcgctccgcgctggtcagccatacccgttatgaaaatctggccctgctgcccgcatcccaaagcgcccgggccaaggatatggatgcggaagaatttgaacggatcatccgcaagctgaaaaagcgctacggctatattctcaccgacgcgcccgccggcgtggatcgggggctgtgcaatctgatccccgccagcgaccattgtattctggtggtcacgccggatgacgtggccattcgggacgcggaacgggtgctgaccgttttggaggcggagggcaagccccgcccgatgctgatcgtgaaccgggtggtggaaaagctggtggcccgcaacgaaatgtacagtccccagaccgtctccagcacgctggatattcccctgctgggctacattcccgaggaccccaaggtcactgaatgtctgtgccgccacgacagctttatggaaacggattgcccggccagccgggccgttgagcgcatctgcctgcgttttttaggcgaatatgtgcccatgccgtcgcctcgggcgcatcgcggctggttccaccgctcctcccgttactgaccggctttctccactccaatgtggaaaaagcccgttggaaaggacgtgatttttccctcatgatgatcaacgagtcccggcgctcccgggcccatttcgacctgccgctggtgctgctggtcttcgggctggcggccttcggcgtgctggccgtttccgtcgctacgttctccacttcctctgcggaggaagataccctgctgaactatatcgtggcctcctattacggtctgcgtcagtccatcttcttcctgatatcgccggtcatcatcggcgtcatcacctacttcccctatgaatttatccggcggcggtcatcgctgttctacttcgtggcctgcggcctattgctcatcacgctggtgtccaatcaggcgcagggcgtgaaagcgtggactgacctgatctggggctacaccattcagccctcggaatttgtcaagctggcctgtatcatcgtcgtcgccaaatatttggaaagcaccaccgatcccatgggcgacctgaagggcacgatgcggctgatcctgctgatggcgatcccatggggcctgacgcttttgcagggcgaaatgggctccgtgctggtcatgatcttcgtgttcggcgtgatgatgttcttcggcggcatccgtatccgcacactggtgggcattctggcggcgggcgtgatcgcgctggcgctgctgtacggcgttaccatggcctccggcacggacaactaccgcctgacccgaatcctgagcttcatcaaccccgagctggtggacgaaagcgccacctatcaggtcaaccagtccaagatcgccataggctccggcggcctgaagggcgtgggcatgttcgtgcagggcagcttcagccagctggactacgtgccggaagactggacggacttcatcttctccaccatcggcgaggcgtggggcttcgtgggctgcgcggcggtggtcatcgtctacctgctcatcatcctgcggatgatgtatctggcccgctacactgccgaccgcttcggccagatggtgatcctgggcgtgatggccatgctgctgttccacgtattcgaaaatgtaggcatgaccacaggcctgatgcccgttaccggcattccgctgcccttcctcagttacggaggcagcaacctagtgaccaacatgggcggtatcgggctggtgctgaacgtggtcaagaaccgaagcatcacttccatgccggggctggctccccagacccgcatccggagcaaatacaccaaataaccagaaagggcggggacggcgatggatctgcactatctgctggggctgcaaggcctgcgggaaagcctttccggcgcgctggacggcttctttctgctggcgagccagctgggcaaggcggagctgcctatggcggttacgctgatcgtctactggtgcttcagccgggagctgggccaacggctgctttttactctcaacggcagcgaccttctcaacaacgtgctcaagctcggcttctgcgtttaccgcccgtgggtgcgggaaccggcgctccatcctgtggagaaagccctttccaccgccacggggtattccttccccagtggccattccagcaaggcgggtgcgttcttcggcggtctggcccttgcggggaaaaagcgccgctgggtgccgtgggtctgcggcgcggctattttgctggtgatgttctcccgaaattatctgggcgtccacacaccgcaggacgtactcgtcggcgcggccacgggcgtgttgtgcgcctttctgctggcccgtctgctgcgctgggcggatgaaggtcaaaaccgcgatctgctgataacggccattggtgcggccctttgcggcctgtccctctggtatgtgctggcaaagagctatcccgccgaccgggccgccgacggttccctgctggtggaccctgtgaagatgcagaaggattttttcctgtcggctggtgctgtactgggaatgctgtgcggctggctgttggagcgccgcaaggtgcgcttcaccacggattgcggctggggcgtaaagctgctgcgactgctctccggcctgctggtgggctttgcgggtctttacacgcttgtgaggcactggctgcaagacctgctgggcaccaacaccggcgcgatgctgggcgtagcgctggcgatgttctatctggtggggctgcatcccctgctgtttacatgggccgaaaaaagcttcggcatggaaaaccagccgaagcaaaagcgtaaaaagcactaaaaagagccgtccggggtatccgggcggctcctgtttttattccttatcctcgtatcccagcgtgcgcaaatcatccatccggttgcgccagttttcccgcaccttgacccagagctgcaggtggacgtgcattcccagcagggtctcgatgtcctgacgggcttcctggccgatctgcttgagcatggctccctgcttgccgatgataatgcccttgtgggcagcacgttcgcagtaaatggtggcgtgaatttccatcagattgtcgctgagcttgttcatggccatcatttccacaccgatgccgtggggcacctcctcccgcaggtgcagcagcgccttttcccggatcagctccgcgcagatcagccgttcgggctgatcggtcaccgcgtcagccgggaagtactgcggcccttccggcaggtagctgatcagcagctgcttgagttcttccacgccgtctcccttggcggcgctgatgggcacgatgtcatcataccccgccgcctgatagcgctgcatcagcgccagcagggattccttgggcagcaggtcgatcttgttgagcaccagcgcctttttcacctcgtagcggctcatgtcctccacgatctggtcgtcgtgcttgcccacggcggtagcgtccaccatgacgatcagcgcgtcaatgccctgcagcgcgtccttggcggccttcatcatgtattcgcccagacgggtgcggggcgtgtgcaggccgggggtgtccagaaagacgatctgcgcgtccttctccgtatagatgcccatgatgcggttgcgagtggtctggggccggttggagacgatggccactttttcgcccaccatggcgttcatcagagtgcttttgcccacgttggggcggcccataatggcgataaaaccagaatgctgcatagtaactccttttatccttagtcgggaaggtctttggggccgaagccgtgaggcagcagcgcccgcagggtggtgtcgtcggtgcttccatcgcccgcgatggtcagaacccgcagctccggcgcaaattcgttcaaagcctgacggcaggcgccgcagggatagggcatactgccgttagacgcaatggcgatggcggtgaactcccgcgcgccctcgctgacggccttgaacagcgccgtgcgttcggcgcagttggtcagcccgaaggaggaattctcgatgttgcagccggtaaagacccggccgtcggcgcagagcagcgccgcgcccaccgcgtaatggctgtagggggagtagctgtattccagcgcccggcgcgccagttccagcagttcgccgtctgtgatggaagtttccgtatcccggccgatcccggccatgttcagggccttttcttccattttccgcatctccttcttctcgtcttcctccatgtggtcatagcccatcaggtggaacagagcgtgggccagcagatagcatagttcccgacgttcgctgtggccgtactctttggcctgctccgccgcccggggccgggaaatgatgatatcccccagcatacaggcgtgcagctccgggtcccattccgctttcaggcgcttttcactgtcccgggcggttttgccgggagcgtagcgcaccgtgggaaagctgagcacgtctgtgggccggtctacgccccgctgctcccggttgatctcgtgaatgcgctcatccccggtcagcagcacgtgtaccgcgcagggcagcttcacgccctccgccgccagacaacagtccgccaccagcgcaaagggcgcgtccgtagcggttccactttcccactcccattcaatcctcatactgatcctgttcctccgaagacggccgttccctgccgtcttttacttcttccaccggggcggacttctccgactcttccagttcttccttttccgcctgttcctctgcagcttcgatctcctgctcggagggctccacgctctcctcgctgagaacttcctccgcttcccgctcggcctcggccacgtccgtcacccgtttcagttcccgggcctccacctgactttcctcccggccttcctcgcccttgggctgatgggccgccagacgggccgctgccgccgggctgatggaggggtactcgatgcgctcatggaacacgcccttaagcaccgtcgtaaaggcgcggcaaattttgctgatgtcctgcagcgtcaggggcgcgtcgttcagctgaccgtcgtcgatcttgccccgcaccagcttagcgataaactcctcgatagctttaggcgtggggtcaggcatggaacggacggcagcctccaccgtgtccgccagcatgatgatggcgctttccttggactggggacggcggccgtcgtagcggaaatcggcaatgtccacagcctgcccgtccgcctgcttcagcgccttatggtagaagtacatcaccggcgtgtcgccgtgatgctcaatgatgatatcctgaatttcctgcggcagatgatactgctgggccagcatcacgccgtcccgggtatgggcggtgacaatggcggcggaaatatagggattggtatgctcatgaggattttcgcccagctggttttctttaaagtacatggggcgcttcagcttgccgatgtcgtggtaataggctcccgcgcggcacagcaggggattggcccccaccgtttccgccgccgcctcggccagattggccacgatgatggagtggtgataggtgccggaggcttcgatcatcagccggcgcagaatgggctgattggggttggacagctccagcagcttggcaggggtcgccagacggaacaccgcctccatcagcgcgtccagcgcgatgcacagcaccgacgccaccacggcggacagggcgctccacagggcgttgttcatcaccacccccatggagttgttagtcataaagccgatggtgaggatgatgaccatattggaaaggccggtcaggaagccgcacagcagcacctgctggcggtggggcttccgatgaagaatgatgaccaccagaaagccggagataaacgaaatgaacaaaaggttcacgatctccgaagtatagctggtatcgccgcccgccagcagcgcgctgaccagcaccgtcagggtgagacacccggccacgcccgcccgggcgccgatcaggccggtgagcatcatcacgcccagcagtgccggggtcagataggggttgatctccttagccagcacacacgcgcccatggtcaggcacagcaccagcatcaccagcactagcttcttgggcgaggccagcagctcgggatccagcaggatcagggcgatgagcagtaccatcatgctcagcagcaccagcaggaacgcgccgatataaatgttcaggtcgaaggtgtcgttatccagcattcccagcgagcgcagcatttccagctgattggccgtcacccgctcccgggccagcacgatgttctgcccctgcttgtacaccacgggctccaccgcatcccgggcctcctgccgcagcttgtccgtggcctcctgatcgatgaccatgttgggctgcaccactttgcgcaggatgggcgtgaccacgttctgcagcaggtcgatgtcggtcttcaggccgatgatctgctgcagatactggatggactcgttcacgttggtctcgcggacggtggtgttcatggtgttttccaccgcggcagtcaggttggagcacatttccgtcatctgctcctccgtggcccggagaagcgtgtccagctgataatccgccagcgtcagctgggtcagcagggagcgggcgtattttatctccgcctcggtgaactgatagttcttctgcttctgctgatcgtcaggggcaacggtctgcagcacccgctggccgtacttctgcacggccgtggcctgcgtcaggacggactgcaggtcctgcatcacctcggcggaaatgccctctttataaacataggtaggctccacgctggcggcggcggcttcctgctgccgggtggtggagatctcgtccaccacgtccttggacgcggtgatggtagtgggggcgatgtcccccaccttcaaattatagcgctggggcgtgaccgccagcatcagcagcaggcacaaaaccgctgtgcccgccagaaaaatatacacgcattgagccgtggaggaatgcagggcgcgggaaagatcctcccagctccattttttctttttgggattgcgcttggcgcgaatcatgctttagcacccctgtttctctcataggcctcataggccttcaccacggtctgcaccagatcgtgccgcaccacgtcggactgggaaagccggacgatggcgatctccggaatctctttgagcacctccaacgcctgcagaagcccgctctgcttgccgtagggcaggtcggtctgggtcgcgtcgccggtgacgaccacccgactgcctgcgccgaagcgggtcaggaacattttcatctgttcgggcgtggtattctgggcttcatccagaatgataaagctgtcggacagggttcggccccgcatataggccagcggcgctacttccagcgcgccccgctcctgaagccgctggtagctttccgcgcccatcatttcatacagcgcgtcgaacaggggccgcaggtaagggtcgaccttctggctgaggtcgccgggcaggaagcccagcttttcgcctgcttccacggcggggcgggtgagcacgatgcgctccacctctttgttgcgcagggcggcaacggccagcgccatggccagataggtcttgccggtgccagccgggcccacggcgaaggtcagctcatgctcccgaatggccttgacatagtcgtactggcccagcgttttgcagcgcaccgggcggccccggtgagtgatggccaccacctgcgcggccagctcgtccagccgatccagaccgtcctccttcaccagcgcacaggcatagcgcagggtggtgcggtcgatgggcgtatggcgttcttccagctccatcagcttttccagcacctgccgggcccagcccacgttttccgcttcgccctcgatcttgatctccgagccgcgcaggctgagctttacgcccaactcgccctccagaagcgacacattgcgctcgttggcgccaaacagcgccagataagcgtccattccattcagcgtcagatattcctgaaccgtttccgtcaaagatccagcctccgatcaggtggcgggctttccaatttccgtccgccattcgccggtcatggacacggcgaaaaattccccctctatcatacaataatctacccatttgtcaatgatctcatcgccccgaagggcttctttcaagcgtgtttccgccgccgcgagggcttcccgtcggcactcctcgccgtccgcccggacacgttccagcgccgcctcccggtaaaggagcgttttgcgccagacggggaaaaaaacgcctgccaccggctgcacgctctcgtagaggttcatggcgaggtactccggcttttccgtctccgccgggaactggaaccacggcgtacacagctgcgtcaccaccatttcccgccccgtttcccaacttttcatccgattcagcggcacccgcacccggacggtgcgccagcagcgggccgtaacgctgccccgggcctgcaccgcgttgaccgtctcgtcccggccccgctcctgcccacggatcagcacttgccctttgcggacaacggctcccggacggacggcggcagtcccggcaaaaacctcgatcgtctccaccacgccgtcccggctggccaccagatcaccgggctggccggaatccagttccggcatgggatgaccctgcgtgcattccacccgcagggtcatcccggcggcatagacgtgaaaccacgccgtttccgggtaacgccagctgagcttttcttcccacgcagtcgcgtcaagacccgcccgcagcattccggggcgaatcccttcctccgccagataggcggcgatatcggcctgataggcccccgcgccgacgatctccacccgccagatacgctgactcccgaggagcagcatcagcagcgccagcgccataccgacccacagtccgggccgcgctttccagctgctccacactgccgaagcccgctcggggcgtacttcccggatgcgccagcccttgtccgcagcgatctgcgtcactgcggcaaaatccgccgtccggcactggcagcgcagggtgcgccgtcctgtgcggcgcacatcctccaacgggatttcttcctgctgcatcagcgccagaaaccgttccagattcagaccgcacaccgtaaaggagcatgtcagcaggggagatgagagctttttcattccttcacccctttggccggtaggagagcttctcgatcttgcccagcaccaccagcccgtcccgatcgtagcgggacagagacaggttttccccggtgatcgacatcagcccgcactgggtgcgcaggacgatctcctcctgcgtacaggcatagatgccctgatgctgctccacaatgagcttttcgtcccccagcagtacggagcggggccagcccagcaccagctctttgggaatttcgttccacttttccagcatcccccggcctcctgcccatggttttgggcaaggatatgcgcgaaaacaggcgaacatacgcaaagacccggcccgccttttttcaggcagaccgggtgcattttatcggctattcctcgctcatgcggtagccgatgcctacttcagtaaagatatatcggggttcgtccgggttcggctcgatcttccggcggatattggccatgtggactcggagaatcttgttatcccgattggcataggggccccacagctccttgagcatcgcccggtaggtgatgacttggccggcgtgtttgcctagcagcgccacgatgcggaactcgttcggggtcagccccacatccttcccggccagatagacccggcatttgcggtaatcgatcagcaagtcgcccacctcataggagccattcaaggcgatggaatcgtcttccagcgccgtgcgggtgtggcgcagggcggtgcggatgcgggccagcagttcgatggttccgaagggcttctgcagataatcgtccgcgcccagatccagcgcgtgtgccttatcctcctccatgctgcgggcagagatcacgatgatgggcgttttggcccaggagcgtacccggcggatgatctccgtgccgtccagatccggcaggcccagatccagcagaatgcagtccgggcagtgggaggagatcatttccagcgccttgacgcccgtgtccgtccatagcgcctcataatggttggtggtcagcgtcgtgcggagaaacttgctgatgccggggtcgtcctccacgatcaggactttgcagggcgcgctattcgccatgttcttcctcctcttctctcggcagccagaaccgaatcaccgcgccgcctccctgccggttttcggcagcaatatctcccccgtgggcccgaatgatggagcggcacacgttcaggccgatccccatattgcgtcgattgtccgaatgggtcacgctggcgggctgcaggccgtcgaaaatgtgttccagcgcttccggcgaaaagcccgcgccgttatcctccaccgtgactgccgcccgtccgggttcctgactgatcgtgacccggatagcggtggcgttctttccgtggatggcggcgttttcaaacagattcgtcagcacctgctcgatcagcgtcgcgtccatgggagccagcagaatgttttccggccgctccaccgtcacggcgacctccgggtgatgccggcggaacttcacgatggcgctggatacaatttcctccagcacctcctcctcttttttcagcgccacgccggagccgctgaatttggtcacggaaaggatgttctccgttacgcggctcagccagtgggcttccttctgaatatcctgcgccagctcgtcccgttcctccagggaaaggttcttctgctccagcaaaacggagctggcccccaaaatggacgccagcggcgtgcgcagatcgtgggaaagggagcgaagcaggttgacgcgcattttttcggtttccacatcgaaacgaagctgttcctgctttttgatctgggtggtcagggtggaaacgatcagggacaccagcagcatggcggtaaaggtcagcggataaccggcgatagaccattcaaactgaaaaaaaggcttggtaaatgcataattggcgcaaagaaccccggcgatggccgaaaaaattccataccagtagccgtccgtatggctggcgatcaccaccacggccaaaataaacaccgccatggcaaagggattgttgtcgtcgtccacctgagagagcagcaggcaaattccggcggcagcggccagcacagtcagcgaaaacagcaggctccatatcacgccctttttccgcaaactttcccttgctttctgcattcttctgacctcccgccgctttctgaggatgattataccatactcctccgctctgcggatatggcgaaagccgccgccgcaaaacttaacggtttcttgacggcggcctttgcagtaaattagcggagaattggcatatagtaggcaaggttccaaatggggcaatgtcgagtccccgccgggatcaatcgaaggacggaaggaacgatagccgtatggaaagcaaagaatatctggaagcgaaaaaagaattttggaactgcatcgccatgacgatcttcgggctgggcgttccgctttataacgccttccgggagtggctgcccattatgcgggctgaaaagcgaaaggaacaggcagcggtcgcggcgcaagcggaataatgcgccccgtggacagaacgctggctttttccccctcgtatcggcgggtctgcgaagttttccccgttccacgtctggctggacagccgtgaagcagggaggcattgttcagaccgccggtgttttggaataattggaataaaataagaaaaacggagacgcaggctttctgcgtctccgttttatgtttcgttaaagcacgtatttccgaatagcggcggcgacgccgtcctcgtcgttggtcagggtcacgtacttggcggcagcctttactttgggcgtggcattgcccatggcggtgccgtagcccgcgtattcgatcatgctcaggtcgttgtcaaaatcgcccaccgtcatcacctgatccgggccgatgcccatcttctctgccaattcctttacggcgcggcccttgctgacgccctgaggcatcagctcgtagttgtccgcccaggacgaggtgatctccagccccggcagcgtctccagtctgcggcccagtgcctgaagctgctcccggtctctctcgatgcagacgaatttgttcacccggccctccgtgaaccggcgaacggcttcctcgcccttcagaatgcggggcgcgcgggggtcgttccatggggcgcaccagtagatatcctctgcggccgcttcgcccgcaaaggcagcgatctcattttgcataaagcaggcgaaggtcatgttccgctcccgaaaccactggaagcactgcatggcggtgtcccgctcgatagcgtagtcggcatagggcgtgccgaagggcctgtccagacagtagccgccgttcatggacaggatggccatgcggtcaaaaccgtgcgtaacggcgaacatgctcgtatctccggcaggacggccgctgcaaatggccagcttcacgcccttttcctcagcggcgcacagggcggcaatgttgcccgcgctcaattcctgacggctgttcaaaagggtgccgtccatatccatggcgatcagtcgaatcgaattcatgctttggtactccttcaaaattcaggcgaaatggaaagccgcaggtcattcagataggcccattccccgtccagctcgaagcgaagctccgcggcgcagagcatcagccgccgggctctcctgcgcttgttgaactcccggtcgccgtacttgtcgtcccccagaaggggatgaccgatggccgccatctgggcgcggatctgatgggtgcggcccgtgtgcagaaggatctccacccgggcgcaggggcccggttccagcacggtatactccgtcacgataggcaggctgccgggctgttccttccgggtaatgcgcaccagcgccttttcgctgtccttggtgaggaaagcccgcagcaccgcatgatctggctggggcgttcccttggtcaggcagaggtagcgcttgcggatgcgccgctgccggaaggcttcttccatggcggcctgcgcttcctcatcccggcacagcagcagaaggccgtccgtctggttgtccagccggtggcacaaaaggggttcccgtgcgttcggttcctgccggcgaagctgccgcgccaccagctcggtgatggtctgtccgccctttgcgtccttctgacagctgatccccgcgggcttgcgaatcaccagcacccggctgtcctcatacaggatgggaatttccggctcccgaatttcctcgccgggggtgtagagccgcacctccgcgccgggaatcagcatggcctgacggtcgacccgcttgccgttcagcttcacgtcccgccgatccagcgcctcccgaacggcatactccggcagctggggcagcatccgccgcagccagggaaaaagccgtcccggagcgatgttctccgggatggtcaaagtatacagtttcatcttaatgctccagcgccgctttcaggcccagccagcgcggcgttccttcgtacagacggagcagcgcgtcccgcatttcgcgggtgggcagcaccgtgacggattcggccagcacgctctccatttcggaaagggaggcgttctgcttggccagcatccgcaagtcctcggcaatatcgttcacgtccagctccggccgcagcgcgccccgcagggcggcacacatggcttcgtgcaggggcacttcctccggcaggatgccgttcatgcccccggctaccatctgctggctcatttcaaagctgtccatggcgcccacctgctggcgcttcaccagctgataggggttcgccagaccggggtgcagcaggatcatgccgcccgccccgtcggtgatgtaatcaaaggaggtctgcagatatcgccgggcgatctcccgggccatggggtcgccgcgctgcatcacgccgcccagaaagaactccatggcctgcgccgcgtgcagaaggccggtcaggtacaaaagtccgtgtaccgtcgcgtcatagcgccacagccgttcccgatccatagccgcgccatcggcgctcatggcggtcaaaagcggctcctgcagcgcggcgggcagggtcagataccagtcgtccccttccgcccgaaagctgcaccacaagcggctcaaaagcgcctccgccgcgcccaaatcgtcccagtcggtcagcagcagctctccgtcgttgatgagtagcttttccaaaagctgatgctctcccgcgcccacgaaccgggcttccagcggaagccgggccagcaccatgccccgcagctcgtccagcgagcagagccgctgctggccgggccgaaaatcaaaggaatgctcataaagagactgcgcgtccagctccgtcgcttcagcggaaaaaagtgccgccgaaggatgggcaaaaagcctgcgttcgcaggcctcgtactgtttttcccgcatcatgctcatggtcatttcactcagatcggtatgaaccgtggattcccgcagcatggctttccccccttttcgttgcatctatccattataacgggcccccgtgcggtgtcaaggttctttccccagccaattcataggaatggcggggaaaatccccttattccgggaaggtcaccgtcactgtgccgtccgcttcgctttcggcggcggtcatccccagcagaccttcgagggtctcggcgggcagatagagccattcgccgtaggcgcggatgtcccgcggccggagcagctgacgcaccccgttcagggtgatctccagattgataggcgttcccgcctgatcgaggccgtaggacagccggtacaggctgccgcccatggcgaaggcatagccggggttatccacgctgtccgagggcagaatggtggctccatgggccagcagcacttcccgcaggggcagatacagcgcgccgctttcgctgcggcagggcggaatgaccgcttcgtcttccccggtcaccgtctgcccgtccacgacgatcgtcccattctctatgggttccagcacggacagtggcgcttcggtcgccgccatgggcaccggggtgtctgtggggatcggcgacggtgagggggtaggcgcgggggtatcggtaggagtgggggaaggctccggcgtgtctgtaggcgcggggggggcataggcggcccaataatccgcccggcgcactttgccgctgtcataaagcacagacagggtattccggcccgcgataccgtccgccgtcaggccgtggctgtattgaaagcgttccaccgcccgccgggtctgctggccgaaacggccgtccagatcaccctcataatagccgtactcggccagcgcctgctgcaggcgcagcacctcgtcgcccttatcgcccgtctggatggtgtggtaatccgggttgacggacacctccaccgtaggcacggcggtggggcggggcgtaggctccgccgtggccgtcactgccggggtaggcgtgacgaccgtggccatataagcttccgcgtccggcatactctgcacggaggacgcgtacaccatcgtcatatagacaagcagcgttttcagcagatccatcgtttgacctcccggtttgatttagtcccgaagggcgcgccgcccgtgtctgcgccgggcaaagcgcttcagcggtacccggcagaaaaccacgccgtccgcccgaagagagcgcagcgcggcgccgagctcccggggcgtatagcgtccgtcctgcgccacggcgaacgtcatatcggctaccgcgcccagcatcgccgcgtcgctggctgtccggcagggcggcgcgttcaaaatcacataatcgaaggattgggccgcgtccgtcaggaaggcggcaaagccgggacgggcggcaatccggctgaggaatcccggctcatggcatacgtccatgaacaaaagccgggaaatgggcgtggacaaaagcgccgtgcgcagcgcgtcctcccgctgaagacagtccatcacgtccatcgtgccctgcacgcccagccatttccgcagggcgggggcataggtatccatttccatcagcagcacttcgaagccctgcgccgccagttcggaggctgtcaacagggaaagggtggcgctgtcctcgtcctccagaccggccatcaggatggaacagccggtatgctgcgggcggttacgcagctgcagaaccagctcccgcacgttttcccgggtcagctcgtccatgccgtcgtacagcgtgaaggccttgccccgcctacgctcccgcacccagcggcgcaggcagtcgtcgtattccgctacgcctgccagacagggcagctgggcgggcggttccagcggatcccactgcacccgttcccggggagcagggatcagcagcgtcagcaacgaaaacaacgcaaaagaacccag

SEQ ID NO: 4219 - DNA, 32759 bp, Unknown
  16S sequences of unknown bacteria
gccgccgcgatccggcatccccgtccagcagcgtgtcgactttgtcgacacgctgccccccgctatctagatagcgggggttttggcctctgcgccgagataaggagacgggtatgattacgctcgaacatatctgcaaaaccttccgggtcgccaagaggaacgccggcatgaaagcggcggcccgggctttgtttcataaggaacacgaacgggtggaggcgctccgggatgtgtcttttaccatcgaggacggcgagatggtggggtatatcggcccgaatggcgccggtaaaagcagcaccatcaaggtgatgagcggcattctcacgcccgacagcggcacctgcgtcatcaacggccgtgttccctggaaggagagaaccgcccatgtggccgacatcggcgtggtgttcggccagcgttcccagctgtggtgggatgtgccggtgatcgattcctttgaactgctgcgggatatttacaaaatcgaaaccagtgcctaccgctgcaatctggaggagctgacagccctgctgaacctgtcggacattctccgcaccccggcgcggcagctgtcgttgggccagcggatgcgctgcgaaatcgccgcctctctcctgcacgatccgcgcattcttttcctggacgagccgaccatcggcctggacgcggtgtccaaaatcgccgtgcgggatttcatcaaacggcgcaaccaggagcggggaaccactgtcattctcaccacccacgatatgcaggatatcgaagcgctgaccaaacggattctccttatcggcaaggggcagattttgctcaacgggcagctggacgagctgaaaaagcgctacgcggccgcccagaccctgacggtggaatacgcgggggaactccccgctcttccggacggcgtgacgcttctcgaaagccagccgggccgggcggtgctgcgggcggacggacggcggataaccgcctccgctcttatcggccggttgtcggacgccgtgaatatcctggatttgtcggtgacaggcgcgacggcggaggaactggtggtcggcctgtaccgggagtttgacatatgaacaagtacctgtccttcttccggctgcggtttgtcaacagcctgcaataccgctccgccgcctttgccggcatcgccacccagttcttctgggggctgatggagcttttgctcttttccgcgttttatcgggcgggggacacggccgccctgcccatgcgctttgatcagctggcctcctatatctggctgcagcaggcctttctggccctgttcatgaattggtattgggacgaggacatcctgtccgccatcactgagggctcgatcgcctatgagctgtgccgcccgctcgatctctataccatgtggtttgcgcgcagcgcggccagccggctggcgaaggccgtgctgcgctgtatgcccatcctggtcatcgccgctttgctgccgccgccgtttcgtctcggcctgcccgccagcctgccggactttctgttgtttcttctgtccatgctgctcgggttctcggtggtggtgaccttcgccatgctgatatacgccctctgcttttttaccatctcccccatgggcgtccggatcgtggccatgtcgctgatggaactgctgtccggctcggtgcttcccctgccgttcctgccggataagctgcgcgccgtgctggaactgctccccttcgcgtccatgcagaatgtacccctgcggatttacgccggccagatcgccggcggagagcgggcgttcaccatggcgctgcaggcggtatggctggttctgctggcggcggcgggcaaggcgctgatgaatcgggccctgcgccgcgtcgtggtgcagggcggttgaacacagagaaaggagggttcggccatgcggctgtatctaaaatatttttccatccatctgcgatcggcgatgcagtataagacctcattcttcctgaccgttctcgggcagttcctggtttccttctccatgtttctcggaatttattttatgttctcccgctttcacacggtggagggcttctcctatcaggaggtgctgctctgcttcgccatcgtcttgatggccttttccctggccgaatgctttgcgcggggctttgacgccttcccctccatgctcggcaacggccagttcgaccgtattctggtacggccccggggcgcggtgtttcaggtgctggcctccaagatggaactgacccgtctgggccgccttctccaggcggtgctggtgttcgcctatgtcatccccgccagcggtatcgtgtggcggtgggatcgcatcctgaccctggtgctgatggttgccgggggcgtggcggtcttttccgggctgctcatgatttacgcctccctctgtttttacaccaccgagggcctggaattcatgaacatctttaccgacggaggacgggaattcggccggtatcccttccgcatctacggcgaaggcgtgctgaaatttttcacgtatatcattcccctggcactgtttcagtattatccgctgctctttctccttggccggtcgagcaaccggctgttgatgcttgccccgttcgccgctctgccgtttctggccctgtgcctgctgttctggaaaatcggggtgcggcattataaatccaccggttcatgacgagggaggctgttctatgatactcagcgccagtcgccggacggatatcccggcgttttatgggaattggctgatgaaccggctgcgggccgggttcctgctggtgcgcaacccccgcaatccccggcaggtcagccggattgacttgtcgccggagaacgtggactgcatcgtcttctggaccaagaatccggcccccttcctgccccgcctgtcggaattggatgccagggggatcccctactattttcagtttactctgaccccctatggcccggagctggagcccggcctgccggataaatcggctgtcgcggacatctttcgccgtctggcggatcggctggggcctcaccgggtgctgtggcggttcgatcccatcctgctgaacgcggattgggatgtaccgcgtattctggacgcgttcgcccgcctttgccggcgcctggcgggatatacggagcaatgcaccatcagctttctggacgtttacgccaaggtgcgcccgacggtacgcagcggccgcatccgcccgccccagccggacgacatggcggcgctggcgaatacgatcggcgccatcggccgggaggcgggcttggacgtgcgggcctgctgtgaagaaatggactggcgccccttcggcatccgccccgctagctgcatcagccgggagcgggtggaacgggtctgcggctgtcccattcaggcgaagctacacaacggccagcggccgcactgcggctgtgtggacagcgtggacatcggcgcttacgacacctgccgcaacggctgcgtctattgctatgccaacgcgggcggcggggcggtggccgccgcctgcgcgcggcatgatcccctgtcccccctgcttaccggccgccttctgccggacgatatcgtccggccccgtccggtcgaatccctgcggcagaatcaaaccaccctgtattaaaagagagccttcggcacgcgttcacgtgccgaaggctctcttttatatcacacattgaagcggaacagcacgacgtcgccgtcctgcatcacatactccttgccctcgctgcgcaccaggcccttctccttggcggcggtcatggaaccgcaggccatcaaatcctcatacgaaataatctccgcccggatgaatccgcgctcgaaatcggtatggattttcccggccgcctggggggccttggtcccccgggtgatggtccaggcccgcacctcctggggcccggccgtcagataggagatgagccccagcaggtggtagctcttttgaatcagccgatccaggccggaatgctcgagacccagttcggagaggaacagagtcttttcctccccgtccatgtccgcgatatcggcttccagctgggcgcagatgggaagcacttcggcgttttccccggcggccagctgttccaccttcgcaaaatgcgggttacgctccgggctgccaccggtgaaatctgcctcgctgaggttggcggcgtaaatcaccggtttggcagtcaacagggaaacggtggagagcatggcggcctcctccggggtgcattcgacggagcgggcgggcttgccctcctccaaaacggcataaacccgcttgaagaaatccagctcggtttgcagccccttatcccccttgagagctttggccgtccgatcgatccgcctctccagcatctccatgtcggagaagatgagctccaggttgatggtctcgatatcccgcagggggtcgatgctgccctccacgtgcacaatgtcgtcgttttcgaagcagcgcaccacgtggacgatggcgtccacctcacggatgttggcaagaaatttgttgcccaggccctcgcctttgctggcccccttgaccaggccggcaatgtccacgaattcgatgaccgccggcgtggttttggcggggttgtacatccgcgtcagctcgtccagccgtacgtccggcacagaaaccacgccgacattggggtcgatggtgcagaagggatagttggcgctctgggcgcccgcgttggtgatggcgttaaacaaagtggatttgcccacgttgggcaatccgacgattccgagtttcaagaaggatgacgtcctttccccgtggtatctccgggccaaagccctgaatggtcttgcatttcgctcttaatcggcgctctgttcgcccgcgtcgccgcggccgcagcacttcttgtacttcttgccgctgccgcaggggcagggatcgttgcggcctaccttctggctggcggttttgcgtacggtgcgggccttgtcggtgccgtctgaggaggtggaggtgggcttggcaatctgctcccgcttgggctcctcctgggtgcggatctgcacggtaagcatcagacgggaggtgtcttcccggatggcgttaatcatctggtcgaacatgtcgaagccttccacccggtacatcaccaccggatccttctggccgtaggcgcgcaggtgaatgccccggcgcagctcatccatgttgtcgatgtgatccatccagtagcgatccactgttttcagcaggatcacccgttccagctcccgcatgatctcgccgccgtactgggcttccttcttgtcgtaaatcgacatggcccggtcggtcagggtgtccaccaaatcctgccgctccagatcctccagcccctgggcgtcatattggaaatcgtcgtccccggccagccagccgcggtagtaatcccgcagcccgtccaggttccagtcgtcgtgggtttcatcgttggccgtataggtcttgacggtttccgcaatggattccttaatcatgttcacgatgctgtcccgtacgctttcgccgttgagcaccttgtcccgctggctatagatgatttcccgctggcggttcatcacgtcgtcatactggagcacgtcgcggcggatgccgaagttgcgctcctccaccttgcgctgggcgctctcgatggaattggtcagcatcttgttttcgatgggggtgtcctcgtcgatgccgagggcctccatcaggttgttgatccgatccccgccgaacagccgcatcagatcgtcctccagcgacagatagaagcgggtggcaccggggtcgccctgccggccggcacggccgcgcagctggttgtcgatccggcgggattcatgccgctcggtgcccaggatgaacaggccgccggcttccttcaccttttcggcctcgggcttgatttcagccttgtatttctcgttgagctccttgaaagtggcgcgggccgcgatgatttcctcgttgtccgtgtcgccgaagccggtggattccacgatcatttcctccgggaaccccatgcggcgcatttccgccttggccaggtattccgggttgccgcccagcataatatcggtgccgcggcccgccatgttggtggcgatggtcaccgcgccgattttgccggcctgggcgatgatctcggcttccttctcgtgatacttcgcgttgagcacctcatgggcgatgccctttttcttcagcagattggacaggtgctcggatttttcgatggaaatggtacccaccagcaccggctgctgccgctcgtggcattcctcgatctgccggataacggcgttgaatttgccggcctcggtcttgtaaacgctgtcgggcagatcggttcggatggtgggcttgttggtgggaatttccaccacgtccagcttgtaaatctgctggaattcggtctcttccgtcttggcggtaccggtcatgccggacagcttcttgtacaggcggaaatagttctggaaggtgatggtggccagggttttgctctcccgctccaccttgacgccttccttggcctcgatggcctgatggaggccctcgttataccggcggccgaacatcagacggccggtgaactcgtcgacgatgattacctgatcgtccttgaccacataatccacgtcccgggtcatgacgccccgggccttgatggcctggttgatatggtgcagcagcgtgacgttgtccgaatccatcagattttcgagatggaaatactgctcggcctttttcacgcccgcctgggtcagggtagcggtgcgggctttttcgtccacgatgtagtcgccgtccaccgtgtcctgctcctctttggcgtccatttccttgatgcgggtgattttcagggtcttggcaaagcggtcggcctgctcatacaggtcggtggacttgtcgccctggccggaaatgatcaacggggtgcgcgcctcgtcgatcaggatggagtccacctcgtcgacgatggcgtagttgtgggggcgctgcaccttgttttccttgtagatgaccatgttgtcccgcaggtaatcgaagcccagctcgttgttggtgccgtaggtgatatcggcgttataggcggcgcggcgttcgttgttgtccagcccgtggacgaccaagcccacctgcaggccgagataccgatataccttgcccatccattccgagtcgcggcgggccagatagtcgttgacggtgacgatgtgcacgcccttgccgctcagcgcgttcagataggcgggcagggtggccaccagcgttttgccttcaccggtgcgcatctcggcgatgcgtccctgatgcaggatgatgccgccgatgatctgcacggggaagtgacgcatgcccagcacccgatccgccgcctcgcggcaggtggcaaacgcttccggcagaatatcgtccagcgtctcgccggtttccagccggtttttcagcttatcggtctgagcccgcagcgtttcgtcggacatggcgcggtattcctcttccaacgcgagcactttgtcgcacaagggctggatgcgtttgacctcccgcttgctgtaatcgccgaaaagagatttcagaagtcccatggttcctaaccgttcctttcgttatcaaactgggcgtgtctgccggcccggcaaccgccggccgccggccaatacccggatcgttataggaatcgtacgggctttctatggttcccaaggacagaaagcccagcacggtatcttatatatcataccatattcctggaagggatacaaccaaaaagtcggcagcattggccgaaaacctgaaatttcttccgacaggcgttgacccttttatcgttttgcggtataataacggagaaaaatgcggacggacagacgaacagcggcacaaatccgctgctttggggtaaaattccggatagagaatggacttttcgggaatgtggttttcccggagggaaaggatacgattgcgcatgaagactgtgagcaaaaatgggctcagcggcatcatagaggcggcgctcatcgcgctgatgctggtggccctggggctgatgatttccctgccgtggagcatcaccggtgtgacggacagaaagcccggcatggaagggttctattatgaaaaatactttgtggtgctgatgttctccggcttgatggcggagctgattctctggcaggcccgcggcatcatgcacaacgtcaatgtgggacggcccttctgccgggacacggtgcgccgcttgcgtaccatcggtacggaatgcctggtgctggcggtggcctatttcgtcggcatgttctttgtgaccaagttttttatggtgctgattttcgtggccttttcggtcattgggctgatcttgtttgtgttcgccgagctgttccggcaggctattatttataaggaagaaaacgagatgaccatttagcggcggcgtgacggccggtgtgaagatggatgatagaggttgggtatacggatgggaatattggtgaacttggatgtcatgatggcgaaacggaagatagggctgacggagctgtccgagaaggtgggcattacgttggccaatctgtcgatcctgaaaaataaccgcgcccgggccatccgattttccaccctggatgccatttgccaggcgctggactgtcagcccggcgatatccttgagtttaccgatgacgataagtagtacccgtatggtataaaagaaggctgttccgtcaggaacagccttcttttataccatacggtgcgccgccagcctggcggcctccaaatacggggcgggctcaaaatccgggctgtcggctcccacggcgtggacgcgctcggccaggacagcatgaataacggtcagcgggggcgccagctgtttttccagcagcggcccgccctccggtgacccgctgccagacgcggtgagcagcaccagccttttccccttcgagatgggcggccgtttgccaagaatgaaccgggccgaccaataccgctgcagccgatcgatgagggccttgagaggggcgggaaaggaaagatggtagaccggcgtggctatcaccaccaggtccgcctcctccagcgcggcgtaaaaatcgtccaaatcccgcttggagcatccttcccgatgatagcagtaccggcagtcgtcacacggaatggggcggcgatcgtagcaggaaatccgtgtgacggccgttccctttggcagctccgtcaagaaagcgtccagcatccgggcggacagcccgtccgcccggggagagccgagaatggccagcacccgttcagccgaggagggtgcgttcttcgcagtagtcgcagacaagcatatcaccgcttttccggaaggtatgggggagatacggttccgcatgggtgatgcaccggggattggcgcaagcgtaactttccccggcggggacggtgtccaggtgcttgacatccccctccagcattttcatgatgagggccatgcgggcgtacaggccgtattcggtctgctcaaagtatttcgcgcggggatcgtcgtccacctcctgggtgatttcgtccacccgaggcaggggatgcagcaccaccaaatcggatttggcccgccgcattttgggcttgtccagcacgtagacgcctttctgccgttcgtattcctccgccgtttcaaagcgttcccgctggatacgggtcatatacagcacgtcgagcagaggcatggcctcggccaagttgtccatttcctgccacggacagcccgccgccgccaaataatccttgatgtaatggggaataccgagatgaggggtggagatcagcacgaaccggtttccagggaagcgggacatggccttgataagggaatgcaccgtccgtccgtttttcagatcgccgcacaggccgatgcacaaacccgaaaaggtgcccttttcgttgcgcagggtggtcaggtcggtgagggtttgcgtgggatggagatgcccgccgtctcccgcattgataaccggcaccctggaatacagggcagcggccagcgccgcgccggcggtggggtgccgcatggcgatgatgtcggaatagccactgaccacgcggaccgtatccttgatggtttcccccttggccaccgaggaattgccggggttgtcgaagccgataatccggccgcccagacgcagcatggcggtctgaaaggacatctgggtacgggtggagggctcatagaacagcgtggcgagaatcttgccgcggcagacgccgtaatagtcgtccatatgccggcggatatcgctggccagggcagtaatttcctcccattcggccacggaaaggtcggataaatcgataagatgacggttctgcatagggacatgtctcctctgctgcggatttttttcagtatagcacgatccccggcggcgcgcaatgccccgtatgcgtaaaggggtgggagaatgccggagtttttaggggttattgataaacaatatgtacgaattgtgaatccctggagaaaagcgttgcaaaatagaaagggaactgctataatatcggtgtttgtaccaaaataccggggagaaaataccatgcagtgacgaataaactggggtttaaaggagatacggacttgaaaaaatacgactatctcatcgtgggctgcggcccctttggggcagtgtttgcccagcaggcgacagcgaagggaaagcgctgcctcattattgaaaagcgggatcatatcggtggcaacctctactgcgaggatgtcaacgggattcatgtgcataaatatggcgcccatattttccataccaacagccgggacatctgggactatgttaatcgctttgccgagttcaaccggtacaccaattcccccatcgccaactataagggcgagatttataatatgcccttcaatatgaacacgtttaataaaatgtggggtgtcgtgacgcccgagcaggcccgcgcgaaaattgcggaacagcaggccgccgtggaaggggagccccgcaacctggaggagcaggccatccgtctggtcggctccgatatttataccaagctggtcaaggggtataccgagaagcagtggggccgggactgcacccagctgcccgcctttatcatcaagcggctgcccgtgcgctacacctacgacaacaactatttcaacgaccggtatcaagggatccccatcggcggctacaacgtcctcatcgagggcctgatcgcgggggtcgaggtgcggctgggcgtggattatgacagcgatcgggaagccttcaacgccatggcggacaaggtggtgtataccggtatgctcgacgccttttatcagtaccggttcggcaagctggaataccgcagcctgcgctttgagagtgaagagctggacatggaaaactatcagggcgtggcggttgtcaactacaccgaccgcgagacacccttcacccgcattatcgagcataagcatttcgaattcggcacccagcccactaccgtgatcacccgggagtatcccgaaacctgggaagagggaatggagccctattatcccgtcaacgacgagaccaaccaggcgctgtatcagcaatatgcggaattgaccaaaacggaaaccaacgtcctgtttggcggccgtctggcggaataccggtattacgatatggacaaggtgatcgcctcggcgctgaccctttgcagaaaagaattgggagaataacagccgccctggccttccggccagggattgctatttgccgggttcggcgttggaggtaacagaatggataacgcagtcaaagtcagtgtcattatgccggtgtacaaggtggaaaagttcgtcggaaaggccatcgaaagcatgctttcccagacgctttccgattttgagttcctgattgtggacgacggaacgccggacaacagcggcaagatctgcgatgagtacgcgcagaaggacagccgtatccgggtgttccatcgggaaaacggcggcgctcccagcgctcgcaacatggcgatggaggaggcacgggggaagtattactacttcatggattccgacgactgggcagagcccaccatgctgcaggatatggttgagctggcggaaaagcacgaggcccagctggtggtgaccggcttcttcatcgatacttactacaatgacaccgagtatttgtcccagaaccaggtgcagcccgacgccgtttatgaccagaaggcgttccgggagaatgcctacaagctgtttgataccaatctcctgtacaccccctggaacaagctctacctgcgcgcctatatcgatggcaaaggcctgcgcttcccgcagaccatctgggatgatttcccctttaatcttagcgtcatccgcgacgtggagaaagtggtggtgtcctccaaacagtactatcatttcatgcgcgcccgggcggattcggaaaccgccaaatatgtgcccgccatgtaccagaagcgggaggatgagcacggctggatgctggatttgtatcagcattggggcatccaggacggccccagcatggaaatggtggcgcgccgctatgtggaacggctggttggctgcgtggaaaatgtgaccaatgagaaatgtcagcttcccaaagaggagaagaaaaagcaaatcgcggcgatgatccgtagcgacaatgcgaaaacctgcctgaagctggcccggccgcgatcgactatgatgaaaacgatgctggttcccattaaatgggggaacgtatccctgaccatgctggaaagccgcgtcatcaccaaaatcaaaaccaagcataccaaaaccttcgccaccctgaaggccaaacggtaaacccagagcgaaaggcggtcgccctatgtcacaaccatttatcagcgtcgtcatgccggtatataacgccggggattatttggattcatcggttagaagcttgttgcagcagacattttccgattttgaattgatactggtgaacgacgcgtcttctgacaatagcgggaatattgccgaccgtctggcgcgggaagacacacgcatccgtgtgattcataaagaggtgaacgccggcagcagcctggcgagaaacaccggcctggaatatgtagtgggtcggtatgtgttctttatggatgcggacgacgttgttgacgataccctgttcgaccaaatcgtacgttctctggagaaaaatccggcgcaggctgtggtattcgggcttatagaagaatactacgatgccgaggatcgcctgcatcattgtgtgccggtctcttgtgggaaagaccaggtgttggatagccaggaagctttgcgccgggaggtcatttttctcgaggaaaagactttatatggttatgtctggaacaagtgttacgacacagcctatcttcgtaagtatcaggtgctgtttgaggtggcgccgctcaatgaggatttcctctttaatgtacaggctttcatggagatggaacgggtcaatctgctgagtagcacgccctatcattataaaaagcgaattgacggaagtcttaccaatcgcttcgtgccggcttattttgaactccattataaacgagtgcgtttattatacgaacaatatcaatattggggacttctggatgatcaagtccggcgaatcctggccaatatttatgtgcgttatatcttttctgcgttgcagagaaactgcgatcccagagcctctatgtcgcatgccgaccgtaagcgctttttagcggaactgtatgaacaaccgctttttaatgatttgatttctttctcccacggaagcagccggttagttcgccttatggccgcctggctgaaaaagcatcgcaccggcctttgcctcatggggggacgaggcatctatatcgtaaaaaataaactgccgatggttttcgccaaggctaaacaaagccgataggagcccttgttatgaatgtaaacttagcctttgccatcaagcgctgtatacggggaatattgcgtttgatgcgggtgtttcctgtcaaacacaaccgggtggtttttatcagttatgagggccagcgatatgcctgcaatccaaagtatgtgtcggaatatctccagtgtgcctatcccggagaatgggagattatttgggtactggatcacccagaacaatatcctgagttaaaagaacaaggcatacgtgtcgtgaaaaacgactctccagcttttatgaaagctgtgatgactgctggcgccatcgtatccaataacggtcttgccatgtactttcctcctttgcgtaaaaatcaatgtatggtgaacacctggcacggtggcggcgcttataagcgcgttcttagtgattggaaaaaagatcccatggaaaaaaaactgaatgccctcatggccgagcaaactcgttggtttatttccagttccaaacgtttcagcgccattatggccgaggctgcctccctatctccagaaaaaatgaaggaatggggaatgccccgtaacgatattttgtttgatcccccacagcaggttatccgtaaggttagacatacgtatggagtatctgacgactgtcgcattgttttgtatgcccccacttaccgaggcggcaccactacgtcagtggaggcggctactcagatggaaccgctccatgtagagacctgtctggtttcgctgaagaagcgttttggcggagaatggattttcttttatcgggatcattattttaatcagcaacatcatgaaccgcaagcaagcgtgatagacgtgtcggactatgacgatatgcaggagttgttatgtacagcagatatcctgataacggattactcttcctccatatgggattattccttcacccgccgcccttgcttcctgtatgcccccgataggcagcaatatcagtcagaacgggatttttacacgccaattgagcgttggcctgccctcctggcccagagcaatggagagctggcagagctcatcgagttgtttgacgagcaggactatgctcgccgtatacaggaacatcatgaagagctggagagttgcgagaccggttatgccgccaaaaccctgggagacaaactctaccaggagtgctttggtaagtagagaggagggggttgcatatgaatgtcgctaccatctttgcgggaggaacaggacaacgtatgaaaacggcagcctgtcctaaacagttcctcaaattatatggtaagccgattatcatatataccctggaggtttttcagcagcatcctgccattgatcacattattgtggcctgcgtttccggctgggaagaccgccttgagaaaatgtgtaccgattatgggattaccaagctgtataagattgtccaagggggaaaagatacccaggagtccaagctgaacgccttgtatggcttggctgatttgtgccaagacgatgacattgtgctaatgcacgatgccgtacgtcccatgattaccgcccagttaatttccgataatatcgaagcggtcaaaaaatatggttctgccattacagccgatccgtttaccgagaccggcgttgtcagtaccgatggcgtgacggtggaaagtaccattgagcgcagtaagctctatattgctaaagcgccccagagcttttattataaggatgtgctctgggctcatgaacaaggaaaatccatgccggacagcattacgattgacacctgtaccctgatgacggcgctcggaaaatccctgcattttgtccaatgcgattttgccaatatcaaaattacgcgtcctgatgattattacatttttaaggccctggtggatttgcgcgaaagcaaggagattctgggactgtaaaaaggagtacgccatgctggatttacatgcagttatcctggaggatctggagcatatcgtttcccaaccggtttcctgggacaagttgcaggggaaaacggtactcgtcaccggcgctagtgggatgatcgcatcctatttggtgtttacgctgctgtatttgaacgacacacgacatctgaatattcgagtgttggcgctcgtgcgtaatggcgaaaaagcgaagcagcagtttgggaatattcttgttcggtccgacattacgttgctgatacaggacgtatcccaagtactggattattcgggccctgtcgactatatcgtgcatgccgccagtcaggcaagtccccgttttttcactaccgatcccgttggtactattcaagcaaataccatgggtactgagaatatgctgcgaacagcgatggaacgaaaaagcgaaggttttctctatctgtccacccgagaaatatatggaaagtttgatgccgataagagttccatctccgaagaggagtacggcgttttggatcccacagtcgtgcggtcatgttatccagaaagcaagcgtatggcggaagctatatgccgcgcatacgcccaccagtatggtgttcctgtcagggtagcgcgcatagcacatacgtatggaccggactgggtaatggacaatggacgcgtgtggggcgattttatctccaatgttgtgcgcggtgagaatattgttttgaaaagtcagggaaccatggaattggcctttacgtatattagtgatatggtcgcggggctcttcctcgttttgttaaatggtaaagaattcgtatataatctctccactgataaatctactacggtgcgcaagttagcggagctgcttgccgaactttatccagaaaaaggaatacgtgtagttattgatattcccaaagacactagtgcttatctggcaaatccagtgccaaaattggactgttccagaattgtttcattagggtggaaacctactataactctgaaagcaggttttcaacgtaccattgcctatcaagaatcgacgcataaaggaggatagtataatgccagctatcagtgtaattatgccggtctacaattcggaaaactacttgcgcagtgccattgacagcgttttgaatcagacttttcgggatttcgagttaatccttattgacgacgggtcaaaagacggcagcggtgccatctgtgacgaatatggggataaagattcacgcgttgtggtggtacatcaagaaaataccggtctgtgcggcgcccgtaatcgcgggttgactatggctcaaggcgagtatttgactttcattgataatgacgatttgtatatgccgactctactggaggataattataagctggcggtaaaacaccatgcaggcatggttaaattcggtcgggttcgtgcggatgtatgcggagactcgctggaaaaggtgatttatgtcaccgcgccaaatttgtatgtctatcagggggaagaagtccggtcacagttttttcatatgcatggactacggatatttgactatgtgtgggatgggctctataaggcatcaataattagaaaatatgccctgcaatttgatgaatccatgcgttttggcagtgaagactctaaaatgacttaccaggtttatcaacatacctccaccttggtgatcaatccacaggcgtactatatatactttaaaagattgtcacatagtgtttcagcgcgctttgatcaaaatgtgattgattctctgcttattgtctctgatttgcaatatgatatctggcagtatgtatatccgaatgggctacagtattcagagaccatccctctagcgatgactgatcttattactttgttgcagcgggcattgctgcataagtcttgcccatattccttcgcggagaagaaacggcttctccgctcacttaaaaagcatcctgcctatgatttcccctggaataaaacaatttccaagcaggttcgtgcggtcagtaaaactaaatggctgatggcggctttgtatgcgcacgcgaattatggcttattaataagtttatccaaaatatatctgcgctttattcttgtgaaacaaagaaaaacgattcggtacaataaaattcgtttcgcagatgatttggaagtaataactcgttgaagtctgcgtgaaaactcggaggaattatggagaagtttttcgatttaagaacgtttttgatttttattcttaaaagagcaaaagtttttttactaattaccttgctgattaccgtggtgtgggcagggattcgtgctgttccgctatctatacaatatctcacttatcaggaaacacctgcggcagaaaatacggaggaaatttcaacgagcgatttgccttatcgctattcagaaacgaggcttttgtatattgaaaaggatggcaatatcgatcagacaaaaagtctgttgagtgtgtttaccaatttatccaataccaatgctgttatgaatcagcaaaaagagttgttttttgcgaaagccaaagaggttgatgcagaagatcggcagaaattatttaaaatgaagtaccggactaagcagattttcaattatccctttgattttcagacattcaagggctattacagtgtacaaactgatggaaacaatatggttagcatcaccgtaacgactgcggacaaaactctatctagcgatatgtgtaaagccttggaaaccgttctgattcagcaagtaacagatgtctgcggcgatttttcgtataaaactgttggaacacgttcgtatcaggcgttgccggagccggatgcaggcttgattcctcaaattgagacagcaaacacagaggtggtggccggttcccggcctagtctgtccggcatcttaaaaagtacgattaagggtgctatttgggggtttatggctggtgccatgatagctgtggttgttttgttttttatgcaggcggttagtattaaggtatgggaagaaaccgatctaaaggaagctggaatttcggttttgagtgtgtgtcgaacaactggaaaaaagcgccgccgaatgaaatggcttgataggttaattgatcgtctggaaggacgctgtgaggcggatatgaatgttgatttgtgtgcgaaaatggtgacacagactcttcaggctttggaatcttgccccaaaaatattcttatcgcaggtattgcagaccaaaaagcctgggatgaaatgactatccccttaagggcctgcctggaaaagcaaaacttcgcaatcgacctttcaaacgaagcattgaatcaaccggctgtcttggacaaaattggacaagcagatggcgtgatttttatggaagaagcgggacgttctaccaaattgtcaattcagcgcgaactggaaatatgcaatcaattaaaaacgcctgtgttgggtgcagttttgctgaaatgagccattggcctgaggcataataaccgggagaatataaccatgggaatatatgtggcgttgctgggagtgaccatgctgtttgcctggttttggaggtgtgcagaatgtcaactggcccaggaaatagagggggactttcgcgtaaacgcgaaacagcatcaaattcatttattaaaaagaaatttttggattgctatgacatttttcccattgtatatttttaatgcgggaatgtattatgtcggcaatgactatgtaaattatgtcaaggagtttgataagattagcaatggcggcttatctcaaatggatatcgcttatgtatggttgaacaaattggttattcatcttggtttaagctttcaatttgttttggtgtttttgtgtttggcagcctatattttgttttttatctgtattcataagtattctgagaactatcccattagctttttactttatttcattataggttatttttttctgctaaatcttaaccaaattcgtcaatggatggccttgatgctagtaatgctagcctatcagtacattgagaaaaaaagagtaatctcttacatggtattgattgctttcgccacgatgttccatttcacggcgattattatggttttgttctactttgttcttagcgctcgttataaattgagtgtttatattgtgctgatgctcattttggctccgtttaacctattctataatcagttgctgcggtttttgtttgctactttccgcccttcgtatattggttcggcctatatggacaaaacattgcaggttgatatgtttatgatagtagcaatgttttccgtcttaatgatgatcctgttttattacgatacgattgttgtcagtcgtattcaaacgattttcatgaatgctttctttgtggcactcttattgactattttttgcggctggattccagaagtcacgagatttacctattatttctatctgccgatgattttcttagttccaaatactctgctaaaggaaaagagacaaagtcagcgctttatttggctggtcgcaatagttggactgcatattttgcgcttgttgcgttcagcgggcggctggggcttggttccatacgatcacatttggctgcattaacaggaggcttgttttatatgaaaggcattattttagctggcggtgccggtacgcggctgtacccgtccaccatcgcctgttccaagcagattctgaccgtctatgacaagccgatgatttattacccgttgtccaccctgatgctcgcgggcatccgggaggttctgatcatttccacgccccgggatcttcccggctttcgggagctgttcggggatggttctcagctgggcatgcagttctcctatgccgtgcaggaaacgccccgcggcctggccgacgccttcatcgtgggggaatccttcatcggccgggataacgtctgcctaatattgggcgacaacattttctatggctacggcttcagcgaacgactgaaaaacgcctccgatcgtaaaaccggtgccaccatcttcggctaccatgtcagcaaccccaccgaattcggcgtggtggaattcgataaagactggaacgtgctgtccattgaggaaaaaccgcagaagccgaaatccagctatgcggttcccggcctgtatttttatgacaatcaggtggtcgagatcgccaagcaggtgcagccctccgctcgcggcgaaattgaaatcacagccgtcaataacgagtatctccgccgcggtcagctgaaggtggagctgttcggccgcggaatggcctggttggataccggcaatcatagggccatgctggccgccgccaactttgtggaagccattcagacacggcaaggcttgttcgtctcctgtatcgaagaaatcgcctaccgccagggattcatcagccgggagcagctcctcacccaggccgcgcggtttaaatcctctgagtacggccactatctgtttaaaattgcggaagccgagcaggcatgaagggagctgacaccatgaacatccttattaccggtgcgaatggccagctaggcaacgaactgacctccatgctgtcctccggccaggcggaaatcggtcccattccggccgcctatcggggcagccgggtgacggcggtggacgtggatcgcctggatatcaccgacagcgctgccgttcaggcttttatcgaggcggaaaaaccggaacttattatcaactgcgccgccatgaccaatgttaacggctgcgaatccgcgccggacacagccatgaagatcaacgccatagcgccaagatttctggccgccgccgcccaggaaatcggggccaagttggtgcatgtgtccaccgactatgtgtttgacggcgacggcgcccgcgccagcgacgactcgatcatcccctataccgagtgggacgtctgcagccccggcagcgtctacggaaaatccaaatggctgggagagcagtatgtccgggaggtctgtccccgtacctttgtggtacgcacggcctggctgtatgggtatgtgggcggcaactttgttaagaccatctggaaaaacggcgcgcaaaagggcgagctgaaagtggttgacgatcagatgggcaatcccaccaacgccaacgatctcgcgtatcatatcctgaagctggccctgaccgatacctatggcgtgtatcattgcaccggtaccggcgtctgctcctggtacgattttgcctgcgagatcatccgcctggcgggtgttccctgccgggtgacgccctgcaccaccgacgaatatcccaccccggccaaacgccccgcctattccgcgttggataacgccatgctgcgctgcacggtgggggatgagatgcgggaatggaaagcggccctggccgtctatgtggagaagctgaaaaaagcgggaggccctcaatgaaaacgtatttagtcaccggcggcgccggatttatcggttccaatttcgtgcagtatatgctgcaaaagtatgaggacgtccgtatcctgaacctggacaagctcacctatgcgggcaacctggagaacctggcctcggtcaaggacgatccccggtatacctttatccacgcggatatctgcgacaaagccgcggtggaaaaaatctttgccgaaaacgccatcgactatgtggtcaatttcgcggcggaaagccacgtggatcgcagcatccgggagcccgaggtgttcgtcaaaaccaacgtggaagggacagtgtgcctgctgaacgccgcccggaacgcttggaaccttggcggcgacgactataaggaaggctgcaagtatctgcaggtgtccaccgacgaggtatacggttcgctgggtgccgagggcttctttaccgagaccacgcccctgtgcccccacagcccctattccgccagcaaggccgcggccgatatgctggtgcaggcctacttcgataccttccgcttccccgtgaacatcacccgctgctccaacaattacggcccctatcagttccccgaaaaactgattccgctcattatccacaacaccctgcagcataaaagcctgccggtgtacggcgacgggatgaacgtccgggattggctgtatgtggaggatcactgcaaggccatcgatatggtgctgcgggacggcgtggtcggcgaggtgtacaatgtgggcggccataacgagcggcccaacatcaccattgtcaaaaccatcctggcctatgtccatgatcatgtggatgaggcggtgaacgaaaccctcatcacctatgtggaagatcgcaagggccacgaccgccgttatggcatcgatccccagaaaatcaaggacgccctgggctggtatcccgagaccaccttcgaggtgggcatcgagaagaccatccggtggtatctggacaaccccggctggatggcccatgtgaccagtggccagtatcaggaatactacgcccggatgtacggcggcaaataatcgcccgggtcggagataggaagcgcattatgggaaaattcacctttacccccaccggcatcgccggcatgatggtcgtggagcccaccctgttcggagacgcccgcggctattttatggaaacctataactacaacgaatttgcggccgccggcctggatatgacctttgtgcaggacaaccagtccaaatcaaagcggggcgtgctgcggggcctgcattttcaaacgaaaaactctcagggcaagctggttcgcgtcatccgcggcgaggtgttcgacgtgggggtggacttgcgggaaggcagcgccaccttcggccaatggtacggcctccttctgagcgaggagaaccacaagcagctctatattcccgagggctttgcccatggcttcctggtcaccagcgaggaagcggaattcgtctataaatgcacccgcttctacgacccctccggcgagggcggcctgctgtggaacgataaggatatcggcattgattggccggtgacggaggatatggacatcctgctgtcggataaggacaagattcagcccaccttccaggagtatctggcgcggcggggctgaggcaagcgtaacagtaaaaggggaaaggggcgcggcggatgaattccaaggccaaaagctttatcaagaatttttcctacacctttatggccaacgcggtgtcctttctcatttccgccgtgctggtgtttttcgttcccaaacggctgggcgtggaacagtatggctattggcagctgtataccctgtatacctcctatgtgggctttttccatctcggctggtgcgacggggtctatctccgatacggcgggcaggattatcacgagctggaaaagccggtgttcgtcacccagttctggatgctgacggcctttgaattcctcattacggccggcctcggcatttatggcttttgtatcgttccagaagcggagaagggcttcatcctggccatgatgggcgtgtgcgccctgctgctgattccccgcacctatctaggttttgtcctccagtttaccaaccgcattaaggaatacgccgccatcaccatgctggagcgcgtcatttactttgtgctggtaacggctctggtgctgggcggcgtccaggattaccgcctgctgctggcggcggatttgatcggcaaagccgtggggctggtggtggcggtctgccgctgccgggacatcgtgttcggccgcatggttccatttcgttcgggcttaagcgaagcggggaaaaacataaacgtcggcttcaagctgatgatcgccaacatcgcgagcctgctcatcgtgggcatcgtgcgcatgaccatcgaaaacaaatggggtgttgccacctttggcaaggtttccctgaccatgagcgtgtccaacctgctgatggtgtttatcagcgccgtcagcatcattctgtttcccaccctccgccgcaccagcgacgataagctggccggtatgtatgatttcatgcgcacctcgattatgacggtgctgctgggtctgctgattttttactatcccgccaagctgctcctcaccgcctggctgccgaaatacgccgaagccttgacctacatggcgctgatgttccccgtgtgcgtgttcgagagcaagacctccatgctggtcaatacctatatgaaaattctccgccgggaaaagtggatccttctcatcaacgcctgcaccgtggcgctgagcattcttatctccgggctgacggtcttcctgctagagaatttgaccctggcggtgctgtccatcgtcgtgctgcagaccttccgctgtattttcggcgagcttctgctctcccgcgatttggacatccgtgtgcgcaaggacatcgtcctggaggtcctgatgaccgctaccttcatcgccaccgcctggttcctgcgctcctggctgtgcaccattctgtatggggcggcgtatctggtgtatgtgctgatcaaacgccaggatatcgcccgcatgctgggccaggtaaaatccctgataaaacgctgatgacaggccgccttccgtggaatggcggcctgttttcatcgaaaggaggtgcggcgcattggaacgcgtcaagctgtcggttcatcgggtagtggactgggtgctgcgctgcggcgatatcgatagccgctatgtggacgcctccaccatgcagcagggggcggccgcccaccggaaaatccaaaaagccatgaccggcgactaccgcaaggaggtctccctctccctggaaaccgaggccggcggctttccgctccttttgcaggggcgggccgatggcgtgttcaccgctgaggacggactgctgactatcgacgagatcaaatccaccaccctgcccctggaaaagctggctgtccagcaggctcagcacctgggtcaggcgcaatgctacgcctatatgctccttcaaacgctggatgccccgccggaaacggtgggcgtccaactgacctattatcagctggaaaccgaggagctgcagcgccggcggtttgtcttcagccgggaggagatcgccgcctttttcgcggatctcctcctgcgctatggcgattggctgcgctttgagcatgagtggaaagtcctgcgggatgcctcgattgccgccgccgcctttcccttcccggcctaccgccggggccagcgggacttggccgccgcggcctaccgcaccatcgtcaaccgcaaaaagctgtatgttcaggcccccaccggcatcgggaagactctttccaccctgtttcccgccgtcaaagccgtgggggagggccggctggaaaagctcttttacctcaccgccaaaaccgtcacccgcaccgtggcggaggaggccgtcaccctcatggaaagccagggcctgcgcttcaaatccgtcaccctgcgggccaaggataaaatctgcttttgcgaggaaaccatctgcaaccccgacagctgcccctacgccaagggccactacgaccgggtcaacgacgcgctgatggacatgctcactcatcacgaccgcatcacccccgccgtggtggaggcctattgccggcagtaccgcctctgcccgcacgaaaccgccctggacgcggccctgtgggcggacttggttatcggggattataaccacgtgtttgatcccgccgcctatctccgccgctttttcgacggggacgaggagcataactacggctttctcatcgacgaagcccataacctggctgaccgggtgcgggatatgtattccgccgtcctgcgccgttccgccttttcccgcctggtgagacagctgccggataaaaccaaaaccgccgccgccctgcgcaaatccctgcgggccgtggccaaatacctagccgacgccggtaaggccttgggcgatgccgatgaagccgccaatcccgaaaaggacgcggcgataggggcgttggtgacgctgttttgctccgccgccgaggactggctggctgaggagcagaacaacagccacgaacggctgcgggacgtgctggagctctactttgaagccaccgccttccagggcatcgccgagctgtacgacgagcatttcaccaccctgacggaaaccggggagggggatgtcatccggacgctcttctgtctggatccctccgccatcatcgccgggcggctgaagctggccaaggcgtccgtcctcttttccgccaccctcaccccgctgccttattaccgggagctgctgggcggggacgagaccgatcccctgctgtccctgccctccccctttgaggaggagcgcctgctcctggtggcccatggcggcatttccaccaaatacaaggatcgcgccgccagctatgcccccatcgcggaggccatcgctgcggttatcgcccggaaaacgggcaactatctgatcttcttcccttcctatgactatatgcggcaggtgcacgagcgctttacggccctgtgccccggggtggacgctcccatgcaggacagccatatggacgaggaggaacgggccgactttctcgcccggttcgacgcggagaatgccgataccctggccgggttctgcgtgctgggcggcctgttctccgagggtatcgacctgaagggcgaccggctgatcggcaccgtcatcgtgggggtgggcctgcccggcctgtctctgaggcagaatgagatccgggaatattttaatcgaaaaaacggtcggggctacgattacgcctacgtctaccccggcatgaataaggtgctgcaagccgccggccgggtcatccggtcggcggacgacgcgggggtggccgtcctcatcgacagccggtttcacaccgccgcctaccgggccctgttcccgccccattggtcgcagatgcggcgcgtccgggacacggcatccctgcgccggctcctcgccgcctttccctacttttcggcagagcccgaacagcccccctcaggcgaatagcggggcgcgatcacacagcttttcattcggaaagaaggagatgacttatgagcagaaccgtgcaggccgaactgaccactatggtgatggtgcgccgccgcgataccggcgaggtgctggtgcagcagcgggccaaaagttggaaggggatcgccttccccggcggccatgcggagccgggggagagtcttctcgcctgcgccgtccgggagatttacgaggaaaccggcttgcgtgtcagcgctctgcagtcctgcgggctggtggattggtgctgccgcgccaccggcgatcgctatctggtcttcctctaccggacgcaaacctttgccggcgaccttttggacgaaacggaggagggccgggtgttctggacggatccggcttctttgcacaccctgcccctggcggagaatttcgagcggtattggcccctgttcttttctcccggcgagctgtttgcccagtggggtgagggggagccggacgacttccaggtgtatccggataaggaggcggccgtatgttgatcgccgccgccaagctgactctgcgcgccccctgggtgcgctcgctcaaagagaaacggatgattgtccagagcctgatcgcccgcgtgtcgcagaagttccatgtctccgccgccgaggtggagcagcaggatgtccaccagaccatcgtcgtcggcgtggccgctgtggtgggatccgccgccctgggcgacgccgtgctggacaagatcctccgcttcgtggaggaaacctgcgaggctgagctgaccggggtggagcgggagatccgataagaaaaggcccgcggccgtccggaacggcaggccagggggagaagcctgctgttccgggacgcggctgcgggcccggtctatgcggttttaggtactccttccggtttaacggcaggaggaaatgggcctggaccagccggtggccgcggggcgcagcacatcgcaggtacagggcgcggaagcggaagccgggcgcacgcagtcgcagccgcggttttcgcgggcttcggcgcgggccgccgccatctcttcgcagcggcgccgttcggcctcccgggcggcgcgctcctcgctctcccggccgcgggcggaagctccgcagcagtcgcagcagcaacagcatttgcagccgcgctcgccggaggggcgctcgcggtcgccttggttgccgcggcaccggccgcagccgcggttgcagccgcgctcgctcgcgagaagcagggcggtggcggatacgggatcaaaacacatcgttatcacctcctacagtacaagctatgcgaacaagccccggagggttccgcccacttgcgcatttcgcgccgatcgggtacaatagccaaaaaagaaaggacgtgccgcgatgaaatcctaccgcaaggagctgcattttcatctgcccgcccgccgtggcctggtcaatatcacttcccaggtccgccaggccctggaggagagcgggattcaagaggggctgctgctggtcaatgccatgaacattacggcaagcgtgttcatcaatgacgatgaaagcggtctgcaccacgactatgaggtctggctggaaaagctggctcccgaaaagccatacagccagtaccggcataacggctttgaggacaatgccgacgcccatctgaagcggacgatcatgggccgggaggtggtggtggccgtcaccggcggccgcctggacttcggcacctgggagcagattttctattttgagttcgacggcaaacgggataagcgggcgcttatcaaaatcatcggcgaataaggaggaaccatgagcgtattgtttttggaatacccgccctgctccacctgtcagaaggcgaagcggtggctggaggacaacggggtggcctatacctcccggcatatcaagacggataaccccacaaaggaggagctgaccgcgtggatcgcccgcagcggcctgccgatcaagcgctttttcaataccagcggcctggtatataaggccatgggccttaaggataagctgccggccatgagcgaggaggagcagctttccctgctcgcctccgacggtatgctggtcaaacgtcccctggcggtgaccgaggagcgggtcatccccggctttcggccggcagaatgggaagcgctgaaaaaataattttattttttcgaaaaaaggcttgcattttgtcaaaacatcgtgtatactcttatctcgttggtgccgatggcggtgggggtacacccgttcccatcccgaacacggcagttaagcccacttgcgctgaaaatacttggctggaagcggcccgggaaaataagcaggtgccaacatcaaaaccgcagcacgaacgtgccgcggtttttttgtgcccggcctgggccggtgtggccaaaccgccctacgcgatccttaactcttcctgaattttccccctggcctcttgggcggtccgcgccgctgtgctatactggatgtatcacccgcgcccaaggaggactgtctcatgagccgaacccgtcaaataactgaacggcaccaccgcccccgccggcagtgggggcggctgccccggattcttctgggtgtcttttttgccctcctgctgcttgtttccctgctgcccctggcgggccgcgtcatcaatattggggtggtcgctcccgccgcggccagcgctctgggcctggccgcctgtgtttggacgccctttttccggcgcatactccaatatatctggcaacgaaaggggctgcgggttattttgatcgttctgatggcgctggtcgccatcttgcttgtctggttcatcgtggtgtccgtgatgatgctgcggggcgcggcccgtcccgccccgaaaaacgccaccgtcatcgtcctgggcgccgccgtttatggggaaaccccctgcctgatgctgacgcagcggctggacgccgccgcccgttacctggatgccaatccggacgccgcctgtatcctctccggcggccaggggcccggcgaggatatttccgaggcggaggccatgaagcggtatctgctggagaagggcgtggacgaaagccgtctgtatatggaggacaaatccaccaatacctttgaaaatattcagttctccaagaggatcctggaggagcatcggctcagccccaccgtggtcatcgccacccaggaatttcatcagtaccgcgcccaggcctttgcccggagggcggggctgaccgacgcaggcccctgcacctgccatacgccgccctatctgctgctgtgctactgggtgcgggagttcgccgccatcagccgcatgctgctcttgggttactaatcagaaaatatcaacggcgccgcgtgttccaaagtcacgcggcgccgtattttttctccatattctgccaatacttggatatcggtataaaaaaacaaaaaaaatcgccaaattgcaactttgcaattgacaatccaattcctatgatgtattatagtatactgcataatcatggggagatatgcctgggaatagatttagtatagcacaacatgcgacaattggcaagtatctgctggcaagtttttagatatttgttccctttgtccgccgggctattccacccgccgtgatttttccccggaacaggcggccggcctcctgccgggccggcgtgaatacaaagaacaggagtgatcgagcctatggcgaatatcaaaccggtaaagctgggcaacaatgttcgcatgagcttcgcaaaaatcaatgaggtgctggatatgcccaacctcatcgaggtgcagaagaactcatatcaatggtttctggaggagggcctccgggacgttttcaacgacgtgtcctccattaccgactataccgggaacctggttttggaattcatcgattaccgcctggacgaggaacccaaatacaccgtggagcagtgcaaggagcgggacgtcacctacgccgcccctctgcgggtgcgcgcccgcctgctcaataaggaaaccggcgaaatcaaggaatccgaagtgtttatgggcgatttccccctgatgacggaaagcggcacctttgtcatcaacggcgcggagcgggtcatcgtctctcagctggtgcgttcgcccggcgtgtacttcggcatgaattacgacaccaccggcaagaagctgttcaacgccaccgtcatccccaaccggggcgcctggctggaatatgaaaccgattcctccgatgtgttctatgtccgtatcgacaaaaaccgcaagctgcccatcaccgttttcgtgcgggccctgggcctgggatccgacgccgagctgctggatttcttcggcgacgacgagcggattcatgccaccatcgagaaggatatcaccaagaacaccgaggaagctctgctggaggtttaccgcaagctgcgccccggtgaaccgctgacggtggagaactcccagcagcacctggagagcctgtttttcgatccccgccggtacgacctgtcccgtgtgggccggtataagtacaacaaaaagttggggatttccaaccggctggccggctgccgtctgtcccgcccggtggtcaacccgaacaccggcgaggtcatgggcgagccgggcgagctcatcgatcgcgcccgcgccatggagatggaagacgccggcgtgacggtggcctatgtccaggtggacgatcacggcgagggccatgaggtcaagatcgtctccaacggcatggtggacattagcaaatacgtggatttcgacgtggcggagcttggcatccacgagcgggtgcgctattccgtgctgcgggaaatcctggatgcctgcgaaaccgacgaggagaagaaggagg

SEQ ID NO: 4220 - DNA, 32759 bp, Unknown
  16S sequences of unknown bacteria
tttttcaccaccaccattcattttcggggttgacttttaatagttaatctttccaaaaagccttctccgtggtaaaataaaaaaaagaccctgccatatacccatgggagctgcaccgttttcttttgttttgccggttttgctccccttgattgatatgattaggaataatgaaaggaggctccgcttttttgcggagaaagtcccatgaagaagattctgatgctcaccaccggcggcaccattgcctcccttccttcggaagagggcctggcccccaccggcgccgacaccattttgtcccatatgggcccttctgcggccaactacgacatcaccacccaggagatcctcactctggacagcaccaacatccagccggaggaatggaagatcattgccggagccatctatcaaaacatccgcctctatgacggcattgtggtcacccacggcaccgacaccatggcctacaccgcttccatgatgagcttcatgctgcggaatgtacccatcccggtggtgttcaccggctcccaggtgcccatcgccagccccctcagcgacgctcctctgaacctgacctgtgcctttgccatggcagccagcgccacccccggcatctttgtagcctttgaccggaagatcatgctgggctgccggtcggtgaaggtgcgtaccaccgcctttgacgcctttgaaagcgtcaattacccctatgccggggtggtggattcctccggcctgaatctggaccggtcggtgattccgccccagcggggagaatgcgtgctggaggacaccgtggattccgatgtgtacctgctgaagctgaccccgggcaccaatcccaagctggtggatctgatgatcgaagccggctgccatggcatcgtcatcgaagccttcggcatcggtggattgcagtttgtccgccgggactttgtctccaagatcgaaaaggccatcgacgccggtattccggtggtggtgtgcagccagtgcctctatgagcgctcggacttttcggtgtaccaggtgggtcagaaggccctggccaagggagccatccagggctttgacatgacgcgggaggccgccgtcaccaagctgatgtgggccctgggccatacccgggatctgggagagatccgggccatgttccacaccaatctggccggggaaatcgccctctgatcctttccaggtggggtgcacaatcttgcggcagaatttgttatttttctgtcaataatttttccctgtttttgtgtatttcgccgctgttttttcgaagtttcttgattctttcaagcattttttcgttccaggctgtttttgccttgttttttccggttggaatatcggtgccccaggatacttgtatacaggtatcccggtattttaaggggtaaaaaccgctatttttatcaactttgcatggttttccgcaactttttacattgcaacgcctgggcctttcgcatacaatgttaggtgtgggcctatggcggaacccgaaaggagatgacgccattgaaatttgccagcgatccctttatgtataccgaatattatgccccccgggggcgcaggcgcctgatggagctgggcaacaccatcaccagccagtatctttccccggaggaccactgcgtaggcattctgggagaggccggcagcggcaaatccctcatcgtgcggggaatgttccccggtcttcagctgaccaacgacgatgaggatgtgtacacccgtcctctgcctttgatggaccactttgaatccggccgcttccgggatcacacctatcacatggatgtgcgctttgaatcggctttcacccagccttaccgcctggccgaggctgtacgggcggccatcgacgccggacggctggtggtcatcgagcacttcgatctgctctatcccgccctgggccgcaatgcagagcttttggtgggcatcggagaagaggtcatcgtggcccggcccaatattttcggtcccaagcccaccgacatcgcccagaaggtgctgcgctccatccactaccggcggatggttcacaccgccgaagacattgtgtgccacattctggacatcgactacggcatccccacaagcagcctggttcacggggatgtgaagcggggcttcctgctggaatttgaggaaaagccctccttctctgtggaggaagtgcagaagcgggccaaagaattcatcgacgccaagctggatgtgtgctatctggatgagcaccatatccgcatcggggatgcccgtatttactgcaccggcccccgcatccacctgcgcaacaccggcgatattcagctgtttgccatggctcccgactttgtctatgacccggtgcgccggggctatatgctggtaggcgttgtggccaagcccgagcggctggacgatctttccgacatcaacaaattttaaataatatgaggtgtaatatgaaaactcttgtactgggcgtcatcggcgccgatgtccacgctgtgggcaacaagatcctggatcatgccttcaccgaggccggctacaaagtggtcaacctgggcgtgatggtttcccaggacgaattcatcaaggccgccatcgaaacaaatgctgacgccatcatggtctcttccctctatggccagggcgagctggactgccagggcatgcgggaaaagtgcatagaagccggcatcggcaacattcccctcttctgcggcggcaacctggttgtgggcaagcgggacttcaaggagaccgagaagatcttcaaggacatgggcttcaactatgtctatgcccccggcaccatgcccgatgtgaccatcgccgacctgcgccgggaactgggcgaataagagaggggtctttcctttgagttacgctctgtttaccgacatcggcagtaccttcaccaaggtgactgccgcggacctggaagcgtgccgcatcgtggggcgggccatgtcccccaccaccatttttgacgatgtgaacatcggcttccaaaaagccctggcccttctcacagagcaggtgggccatcccatggaatttgatttccgtctggcctgttcctctgccgccggcggcctgaaaatggtggcctgcggtctggtgcccgatctgaccagtgaagccgcccgtctggcttccctcagcgccggggccaaggtgctcaaggcctatgcttacaaaatgaccgataccgaagcccaggagctcacagagctgcagcccgatatcgtcatgctctccggcggcaccgacggcggcaacagcgaagtgatgctgcacaatgccaaggtactggccgattgtcccctttctttccccgtgatcatcgccggaaacaaaagcgccgccggggaagcggcccgcctcattgaagaagcgggcaaggaagcggtagtctgccccaatgtgatgcccgagttcggcaagctgaacatcgagcccgcccgggaagcggtgcgcaaggtttttctggagcgcatcgtggacgccaagggcctgcgggaactggccgaaaagatggacggggacatcatccccacgccggcttcggtgctggacgccatcacccttctctcccggggcacccgggacgaagagggcatcggcagtctgatggcctttgacatcggcggcgccaccaccgatgtgtattccgtcaccaacggctgcccggtctattccggcgccatgctgaaaggtctgccccatccggccgccaagcgttcggtggaaggggatctgggaatgcgctggaacgcccggaccatcgtggcccttcagggcgaagaactcttcgctgaggacgccggtgtgacggtggaagagctgcggcagacgctggatgtgttcgacaagaccccggatatcctgccccagaacgaagccatggaaaagatcgatgtggccctggccaagtcggctgccaagaatgcctgtgagcgccatgccggtcatctggaagtggtgttcacccctctgggcgagcggtatatgcagaccggcaaggacctgaccgatgtgaaatggctgatcggcaccggcggaccggtgatcgcctccaaggacccggccgccattctgtcggaggccagcttcagcgagcaggagcctctgtccctgcggccccggaaggccaagtgcctgctggacgccaaatacatcctgtcggccatgggacttctgtcccagaagctgcccgatgtggctttgaaaatcatgaaaaacgaattgatcgaaatataaagcgaggatgagaagatgagcgatacattgaacaagatgtcaatggacgaattccgccgccagcagaaagaagttctggcatcctggcccaccggcaaggatgtcaacttccaggaagcggtggactaccacaagtctctgcccgattccaaagtcttttccaagaagctggagcaggcccgcaaggacaaggtaaccctgatccagccccgtgccggtgtgcctctgatcgacaagcacatcgagctgatgcagtttttggagaaggaaggccatgccgacctgctgcccaccaccatcgacagctacacccgtcacaacctgtataacgactgccagaagggcatcgaggaatccattgcccatggcaaggccatgctcaacggcttcccggctgtcaaccacggcgtgatgaactgccgcaaggtcaccgagtctgtgggcgtgcccatgcagatccgccacggcactcctgacgcccgtctgctcaccgaaattgcctatgccggcggctttacctcctatgaaggcggcggcatctcctacaatgtgccttacgccaaggaccgcactctggaggagaccatccgctactggaagtacaccgaccgcctcaccggcctgtatgaagaagccggcgtgcagatcgaccgcgagccctatggccccctcaccggcaccctggtgcccccctgcatctcccatgccgtagccgttctggaagcgctgctggctgctgagcagggcgtcaagcacatctctgtgggctatggccagtgcggcaacctgtaccaggatatcggcgccatctacgctctggaagaagtgacccgcgaatatctggaccgcttcggcttcaccgatgtgagcatctctaccgtgttccatcagtggatgggcggcttccctcaggacgaggctcaggccttcgccgttatctcctggggcgctgccaccgctgttctggccggcgctaccaaggtgatcgtcaagtctcctcacgaggctttcggcatccccaccaaggaagccaacgccgccggtctgcgtgccacaaagcagctggctaacatgctttcctgccagaccatgaagaacggtcctcgggccatggctgaaaagcacatgatcatgaacgagacccgggccatcctgaacaagaccctggagctgggcggcaacgactttgaaaagtccgctgtggccgctttcgccgccggtgtcatcgatgtgcccttctcccccagtaaatataaccggggcgccgctctgcccgcccgcgacaacgaaggcgccgtccgcttcctcagcttcggcaacctgcccttcgacgacgacatcaagggcacccacatcgccaagctggaagagcgggccaagttcgagaagcgtcccgccaacttccagatggtcatcgatgatgtgtacgccatctccgaaggcaagctggttggccgtcccaagaacaaataactctgtttgtccgctctattttgtgaacatataacacacaaccgtttcgaaaggatgggattcccatgaaaatcgaaaaagtaatctgttccaaaggtcgcaccggcttctattttgacgaccagaaggccatcaaagccggcgcaaagaacgatggcgccgcctacatcggcgagcccatgacccccggcttcacctccatccgtatggctggcgaagccatcagcgtgcagctggttctctccgacggccagatcgccctgggcgattgcgctgcggtgcagtattccggtgctggcggacgcgatcccctgttcctggctgaggacttcatcccctacatccaggaagtggtggctccccacctgatcggccgtgagctcaccagcttcaaggagctggccggcgaaatcaacagcatgaccgatcccaaaaccggcaagcgcatccacaccgccatccgctatggcgtcacccaggctatcctggatgctgtggccaagtccaagcacaccatcatggccgaagtcatcgctgaggaatatggctgcaaggtctccgacaaggagctgcccatcttcacccagtccggcgacaaccgctatgagaacgccgacaagatgatcctgaagggcgctcaggttctgcctcatgctctgatcaaccatgtggagaccaagctgggcaagaacggcgagaagctgctggagtatgtgaagtggctccatgaccgcatcatcgccctgcgcaaggacgagagctatcagcctgtgctgcacatcgatgtgtacggcaccatgggcatcgccttcaacaacgatctggagaagatcgccgattacatgaagaccctgtgcgacgctgccgctcccttccacctgcgcatcgaaggccccgtggatgtgggcgaccgcacaaagcagatggaagctctgcgggatctcactgcgatctgcgataagaagaacatccccgtggagatcgtggccgacgagtggtgcaacactctggaggacatcatctacttcgccgacaacaaggccggccatatgatccagatcaagacccccgacctgggcggcatgaacgacatcgccgaagctgtgctctactgcaagaagaagggcatcggcgcttatcagggcggtacctgcaacgagaccgaccggagcgctcaggtgtgtgtccaggtggccatggctacccagcctgaccagatcctggcgaagcccggcatgggcgtggacgaaggctacatgatcgtttacaacgagatgcagcgcgttctggcctatgaagaggctatgaagaaataagtaagatccttccttttataaaagccccgcaagaccatttggtcttgcggggctttttgcgtatttatttataaaatcaaatctcatgagcggtctggaaccgctttttgcagaactggacgaattttttctccctggcgttgagggtataggacttggagcgcataaggcacacatccagggtatcggaaaatccggtgatgggcagggtgacgcaatcggataattcccgctgctgctggggatcgtacatgaccaccgccatataattgtccttgcgcaccgcatccaacaggccgccgcgatcaaagatatagagcacattggcactggccgggatgcccagcattcccagccaatcctcgtattcgaagttctcataggtgacaagcctgcgggtgggcagatcttccagccggatatcccgccgggaagaaaggggattctgccgggagagcagcgccaccgcgggaatgccttcgcacaaaggctccaccaccatattgtatcgggccgcatagcgggcgtgatactcccgcctgctttggaagcagtaaaagatgcacagccggtattgctgcgcaatggcatcccggatggtctggatcaggccagtttccttgaaagcgtcctggacccctggggccgggtgggattttttgaagaggatgaagctctgcatcagcaaggtggaataggtgcaggacaccgacagattccgttggctggaaaactgctcaggcacccgatagatcttctcggcctccgccaaaatctttttggccgattccaaaaacaacttcccttcctccgtcagctcaatgccggaatttttccgccggaacagctgataatgcagctcttcctccaggcttttcaccgagccgctgagactggactgggagatatacaggttctgggccgccttgttgatggatccacagcgacagatctccaccacatagctgagatgcttgatgttcatgttcttcacctcctctgcttgcattatattatatcacaagttttcgctattttttggactttttttggttgttttttctatatttccgatatgttatcgtcttttcctataaccacaatgttttcaccgtgctacaatctacccatagaaagcgtcgatgctgcataaaagatttattgatactgcactttcaggaggtatggatatgtctactgtgaaacaacccgccagcgctctttcttctccccgcttctgcaacaccggaacctttatgcgcatgagcaaagtggattccgctcaaggattggacttcgtcatcgccggcgctccctttgacaccgccagttctttccgttccggttcccgcttcggcccccaggccatccgggccatttccgccatgatgaagcccaacaatgtgatcttgcaggtgaatatcatggaatccctcaagggcggcgatatcggtgatttcaatatcacccctggctatatccatccttcctataaggccatcgaggaaggcgtcgtcggcattttgcaggaaaacgccattcccatcgttctgggcggcgaccactccatcaccctggctgagctgcgggcggtagccaaaaagcacggcccggtggctctggttcacttcgactcccactccgacctgtgcgacgaagtcttcggcgaaaaatacaaccacggcactcccttccgccgggccattgaggaagggctcattgacccctcccattccattcagatcggcatgcgcggctccttgtatgaccccaatgagcacaaaatggctgccgaactgggaatgctgctgatccccgctcacaaggtgcgggagatgggcaccgatgagctgatccgcaccgctctggagcgggtgggcgacaagccttgcttcctcacctttgacatcgactttgtggatccggcctatgcccccggcaccggtacccccgaagtgggcggctttacctctttcgaaaccctggatatgctccgcaagctgaaagagctgaactacatcggctttgatgtggtggaagtgctcccggcttatgaccacggggagatcacttcctacatggcggccaacattgtctttgagttcctgtccgttctggccgcaaagaaaaaatagccgcctgtccacagaaactaccccataaggaggtctcttctatggccaaaacagctcccgaaaccatcaagctgagtcctgacctctcgtcccaggagctggatcagatcactttgagcaaatcccagttcactaaaggattgatccgctttatcctgtgtactgccgttgcaatttttgtctttttcaccaatctgaccatcggcggtgaatcccagatcgttttcggatggatctacaatttctttgtggatctgctgggcaatgcaggctactggattctgaccattatcattggcggaaatttcctgcttcatgtgtattcccgctatatcgataagggaaaacgacagaaaaagctctatgagcactaccggaaagaaggcattgcccaaaccttcctctatggcctgggcacggtgtacaccgtgatctacactctgcacaccaccacctcctttgttggcccggagattatcgttggcgccgctaccggcgaaagcgtcttcccgcccattgtgctgggcgtgctgttcatcattttggtgggcgccttctttatgcccttcctgctgaactatggagccattgagtttgtcggcgctttgctggagccgctgatgcgcccgctgttcaagatccccggcaaagccgcattggatgccaccgcctcctttgtcagctcttcttccctggcggtcatcatcaccagccgtctttaccggcaaaaggtctataccaagcgggaagctgtggcggtggctacctgcttcagcgctgtgagcatcggctttgcctatctggtcatcagcacagctggcgtggctcagcatttcaccgccatttacctgatcagctttatcaccgcttttatcatctcggccattgtggtgcgcattcctcccatcagccgcaagcctgatgtatattacgatgagacgccccaaaccgaagaagagcggaaagccgacgcccattttgacaaggacatcctgcgccgcggcggaagccgggctgtcaaacgggctttcgttgcaaaccctgtgcccaaagacatcgtcatcagcctgaaagaagggctgcaggtgatgccccaggttctgactatgctggccgccatcggtgtttcggccatgattctggcggaatacaccccgcttttccagtggatcggtctggtgttccagcctctgcttcagcttctgcaagtgcccgacgctgcggccattgccccctccattccagtgggcattgccgaaatgttcctgccggtgctgctgatctcggaaaatgtggccgccctctcggaatcggcccggttctttttgtgcatcgtttccatggtgcagatcatcttcttctcggagaccggcaccgtgatgctggccacaaagctcccagtgaagctccatgagctgatcatctgcttcattgagcggacccttatcgccattcctctggcggcgctggccatgcatctgttcttttaactaaaagaaaaaacggacggcaatgccgtccgttttttgctgtgctcagcgtcttttcaaatagccatccatggcttttttcaccatatcggcccactgaggacaggcctttctgaaatactccaggcactgatccgaaatcacagcaggtgtctgcgccagctctacggcaatattgtccaccagatgctcctgctccaaccggctcatgccccggaaacgctccccggcctgggtaaagtcgtcggcctgatacaaaggagaacggatctgatttccccgggaatactgggcggtatagggcggacaggaagctttctgctgaggcccgcagcccaaagcaccgctatggggatagtaattcaccgttcctttccggaaggcggtgcgcatcatgccgtcctgctggtaattgttggccggtgtgcggggccggttgatgggaagttcggtgtagttgggccccatccgatagcgctgggcatccccataggagaacacccgcccggtgagcattttatcatcggaaaactcgataccaggcaccagattggctgggcagaaggccgactgctccacctgggcaaactcattttcaaagttccggttgagcaccaactgccctactttatgcagggggaaacgctcttccggccacagcttggtgtcgtccagaggatcaaaatcctgcatggtggcctggcagatgggcatcagctgcaccgccagatcccaggacaccgtttgcccgctttccaatgtgcgatacaggtcggttttggccacatcaggctccaccccggccaggcgggccgcttcgtgacggtccaccgtctctttcccctggtgggaacggaagtggtatttcacatagaaccgctctccctggctgttgacccacacataagtattgacgccgaatccatccatcttccggaaagagggaatggtgccctcatcggaatacagatatgtgatcatattggtgcattccggcatctggctgtaaaagtcccagaaacgggtgttatctttcacgccggtatcgggtgcaggcttgagggaatggagcaaatcggggaatttcatggcatcgcggataaagaatacggggaaattcagacctacgatatccagattcccttcctcggtataaaacttcacagcaaatccacgggggtcccgcagggtatcggcgctgcctttgtggcccgccacggtggaaaaccggacgaataccggcgtcaccttgcccggctgggagaagagaccggccttggtgtaccgggccatggagcaagtggtctggaaataaccgaaggccccggtgccattggcatgcaccacccgctcgggaatgcgttctctgtcaaaatgagccatcttttccagataataggcgtccttcatcagcatgggaccattgcatcccacggtgagggaatggttgtcattctgggccagagttccctggttgtcggtgatgcagccattttgtcggcaggcctggggagtcggccgctggggcaatggggtgtaatgctgcatcttctggcactcttccggggtcattggctggccgcaaggcgggcaagggctgggatgacagggcggacagggatgctccgggcattccgggcattccggcaccaccggttcttccggtgcttccggctcggagggacactccggacattccggacattccgggcattccggcaccaccggttcttccggcgcttccggctcagagggacactccgggcattccgggcactccggcaccactggttcttccggcgcttccggctcagaggggcactccggacattccgggcactccggcaccaccggttcttccggtgcttccggctcctccggaagcacaggatattctggcacttccggcacagtgggttcctgtggagccatgggatcggaggggccggtttcttcctgccactgctcccgccggggcatgggctgctgccaggccccggtatgccaggcctgctgctgccgcccctgattgtcctggaaaggtcttcccactctgaccggcggataatagctatgccccggccgtgggcagaccggctcatttccccgccatgtaccctgggggcactgtccccgggcagggccgcgattgggaaacatccggtcatagggcattttctgtcgcatgatcatacctcgcttttttgatgattccccgccgatactctgccggcaggggtcattccagtctatgccgctgcctttccacttgcgccccaggaaaagataagatacaatacaaaacaagcacatcatccatgggagatcctgttttcttgtgattttcccgccgcctgttctttggaggttttctatgctgttttctcagattccccggatttctcttttaacagagcccacacttttggaaaaaaccgcccattttggcgataccatcggccattcctctctttggatcaaacgggaggatgtaatgggcctgggaatggggggcaacaaagtccgctctctggaattctggctgggcgaggccctggaaaagggctgtgatatcgttctggccgctgggcttcccccttccaacctgtgccgtctcaccgcagccgcctgctgccgtctgaacctggactgtgaaatcatccacaatgccgctccatccaacaccaaaccccgccggggcgacagccggtttctctatgatctgatgggagtacgccagatctattgcggtccggtggacgagcaggcccgtaaggcctttgtagaagaacgggcccaggaactgaaggaccaaggccgcaatccctatatcctgggagatccggtagtgggagcgctgggctatgtggcagccgcccaggagctgcttttccaggccgaacagaaacacatcgacttgcgtcatgtgttcatcagtgcttccgccgggcctacggaaatcggactgctcttcggtcttcgtctcatgggtgggccagatcttcatgtccatctggtttcggtggaatatcccgcccacactttctggcccatcgcccaggagatctggcagggcctttgccaaaagctccatgtgactcctcccctgtctttgcagtacaacacccatttttatgaggaatatctggggccgggctatgccaaacactccccggaaacctggctggctctgcggcttctggcccgcaccgaggggattttcctggacaccacctataatgccaaagtgttcgccgggctcaccgatctgtgtcaaaaagggcgtctgcccaccgatgaagctgctgtgattttccacaccggcggtgtccccactttgctgatgagggaagaatgaagaacaatacaaaaagcggacaggaactcctgtccgcttttgtgttatagggtcgatttacttgttcaggttgaaccaggcattcagaccgggataataggcgatatcctccagctcctcttcgatgcgcagcagctggttgtacttggccacccggtcggtacggctgggagcaccggtcttgatctgaccggcgttgagagccacagccaggtcggcgatggtggtgtcctcggtctcgccggagcgatgggaaatgacggcagtgtaaccggcccggtttgccatctggatggcttccagggtctcggtgagggtaccaatctggttgaccttgatgaggatggcgttggccacgcccatcttgatgcccttggccagacgctgggtgttggtgacgaacaggtcgtcgcccaccagctggatcttgtcgcccagagcctgagtcagcatcttccagccttcccagtcctcttcgcccatgccgtcctcgatggagatgatgggatacttctccacgaagttcttccacatacgcaccatctgctgacgggtcatcttcttgccagccttgggcagcaggtaataaccgccgtcctcttccttataccactcggacacagcggggtccatggcgatcatgaagtccttgcccggctcgaaaccggccttctcgatggcttccacgatgaccttcagtgcgtcctcgtccttcttcaggttgggagcaaagccgccttcatcgcccacagcggtggccaggcccataccctggagcaccttcttcagggtgtggaacacttcggcgcaccaacgcagaccctcggcaaaggtgccggcgcccacaggcataaccatgaattcctgaatatccacattgttggtagcatgagcgccgccgttgaggatgttcatcatgggcacaggcagagtcttggcgttgcagccgcccacatagttatacagagtcatgcccagagcttcgctggcgcacttggcgcaggccagggaagcacccaggatggcgttggcgcccaggcgggacttgttggccgtgccgtccagctcgatgagcatcttgtcgataaggggctgatccagcacattctggcccatcaggcactcagcgatctcggtgttgacagcggccacagccttggtgacgcctttgcccatatagcggctcttgtcctcatcccgcagctcgcaggcttcaaaaatgccggtggaggcgccggagggcacagcggcccggcccatgaacagcttgttctgctcagcgtccatggcatatacttctacttccacggtggggttgccgcggctgtccagcacttcgcggcccaccacatcggtgatctcaatgtactttttcatcggtgttttcctcttttctttgatattcgttctgtgttcaccaggatattgtatcctctttttccctccccgtcaatcgccgaaggggagaaagaaggggttcccagagtaaaattcgggaaaaaccttggccccgcagcctatgcttctgtcagcaggctctcgccggtcatttccccgggcttttccagccccaacatggagagcaaagtgggggcgatgtcgcacaggcggccgccctctttcagcccggccttcttgcccaccagaatcagaggcacctcattggtggtgtgggccgtgaagggagtgccgtcggggcagaccatctgctcggcattgccgtggtcggctgtgaccagggctgcgccgcccatcttttccaaggaagccagcacccgccccaggcaggtatccaccgcttccaccgcctggatggcggccgggagcacgccggtgtgacccaccatatcgcagttggcaaagttcaaaacgatcagatcatattttccgctttcgatgcggctgcacaccgcatcggtgacctcataggcactcatttccggcttcatatcaaaagtagccaccttgggggactcgatgagcacccggtcttccccgggaaatacccgttcctccccaccattgaagaagaaggtgacatgggcatatttctcggtttcggcaatgcgcagctgggtcatgcccgcctcactgaccacctggcccaggatgttctccagcacctggggcttgaaggccacctgcactccgggcatggcggcgtcatactgggtgaagcacacataatagggagccaccagtccgccttcccgcacaaagccgtcaaactccggatcggtgagggtgcgggtgatctctctggcccggtcagggcggaagttgtagaaaatcacactgtcacggtggctgatcccggcgtctttgcagcagaccaccggcttcatgaactcgtcggtctctccctgctcatagctcttttccactgcctgaacaggatcggcaaagaaggggcctttccccagcaccatggcctcataggccggctggacccgatcccagtgccggtctctgtccatcacatagtaccggccgctgatggtggcgatctgacccacgccgattttctccatctcttcctggagggccttcacataggaaaggccggaagaggggggcacatcccgcccatccaggaagcagtggacataaaccttttccacctgctggcgcttgcacagttccagcaaagcatacagatgggtgatgtggctgtgaacaccgccatcggacaaaagacccatcaggtgcacgctgccgccctgctccttggccttctggcaagcgctcaccagttccggattctcaaaaaaggtgccgtcctggatctcctttgtgatccgggtcagttcctgatagaccacgcgtcctgcgccgatgttggtgtggcccacttcgctgttgcccatctggccatcgggcaggcccacatccaaaccggagcagcgaatgggctgccagggacattctgccatcagccggtccatcaccggagtgctggcctggcagacggcattgcaatttccctttgcggccagtccgtagccgtccaaaataatcaatgcaatcggttttttcatcattctatttccttcccaaaggccattactggttggcgctttccatcacatccacaaacttctcccaatccagagaagcgccgccgatcaggccgccgtccacatcgggcatggccagcagttctccggcgttctgggggttcatgctgcccccatagaggatggtcaccgaccgggcatggcgggcgccatagatctcccggatgcattcccggatggcccggcccacttcgtcagcctgttccgctgtggcggtcttgccggtgccgatggcccagatgggctcataggccaccacgatcttcttcacatccttggggtccaccccgaagaaaatggttttgatctgcatccgcacatgatccagagtcaggttcttttcccgctgggccatggactcgcccacgcatacaatggggcgcaggccgcagctgagagcggccttcaccttctgggccacgatttcatcggtctcaccgaaatactgacggcgctccgaatggccgatgaccacatacttgactcccaaagagcagagcatgggcccggacacttctccggtataagcgccgctttcggcatggtgcatattctgggccgcaataaagacccgggtattcttggcggccttcaccgccgcaggcaaatcgatataaggcacgcacagcacggtctcgcaccacttggcccgggccgcatgaggcttgagctgagcgatgaattcttttgtttctgccggagttttgttcatcttccagtttccggcaataatggttttgcggtatcttctgttcatagatttcctcttttttgtttctcttccctttttctatcccgggcctttttattcatcagaatccatcaggcaggcaatgcccggcagctccttgccctcgatgagctccagggaagcgccgccgccggtggagatgtgggtcacccgatcggagaagcccagctgctcaatggccgcggcactgtcgccgccgccgatgatggacacggctcccgactcggccacggcccgggcgatctcccgggtgctgccagcaaacttgtcaaattcgaacacgcccaaaggcccgttccatactacggttcctgcatctttcaaataacgcttgaatttctcaatggtgcgggggcccatatccatgccgcccataccgtcgggcatatggcgggcatccaccacataggcgtcggcatcgggggagaattccttggtcaccaccacatcgtcaggcagcaccaggcgcacattgccctccaacgcacgcatgaggatatcggcggccacatccagcttgtccagctcacagggggagttgcccacctcgccgctgagcgcacgcaggaaggtgtagctcatggcgccgccgatgatgacggtgtcgcactggtcgataagggcgttgatgacgccgatcttgtcagagaccttggcgccgccggtgatggccacaaaggggcgggccgggttggtgagggccttgccgatcaccgaaatttccttctcaatcaaaaaaccgcagacggcggggagataagccgccacgccggcggtggagctgtgagctctgtgggaggtgccgaaagcgtcattcacatacacatcggcataggaagccagcttctgggaaaaagccggatcgttcttttcctcttccttatggaaacggacattttccagcatgacgatctcaccgggctggatggcggcgcacaagcggtcggcatcctccccgatcacatcgttggccagagtcaccggcattttcagcagctcggacaggcggttggccaccggcttcagggtgtacttggggttatactggcccttggggcgccccaaatgggatacgacgatgacagcggcaccgctggtgatcagatagcgcagggtgggcagagccccctggatgcgtctttcatcggtcagatgcccattctcgtcaatgggggtgttgaaatcgcagcggatcaacacttttttgccgcgcacatcgatatcgcgcacggtctttttgttgaagttcatcacgataatccctcttctccggcaactctcaccatattttgtctctcttctgccgcagctgccgggtgcggcgaaggccccagccaaaaagagaagaacccccaaagcgcaaaaaggccggtgtgctcttctctcttctgttttcctatccattgtacggtattttccccggaagtgcaagcgctttgcgccattttccccagggaaaacccggcatccctctatgttttccccggattccgcaacttttcggccctttgactttactgaaactctaccccggcgctttgctgctcgtccagggtgagggaaaaggccggggcaaaatgggacataaaatagtcggcggccggaagggacagggactgaatggagcggtacaactgccgggccgcgctttcaaactcgtcattgccgctctttttctcctggatgcatttgagataggcggagatcttgtccgccgccttcacatagcggtaaagctccggatcctgctcctcgcagaagaaaatgggccggtaagtctggcgcagggcatcgggtaaaaagcccagaagactttctctggcccggtcctcaatggcccggtaggcctggcgcagcgccggatcgttgtgcttcaccggtgtgggcagatccccggtgagaatctcggaagcgtcgtggaacagggccatggtggccacccgttccggctgggcaccgccccccaggtaggtattctggatcactgccagagcgtgggcgattaccgccgtttccaaagcgtgctcactgaggttttccgggatgctgctgcgcatcagcccccagcgctggatgtatttcatccgcagcaaaagggcatagaagctgtattccttcaccatgctccccctttacaaaaacaggcagatgatcactgtggcaatgccggccaccccgatgctgatgccgctcatggccccttccagctcacccatttccagggccttggtggtgccgatggcatgactgcaagtgccgatggccacgcccttttccaccggttccttcactcgcagcagcttcaccagcaaaggcgctgtaatggcccccagaataccggtgaagatcaccgccgccacagtgaaggcaggcacgccccctccctgagccgaaagctccatggcgatgggggtggtcaccgatttgggaatgagggaggccgtcatggtctcgtccaggccgaagagacggcagagggcaatgacgctgatgaccgaagcgcaggagcccataaagcagccggccaccaccggaagcaagtgccgcttcagctgtttgatctgtccatagaccgaaagggccagacaggccgtagcgggagccaggaaaatggcgatcacatcgccgcccttctgataccattccaggggaatgtgaaagattttgatgacggcgatgatcagcgccaccgcaatgagcagcggattgcacagaggcgagccggtttttttgttgaaaaacaaccccacctgaaaggcaaacaccgacagaacaatgccgaacaaaggagattgcaatacttctttcatgttattttcctccttttttctgcaaagccatcatggcccgcaccgtcatggccgagacaaaaaaagtgatgaaggtggtgagcacacacacggccagaaaaggcagcagattggctttcaactggtcaaaattctccaagatccccaccccggcaggaatgaagaagaacgccatatttttcagcagaaaataccccttctggcggatatgatggggttttatcacttttgcgcacaacaggacgaacaaaagcaccatggcgatgacgctggagggaaaggggaacggcaggacctgggccaccagttctcccacaagacacactcccagcaccacgccaatctgagtgagaattgccatagaacacctcgcgaaacaaaaatttgccgggaaagagattttcccgccagggggtactataccacaaaccccagcgggaaaaaagaccacagcggccttttcccagcaaatccccttctcttttccttcctccgtcagaaaagttgctccttcttcttttttcgtggtataatagccgcaagcggctattatactgattttgcggccgttttctcgtcccgcaagcgggacaaccgaaaacacggccaatataccatgttgcttcgcttcatggtataatatcaacagttgccgcacatgtgcggcaggatactgtgtattcagtcgttttgctcacaaaacgactgctgttgatgttacaccatagccaaaatcggcaaagccgattttacaccgcattggcggcgtgcaagtctgcatagacttgccgctatggtataataaccgcagaacagctatgataccgaataaactcgaccacagatttgaaatgccggaaggcagttattttttgttcttacttttagagaggatcggaaatcaacatgagctttttgcagtccatcaaaaaaatgttcaccggaccggaaaatcctgatgcatccccagagactcctcagccggagccagtggaggaaaaagtgacggaagaacccgctcccgaaccccctgctcccccggagagcacaccggaagcgccggccgaaaccacaccggacccgtttgcggccctcaaccagcaaaccccctatggggaggagatcatggaacagcgctcccgctattcccttctggtcacccagattcccaaagcctataacgccctgcgcagcagcggcgttttcgaaggcccggctgccgacgaatttctgcttttgtgcaaccaggccatctccctgcggcgggatatcctgccccagctggaaaagggagactggatcttcacccacggagaaggttacaaacgcctggccatggtgctggaaaaacggggtgacttccagggggccgcggagatgtgcctgctggccttgcgggacggcgccaccagcgatggctcccagagcggcatggccgggcggatggcccgtatgctgaaaaagggaaaaatcccccctaccccggaaatgaaaacctatttgggcaaggcctgatccctttcccgtacacaagcaaaggatgattccatgagaaaaatcaagctgtacgaatccgactccgccgaagtggaggcccagaggttttgggtctttgctgttttgatgggagtaggcggcttttttggcgcttttacctattccatccgcggcggggtgttctgcaatgcccagaccgccaacttcgttctctttgccatggctctggggcgggcccagtgggggcatgccctttattttctcatccccatgagcgcctatttcctgggggccgttttgtccgaggccgcttcctccaccatggaacagctgggctggatgcgttgggatacccttctgatttttcttgagatgatcgccgtcgtttttctgggtctgcttcccgaaaccgctccctttgccatcacccaggtggtgatcaattttatctgctccatgcaatacaataccttccgcaaaacccagggcatccccatggccaccaccttctgcaccaaccatgtgcgtcagatgggcatctttttcgccaaggcggtgcgccatcgcaactgggatcatgtgggacggcttttgtgccatctgagcatgctggtgcttttcgttctgggcggtgtcatcgccacagtgctgtgccggctgtttttgggccgggccctgctcttcaccctcatccccctgggcatcctctttgtggatctgctccgggccgaccggaaagctgcccaaaattaacttccctctccccccggaattttccacatatcttgcatctttttttgcaaattttgtttagcgtcttatcctttgtcgttttgtgtcgatagtatctgtgtggtgtttaaaagtattttgtttggggggaacttctgttatgaagagtatccagaaaaagatcaccgcctgtttcctcatactggtagctgtggcagcactgctgtgcggcggcgtaggcattttttccgtctacaccagcaaccagtccctgctggaagaggaattgaaatccttggccacactggccgccgaccgtgtgtcctatgagctgacctcgtatcaggatgtgaccgcctctctgggcatggtgcctcagttgagcgacgacactgtgaccacggcccagaaacaggaactggtgaaccgttgggccgaatcctataatatggaacggggcaatctgctggacaaaaacggcaagagcctgtttgacggcaatgattattccgaccgggaatatttccagagtgcgatagaaggcaacatttccatctccaccccgaccatcagcaagatcaccggtgaactgtccatcatggtggccgctcctgtgtggaagggtggcgtgcccaactcggaagtgacgggcgttgtgtactttgtcccccctgaagaatttctctgtgatattatgtcttccatccataccagcgagcacagcggtgcttatatgctggataagaccggtaccaccatcgccgatgtggtcatggagaccatcgccacagaaaacatcgaagaagaggcccagtccgattcttctctgtccgctctgtcttccatccatgagaagatgcgcgaaggcaagaccggctttggcacttataccattgatggcatcagcaagtacatcggctatgctcctgtgccgggcaccgatgactggagcatcgctgttacctcttacaccagcgacctgatgggcgctacctatcggagcatcatcattatttgtgtgctgctggtggttgtgctggttgtttcttctctgctgggcatccggctggccaagggcattgcctctcccatccgtgcctgcgccaagcgcctgtccctgctgggggaaggcgacctgaccactccggctcctcaggtcaaaagccaggacgaagtgggggtactggcccgctccaccgaaagcattgtgaactccctcaataccctgttctccgacattgctcatgtgaccggcgaaatggcccaaggcaattttgccgtccgttcccagcactatgaggtgtaccagggagacttctcctctgtgctgaaatccctgcagaacatcaaatacagcctaagcgacacactccgtcagatcgacactgcggcggcccaggtctctgccggcgccgaccaggtgtcctccggtgcccaggctctggctcagggtgctaccgaacaggccagtgctgtgcaggaactgtccgccacttcggccgacatcaactccggtgtgcagaataacagcgacgctgccaagaccgccaaagacaaggccaatgacgccggcactcaggtggctctgagcaacgagaagatgcatgagctgcgcgaagccatgtccaccattctggacggccatgagcagattggtcagatcattgctaccattgaaaacatcgccttccagaccaacatcctggccctgaacgccgcagtggaggcggcccgggctggtagcgccggcaagggctttgccgtcgtggccgacgaagtgcgcaatctggcttccaagtccgatcaggctgccaagcagaccaaggaactgatcgaacactccgctctcaatgtggaaaatggcagccgcctcagcgaagaagtctccgctgctttggaagagactgcatccctcaccggctctgctgtggaattcatcgaccaggtggtagacaatgtggtcaaccaggccgagtccatttctcagattgccgaaggcatcgaccagatctccagtgtggtgcagaccaactccgctactgctgaacaaagcgctgccgccagcgaagagctgtccggccaggcccagatcatgaaagagctgatcagccgctttacgctcagcgaacagagcaacggaaataattgatcccttgcaaaaaaagagccgccagaaggcggctctttttttagtttttgatcctgtttggattttctttctccttgtgttccctttacccgccgcttctcggcagccgggtaaaggaatccctttgcacctggaaccccggcgcagcggctcctttggcggcgatacgccgctcccactggatgagctgcaaaatctctggagcaatgggttgcggcacttcctgaggttttgcaatcaaatagccctggccatacgaaatccccagccggatcagctcccgcagctcttcccgctcctcaatgccttcggcgatgagctgaatgcccaaaggtttgcaaaacttcaccattctcctcagtgccctggatttctccggagacttgtggatatcccggatgagatccatatcgattttcacaaattggggatgcagatcaataaccctttgaatccctgcacaggcttttccaaaatcatcaatggcaatctgatagttttccttttggtaatggctcaccagctcctgaaacaggctcatatgctcatttcgaatgttggtgcgctcggtgatctcaaaaaccagattggccgcagagatgccgtattctttcaggtactttcgcgtcattccctcccggaatcggggatcatacatcacataagggtccacattgagaaagagcttctggctggccagatccttcccgatcccggccatggcctttttccggcacagatattccagctcccacagctttccgcactgctccgccaggacaaacatttcctcaatggacacatccggctccgagcgggtaatccgggccagcgcttcatatcccagaacctttccatcggtcagcgaaatgatgggctgatacacgcttttgatctgctcattctggatgatttggcatacagctgccgtcttggattctttcataaacaaagggccctccactataccagcatctaacggcaccgatcccaatacacggatcgatcaagcgtgggcattgtatcatacaaagtcaccgcttttccaccatggctgtgtgaaaactcccctcccacagtaaaacttctgtaaagcaaccgaattcaaaaagcgccccaggtcatctttccgatggcctgaggcgcttttgctttccaatagacagttttttattttatttattgcagcggctccacttgattggtctgccggttcaggcgataaatgcccattccatccacacgcaccagataggtaccctcaatctggtgagagcctacaccatccagtgtgtatacattgatgcagaagcaaccgatatcgtccaccatggcatagccctcctgggcatatacctggtagaccgccatagaatccccggtcagtcccaactgctgaggggtcatactctccagctggctcaccgcttcatccactgtcaaattgttctgcgctccatcctgcactgtgatcccttccaccaaagcgggggtcactgtgcagctgtctttgctccattccactttcaactggagcattcccgtctcatcctgggaatttttacccaaaatcacactgccgctttcttcggtaaaggtcggctcctgctgtttcgtcccttgctcatccaccacagcacagtcatactcttccatcatctggttgacatattctttggctgcttcgcctcccgacgccaggccggtgtagacataactttcggtttctgtttccgggtcggtttccacggtgcacacggtgccttctttttcttccaccatgcccaaggccggcagtttttcctcgtcgctgaaagaatattctgccggaaggccctcgtctttctcctccccagagcatccagggagcacggtgcacagcatcgccatccccagacaaacaggccatttcttccatttgttcatcatgttattgcctcatttcattcatcgcagcggatctctacttgatcgtccatctgcaaaatctgctggaaggtgccgtctctcccattgacccgcagggtcaccggccgatccagcttttcaaaatcaattcccgagcgctccagcaaatccatcaaataatagggattcccgtcggcttttcccggcagaaggatggattggccattgaaagtcagccgcaaaggccgggccggcggtgcagctgccgccggcccagcaggaacgggagccgaaggctgaggccttgtttccaccggtgaagcaatatgctccatcgcctggggcgcaggctgctgagaagcaggaggattgttttcccccttcccggccgtgcgcaaagggattccctggggtgccggttcatcgggggccagagggcgtccctgggccaaaagctgccgggctcccactcgctccatcacttcccgaaccaacaccacccggtcttctcccggctgggccggaatgaaatcaatccgatctcctgcctggacccgtgtggagggacgcacttccttgccattgactttcagctgagcgggaatagcaggctgaccggggaaaaccacccggcgcccatccacttccagcattacgctctttccattgcgccccagaagttcccgataggtatagccgttcatcatcagaatttccagcacactcagctggccgctccgaaatagtttggcttgtttgccattgaggaatacccgatagctgtcaccaatcagacccaatccggcggaaatggcaatccccaacggagtggtgtactccgggtcctccatttcgctgctgtcccactgggcacttctcttgaaatgggctccggccagcgccacgcggcgggaatccatccccagagcctccgccaacttttcccgcagggtggacagcttgctgccgcctccggccaaaaacaacgctgacggtgctccgccattgagcttctgaattttctccgccacctggctggccagattctgggctgcgccgtcggcggcggccatcacctcttccgccgaataggtctgttccaatcccagcacatcggtaaaagtgatctgggacatttctcccagctccattttcattcgttctgcggtatcgtagtccaccagataggcccgcatcagggcctcggtgatttcatcgccggccactgtggccatggtataacccaccacggtgccctcccggcacacggcaatatccgaagtaccggcgccaatgtccaccaaggccagattcagcagccgcagatcctgggggatggcagcattgagagcggcaatgggttccagcgtcaggctcatagcctccagcccggcctgttccagcacagcatacaggctgtcgatcacttcgctgggcaggaaggtggccaccacccggctttccagtttttgtcccttgtgtcccaggagattggtcaaaggataatcatccaacagataccggatggcggtatagcccaccaaaaacagccgccgctgcccttcttccccttcgccctgcaaggcccgttccgcgtcggataccgccgccgcttccaggcgggccacctgctcctgggtgatggtttccatgccggacagctccagcgtaccggtgccctcttcggtgcgcagcgcccggccggccgccgccacgcaggctcttttcaattttcttcccgccgtcttttccagacgccgggtcacttccaccacagcccgggccgcctggccgatgtcctcgatctggccatcctgcatggccctttgctggtggggctgcttttccatggcaaaaatatggaccttgccctctttcaccttccccagcatcccaatgacgctgcgggtgccgatgtccagggcatagatcagatcctcttcctgggggatctccatttctcgttgctgctccatcgcccgttctccttcccaaacgcctgtggggcgttcctgattatataatatctccatagcggcctttggccacatccccaaagactttgccgtccaccagggtgatgacccgtttgcgcatcatattgacaaacatcttggcatgggtggccatgacaatggtggtgcctcgccggttcatctcgtccaacaggtgaaacacatcccagatggcatcttcatccagattggcggtaagctcatccagcagcagcaccggcggactgaggataatggcccgggccagctccacccggcggcattcgcccaaagaaagctccaccggataccggtcttccacgccatggagccctaccatgcccagggctttttgtaccattccttcccggcggcgacggccgatcatcaccactgtctccagattttccccaatggttttctgccgcatcagctgggggatctgaggaacatagccaaactgccggcgataacgctcccggccccaacggcgaaaatgcgtggtgtcggtgtcattgagataaatggaaccatggtccggccgcagctgtccatggatcaactgaagcagggtgcttttccccgcaccgctgctgccggtgacaaagacaaactccccctggcgtattaccagattgatatcttctaccgcagcaatccttcgattttcctgcttataatatttgctgacctcttccaagcgtatttccggcataaggcgctcctttttctgtatacagaaagatcttattgggttatcatcccaatgtaaatgaaaatcttctgccttgcggctttgctcttcccttattataatatcagtataatcccttgggatggatttttccagttgaggtgttgtatttgtctcgcaaatcccgttttcgcaaaaaaataaacatcatagggcttttgcttttggcggtgctctgcatcggtggagtggaactgctggtgtgccgctttgcctcgccccagctgtttgaccgcatcacccagccggtgctgtctttcggccggcaggtgctggactccggaaaagagctcatcgaaaagatcccgcccattcatcttccctccctgaaaaaagaggaagctccagagaaaacaacgcaagaagaggcaccggccagccagctggccaccgatcccaccctccagaccacccagcaggaggaagcccctgccgtcactcatttcgcccagcgaaaaggccgggaggttctcactggcggcaatgtggacatggtctatttcaaccaggcggaagagccctgggcctcccagccctacggctcggacgacatcggcggttatggctgcggtcctgcctccatggccatgatcatcgccaccctcaccgatgaaacgatgacccccaccacgatggcccaatgggccgcacagcatggccactgggccaagggcagcggctcctatcattccctcattcaaaatgtgggggccgcctttggtctcaccgtctcgccgctgaagaatctgacagccgattctctcacccaggccctggcctccggccaggtctgcgtagctctgatgcgagaaggccattttacctccggcggtcattttattgtgctgcgcggggtgacactggaaggaaaaatcctggtggccgaccccaacagccgtcagcgaagtctgatcgcctgggaccctcaactgatcatcgatgagctctcccattcccgctcttccggtgcgccgctatggtgtatctccactttgccccaacagaactgatacccgccctatgagaaacaagaacaaatcccctgccaaacgggcaggggatttttcaggccgtcagggcttgcccggctgctggcggtaaaaggaatgttcaccgccgatcctcaaattgagccgccggtccacttccagaattctatccagcagccgtttgtttttctgaaccaactctcccagggcctgagcctggggcggcggggtctggccttgcaggataccccgcaatatctgccgctgctccgggggaagctggagacattgccgctccagcatggccttgcagctttccagccggtcaatgggttcctggcgcattcccagaaacatctgcaccgacacctgatcctgccgctgaaatgcatcggccagttctccggtcagttccatcacttcgctgagggccgtatacatcttctgttccgcgctcatggcgactttcagcacttgctcatccatggtctaatgctccccggaagtcttttcggcttggcggaagctgtcccgcagttcgctgaccatgcgggtcacccgcatcagctcttcctggttccggcctgctttcacgcggctgagttcatagcaaaaatattcatacaaacgagacagattcccgctgatgggatagcggtgatccaaggtgtcggacagatagtggatgatctccaccgcccgatccactgctttttcaaaattttcgtaattttgcttccccatctccaaatcagcctgccgcagccgcttgaccagctcatcatacagcaagagcagaagctcgccttgggtcatggtattcagcgattcttcccgataccgctgatagcctcgcatatccatatattcgctgtcctttctccttttcaggatcaatagctgccgcccgtcaaaccggccaacgcagagctttgggagttcatctggttgatgagcatttcgagctgggtaaatttgttggtataataatccactttgtcggacattttggtctgccaggtggaaatctgcttatccagctctttcatctgatccagaatagtgttatccaatgcggcggtgggggcatacttggaaccggccttctcgatgaggatacccttgaccgcgccggtagtagctgcataacgatcggtgacttcctggatcttggtcatcaggccatcggtggccgcgccattttctttgctcttattgaaggcattggccacgccatccagatcggtctccagagcctcccgcaaagctttttcatccaggctgatggtggtcaggccgtcctcatagctggtgttgataccgatggaacggagataggcaccgtcagcaccgctggataccacagcatcccggagagcactatacagggaagacagatcccggtccataaacaaaataccggtctttgccttttcttcataggcctcgatctcgctttcggtcatgccctcttcgtcttccgaagtcagaggctcatatttggagccgttggtcttctgcaaaggcatatcggaataggcctttttgatctcggtgaccatggcgttgtaatcgtccaccatggatttgatggcattgaacaccgtgtcggtgtcggtcttggtggtgaaggtgacatcggcccctttttctgtgccatccacattgaatgtgccttcaaaggtgacggtcatgccgtccagatccgccgtattgctgctgcgggtatattccatctgcttcccattgaccgtggcggtaaagacagcatcagttcccttttcgtagttgctggaatcgccaaagagagcctggcccagcccctcgccgatgtcgatcttttccgcagaaccggtggatttggccgtgaacacaaattcattggtcagcttggaatagctcaccgacacaccggcctcactgttggcattgatgtcattggtgatggtctccaaggcggtatcctgggtgtaagtgccgatcttgaccccgttgacggtcatatcgaactcatacaaccgctcgccgtctttgttgatccggta

SEQ ID NO: 4221 - DNA, 8443 bp, Unknown
  16S sequences of unknown bacteria
aaaccagtggattctggaggcaggctgcgttcccatcgtttgatgaaagagagtttctgcggagggcttggcaaaccggaaggatttgccaggcccttgcgttgatgaagaaggtgtagagaaaaaatgaaacaaaaatatttggtggaacgcgtaatgaacgcgatctttttcgtctgcggactgacagccattgcctgcgtggtgctgatttcggtgtatatgattatcgccggcgtgcctgccatcggcaagatcggtttcattgactttctgttcggcacgaagtgggcgtccaccgcggcagagccttcctacggaattctgccctttatcctgacgtcgatctacggcacggtcggcgcgattctgatcggtgtaccggtggggctgctgaccgcggtgttcctgtccaaaattgctccccggggactggcggcgcccgtcagcaccgccgtcgaactgttggcgggcatacccagcgtggtctatggtttgctgggtatgacgctgctggtgcccgcggtggctaaaaccttcggcatcgcttccggcgcgtgtttgttttccgccattttggtgctggcgctgatgattttacccaacattgtatccgtcagtgtcacggccctcaacgctgtgccgccggaatatgaggaagccagcctggcgctgggcgccacggagacggaaacttatttcaaagtcagcattcccgccgcaaaaagcggcattgccgccggcgtggtgctgggcatcggccgcgccattggcgaggccatggctgtgatcatggtggccggcaacgtggccaacatgccgggcctgttccagagcgtcaccttcctgactactgccatcgccaaggaaatgtcctatgcgggtggtctgcagcgccaagcgctgttttccattgcgctggtgctgttcgtgttcatcatggtgatcaacgcgctgctcaatttcttcctgaagggaggaaaaaaggatgacaaataagcgcagactctggaatgctgcggtgcgcgcgttggtttatgctgccgcggcgctgacggtgctgctgctggtggggattttaggttatgtgctctaccgcggcctgcccaatgtcacccctgcgctgctcacccaatctgacagcgtgcttaaaggaaccatgggcatcttcccgctgatcgtcaatacgctgtgcgttattgtgctttcgctgctgattgcgctgccgctgggcgtcggtgcggccatttacctgacggaatatgccaccaatcaaaaactgatccgtatcatcgaatacactacggaaacactggcgggcatcccctcgatcatctatggcctagtgggtatgctggtgtttgtacgtctgaccaaaatgctgcatttgaccacaggctcgtctctggtcgccggctcgctgacgctggtgattatgattctgcccacggtgatccgtaccacccaggaaagcctgaaaacggtgccccagagctatcgcgaaggcgccctggctctgggcgcgaaaaaatggtacatgatccgcaccattattctgccctcgtcgctggacggtattgtcaccggctgcattttgtccgtgggccgtatcgtgggcgagtctgcggcgctgctgttcacggcgggcgcgggaaagcttctggccggcgggctgctgagtacctatttcaacagcggcgcaaccctttccgtaggcctttatatgtatgcctttgaagaggggaaatatgatgtcagctatgccatcgccgcggttctgctggtgctggtgctggtcatcaatctgtgcgcgaagctggccaagaaaaagatgaagcccaaagtatgatgcattgataacaatgaggtgtgaaagagatatggaaccgatcctttatgcaagaaatctgaatctccattatggagattttcatgcgctgaaaaatatcaatatcgatattccggaaaagaaaatcacagcctttatcggcccctctggctgcggcaagtccacttttctaaaaacaatgaaccggatgcaggatctggtgcccggcgtaaagatcgagggcgacctgtttttccgcggccaggatgtgaacagcaaggatgtggatgtgaccgagctgcgccgccagatcggcatggtgtggcagaagcccaacccgtttcctatgagcatttacgacaacatcacctatggtcccaagctccacgggaaccactccaaggcggagctggatgagatcgtggagagatccctgcgcggcgcggcgctgtgggatgagctgaaggaccgcctgaaaaaaagcgccctgggcctgtccggcggccagcagcagcgcctgtgcattgcccgcagcctggcggtggagccggaggtgctgctgatggatgagccgacctcggcgctggatccggcttccaccatgcgcattgaagagctgatgagcgaactgaagaaaaactataccgtggtcattgtcacccacaatatgcagcaggccgcccgtatcagcgaccagtgcgcgtttttcctggtgggcgaactggtggagtgcgcgcctacacaacagattttctccatgcctgcggacaaacgcacggaagactatatcacaggccggttcggttaagcggacggcgctgcgctgtccggcccaggcggggtttctgcgaagactagtgaaacggtgattataccgtcaaatttgtgtacattttgtaataaagaaggggaacattactatgggaaatcgcgatacctacgatcagtccctgcgggacttggacgataagattcttgccatggccggtcatgcggccgatgcggtggagagcgccatgggggcgctggaaaacagcaatttggctgcggcacaggccgttgtggaaggcgacgaccgcatcgaccgggaagagcatgccatcgagcacctgtgtctggggctgatcgcctgccagcagccggtggccggagatttgcgcaaaatttccacggccatgaaggtggtcaccgatctggaacggctgggcgacgcggcggaggatattgccgagatcaccctgcgccgcggcaacgaggtgatcccagagctgctgagtgtgctcagcgccaccgggcgcgaagcggtgagcatgatccgctccgccattgccgcctatgcgtccgaagacctgacgctggcagccaaggtcattgcccaggacgatgtggtggacaattatttctctgagatcaaacaaaaactgacgaagtattttgcccaggaacacccggagatcgactgtgccattgactatctcatgatcgccaaatatctggagcgcatcggcgaccacgcggtcaacctggctgaatgggtgcagttctgcaagacgggcatccataaacatcaaagaatcgtgtaaagggggagcacttgcttccctttgcgccggaaggatattcggaaggcgcaaaataagacgttactttcttcatcattttttctctcttttttcagactgtcccggagcggtaaaaaagcgctccgggacagtcccgtttcaggggtggaaaaatgccgccggcgcattgcgccggcggcgttccttttttattccgctgcgttttttccttttttcaaatagagcgcgatacacacggcggcgaaagcgccgtaaacggcaaaagcaatcagctgcgccgttgcgcgggtacgggccacaggattgaccgactcataaacaacggtatcttccccattttccgcgatctccagcatacggatcaggcgatcggaggtgatgtcatatttgatccccacctcgtcgcctacctggggcgtctgcgtcagggtggcgtagtcctccagcataatcgtgtagcgcgtggagttaccctccagccggatggccatgcgggtgttttcgtaggcaggttccaccgtttccacaataccgcgcatgtcggcggtcataggggcaaaaaagagattggggatctgccaggacactaccgccagcaccagtgcgccgatcatcagggcggcggcgagaagatggtcggagcgggtgtttttgaatgtctgcatgtcagcgtacctgtccttttccgcgaatttcgtatttatagctggtcagttcccgcaggcccagaggaccacgggcatggagcttctgggtggaaatgccgatctccgcgcccaaaccgaattccccgccgtcggtaaaacgggtggaggcgttgacgtacacggccgccgcgtccacttcccgcaggaatttttcggcggtctgctcgttttccgtcacgatacattcgctgtggccggtgccgtgggcggcaatatagtcgatggcttccgctgcgctggataccacgcgcacggcgaggatatagtcgttgtattccctgccccagtccgcttctgaggcatgctcggcctgatgaagcagagtaaagctcttttcatcggcccgcagtgtcacatgtttggcgctcaggcgtacttccagggcggagagaaatgccggcgctacggtttcgtgtaccagcacgcactcacaggcgttgcataccgaggggcgggaagttttggcgttgtccacgatgtccacggccatggccagatcggcgtccttgtccacataggtctggcaggtgcccgcgccggtttcgatcaccggtactgtggcatttttcacgacgctttggatcagccctgcaccgccccggggaatcagcagatccacgccgctgttaagccgcatcagcgccgtggcggtggcgcggtcggtgtcttcgatcagctgcacgcagtcggcgctcagtcccgcctcggcgatggcgctgcgtaaaacggaagcgatggccagattggaatggattgcctccttcccgccgcgcaggatcacggtattgccgcttttaaggcataatgctgcactgtcggcggttacgttgggccgggcctcataaatcacagcgatcacgccgatgggtacggtgcgcttggtcaggtgcagaccgttggggcggtcgaactcttccagcaccaggcccacggggtcgggcagcgcggccacagaacgcatgccgtccgccatagcggcgatgcgtgcccggctcagggccagtcgatccaaaagggcgtcggacaggccgtttccccggcctgcggacaaatctttttcattttcggtaagaatgtcgtctgcagcgccttccaaagcgtcggctgcggacagcagcgcctgatttttttgtgtgctgccggccagagccagcatccgctcggcggcccgggcacgctgtgccagggcggtcaggtcgtaactcatacagattcctcctttgctgcacaaaacagtgtgccgatatcccggccctccagcagagtgtacaggttttcgcaggaggcgccgttgatgatgtaagtatctgcaccggcggcggtggcaagcttggcggcacgcagtttggtggtcatgccgccggtgccccgggcgctgcctgcgccgccggccatggcttcaatctcaggcgtgatggtttccactacgctgatgcgccgggcctgggggttttcgcggggatcgctgtcgtacagcccgtcaatgtccgtcaggattaccagggcgtcagcgccgatcagggcagccacttccgcgctgaggcagtcgttgtcgccgtgaagaatttcctctacgctgacgctgtcgttttcgttcacaatgggcagtgcgccgaaagagagcagctgctcaaatgtattcaccaaatgggcccggcgctccgggtcggcgatatcgctgccggtgagcagcatctgggccggcgttttggaatattccgaaaagagcttgtcgtaaaggaacatcagctcgctttggcccaccgcggcggcggcctggcggcccggtatgtccgcaggacgtgccggaagccccagtttgcctacgcccacagcgatggcgccggaggataccagcactacctgtatgccggaattggcaacgtcggacagcgtttctaccagccgtccaagacggcggaaattgatgttgccggtggcgtaagtcagggtggaggttcccactttgaccaccagccggcggatcgttttttttgtcatagcagttgcttcctttgtctgttgcaagattagcaccattatatgccctgtgcggcgcattttcaacgaaaaattcaagaaagaaaaaagaggacgccccgcaggacccggcggtcccccgaagcgccctctgccgcggttttctgccctatagctccaattcgtggcggaaatgttcggccatggtctgcagttcgcccagactggaaacgtacacctcgtgccgcagcagcgctgcccgcaccggggaaggcagggaaatgaaatattcccacagccgcggatcgcgcatgtaaaaagccatatccatcgcatatccctccgttttttgcgtgtggggttagtatgtgcgaaactgggcgaaaatgcgctggaaaatggttgaagaacggagcggggacttttttcaaacatctatggcgtttaaacaacttccacttttaaaaggttggtggtgccgctgcgccctacgggtacgccggcggtgatcacggccagatccccattgtgcaggtagcctgcgcgcttgcaggcttccacggcggcggcaagcagttcgtcggtgttggcggcgggggcggtcatggtgggatacacgccccaggacaggcgcagctggcggcacactttttccgatactgtggcggcgcagatgggacagctgggtttaaagcgggagatcatgcgggccgttttgcccgcgtgggttacggtaaggatggcgttggccttcaggtcaaaagctgcggcacagcctgcatggctgatagcgttggttacagagccgtccacggagaaatgctcttcccggaagcgtttctggtagtcgatgtggcgctctgcttcctcgacggtacgcaccatggtctgcagagcctcggcgggatactttcccgaagcggtttcgcccgaaagcatcacacaggaggcatagtcgaacactgcgttggctatatcgctgacctcagcccgggtgggacggggattgcggatcatggagtcgagcatctgggtggccacaatgacgggcttgcctgccagaacgccctggcggatcatttccttctgcaggaaagggatttcctccatgggtacttccacgcccaaatcgccccgggccaccatgataccatcggcgacgtcaaggatctcctggaaacggtgaacgccttcccgattttcaattttggcgatcagtcggatatcgctgctgcccaacccctgcagcagctcccggacggcgtggatgtctgcggcgctgcgcacgaaggacacggcgatgtagtcaaaatcgtgttctacggcaaatttgagatcgctgcggtcccgggaggtgaggcctggcagggacacgttcacgccgggcacattgatgcttttgttgtcgctcagcacgccgccggtaactacgctgcaaagaatgtctgcgccggacaggttttccaccttcaattcgatcagtccgtcgtcgagcaggatgcggtcgccgatatgaaggtcctgggccagggcgtcataggtgatggatacgcaatttttgctgccgggaaggtcccggctggtcagggtaaagctgtcgccgggagccagagtgacaggcccgtctgcaaatgtgccgatacggatttccgggcctttggtgtccaaaatggtggctacggagatcccctcctgccggcaggccgcgcgcagcttttcgagcatggccagatggctcgcatggctgccgtgggagaagttgaaccgggcggcgtccatgccgccgcgcagcagggcgctgagcatggcgtcgctgctgctggccgggccgagcgtgcagatgatttttgtttttcgcatcatgcgttgatgtcctcctttcgggaaacggggatggcagggcgtctttgcgctcttttgttgccattgttagtatatccaaaaaagtacggcagtgcaagggagcggcgatgcaaaaatgatgcagggagcctttaggctccaagtcgctttttatcggaaaaagtcggccgccgtacttgacggtgtgccggaaagtcagtatgatgtagatagcgcaacagcaagaaaggcgcagctgaggctgcgagagatcaagaggagaggatgtccgccatgggattgaaaaagtgccctgtttgtggcgaaaaatatgcagacacttataaacgctgcccgttttgcgaggaggaagccaatccccgccaggccagacagcccaagcgcaatgaaggcggcggccgccgcctagcgcgccgaacctatgaagaggatacgccccgtccgctgtacggcggggaggaggggccggcctatgaaggccg

SEQ ID NO: 4222 - DNA, 13907 bp, Unknown
  16S sequences of unknown bacteria
cccccgccgcaagcccgtgctcgcgcgcgtggtgggcgggctttcgggccctgctgtcaagccggtcgcgctgcgcatggtgtgggaggtccacaaggcggtggagattcccgtgctgggcatgggcggtatcgccacgtggcaagacgcggtcgagttcatgctcgctggggcaacggccgttgccgtcggtgccgcgaacttcgccgatccgctcgccagcatccacgtgctggagggcctgacgcgctacctggaagagcaggagatttcttctgcacgagaactcatcggagccttggaggtctagaccatggattggaaaaacgaacccgctgccaatagaatcatcgtcgcgctcgactgcgcccctgacgaggcgattgccctcggcgagcagctcgccgggcatgcgcgctgggtcaaggtcggcatgacgctgtactacgccgtcggcccctcgatcgtgcgccagttccacaagctcggcttcaaggtgtttttggacctcaagctccacgacattccgcaccaggtctacggcgcggccgcctcggtcgccgcggcgggcgcggacctcatgaccgtgcacgcggcaggcggcacggacatgatgtcgtcggcggtcaaaggcgcgcgcaagggcgcggcagacgtcgacctggacgccgagcgcccgacggtctgcgccatcacggtgctcacgagcatggacgcagcccagctcgctgccatcggcgtgcaagacgagccggcggcagaggtcgagcgtttggcggcgctcgcgaaggagtcgggcctcgacggcatcgtctgctctccgaaagaagcggcccagatgcgtgcgctcttgggcgaggacgcggtcatcatcaccccgggcgtacgtcccaagggcgctgccctcggagaccagagccgcgtgtccacgcccaaagaggccttcgaggccggggcatcgcacctcgtcatcggccgccccatcacgagggcgaccgatcccgtggcggcgttcgacgaaattgtcgcaagcctgagcgagtagagagccccgcggaaggggacgattctcgcttttctcgccgatggggtgtgccaaaaccccatctgcgcgtctgccctcgtacgagagtgctatgctcgaaggtgcattagcacaccggctgattcccagctcgagtatggttttcctgctgctcggcgcagcgtcgcgcaaaggctggctgggccgagttgaattcgggtccggcgctgccggtcccactagacgagggggtacgttatggcactgcccaagctgactgacaagcaacgcaaagaagcgctcgagaaggcggcgaaggtccgcaaggagcgcgcagagctgcgcgaggggatcaaagccgggaagattaccgtcgccgaggtcctggcaaaaagcgacgaccccgtcgtcgggcgcatgaaggtctcgatgtttctcgagtccctgcccgggtttggcaaggcgaagaccgacaagctcatgaaagagctcgacatctcgccttcgcgccgcatcaaggggctcggcaccgcgcagcgcgagaagctgctcgaaaggtttggagataagtagatgtcaggttcgctcttcgtaatatccggtccgtcgggagcaggcaaggggaccctggtgcagcggctcgtcgagcgcgtgccccacacttgggtgtccatttctgccacgacgcgcgccccgcgcacgggcgaggtcgacggcgtgcactaccgcttcatgacgccggaggagttcgagcgcaccatcgaggagggcggcttcgccgagtgggcaaacgtgcattcccactactacggcacgcccaccggcccgatcatcgagcatctcgaggcgggcgacaacgtcctgctcgagatcgacgtccaaggcggcttccaggtgcgcgagaagtttcccgacgccaagctgctgttcatcgcaccgcccagtatggaggtgctcgagcagcgcctgcgcgggcgcggcaccgactccgacgaagagatagcaaagcgcctgagaaacgctaagggggagctcgaggcatccaaagactacgacgtcgtcgtcgtcaacgacgatctggaagaggctaccgataagctcgccgaggtgttagaatcctgatccggctgtagtttgaaagcctgttagctaataaggagttaaacgtatatgtctattgtggaaccgcgcatcgacacccttctcgacaagacggaagaggacaagtaccttctgtgcgccgtcgcatccaagcgcgctcgcgacatcaacgacatgatgcgcggccagcgcgaccgtgccgtcgcacgccagtccgtcagcgagatcgcggagttcgcaggccgcaagccgctctcgctcgccatggaagagatcgcgcgcggcgaggtctcctacgacaagaagagcttcgaagaagcagaatcgtaagggttgcatttgttcgagcgtatttgcctggtccactatcacgaaatcggcctcaagggccgcaatcgcgcaagcttcgagcaccgtctcctcatgaacatggaggcggcgctcgcttcgtatgagaccgatgaaatctcccgtatctcgggccatctcctggtcgtcttgaagcatggcgaccagatcggggaggtctcgcgcatcctgctgcagatccccggggtggcgcgcgtgtcgtccggttggaggtgcgcccgcgagcccgagcagtactgcaaggccgcggagctcgccctcgtggactgcgggccctaccagaccttcaaggtcgatgcccgccgttccaacaccgactatcccatcaactcgatggagctcaaccagctggtcggcgcgcacctatgcgcgttcgcgcccgacaagaaggtccagatgaaggacccggacgtcaaggtacacgtcaacgtcatccagggcagcgtctacgtctactcgcgcaccgagcgcggcgtcggcgggcttcccgtgggctctgccggcaaggtcgtgagcctcatctccggcggcatcgacagccccgtcgcctcgtggcgcctcatgaagcgcggcgccgtcgtcgtgggcgttcacttttccgggcgtccccagacaagcgatgccagcgagtacgtcgtcgacgacctcgcgcatgccctcgccccggcaggcggcttcggccgcatctactacgtgccgttcgggggctaccagaagatcatcgcgagcgaatgcccgcccaacctgcgcatcatcttgtaccggcgcctcatgctgcgcgttgccgagcgtatcgcctggctcgagaaggccaaggcgctcgtgacgggcgagtcgctcgggcaggtcgcgagccagacgctccgtcgtcaagctgccggtgctgcgcccgctcatcggcgccgacaagctcgagatcatcgacacggccaagagaatcggcaccttcgagatctcgtcgcgtcccgccgacgactgctgcacgctgttcatgccgcgcagccccgagacacacgcgcgcatcgtcgactgcgagcgcgccgaagagggccttgacctcgacgcctgggtcgacgagatcatggagcacctcgagtaccgcgactatccctgccctgcgtaccgcgcgcccaagaagatgccggaaggcgcgaaggcgctcgacgcgtgctgagcgccaaggggaggaacatggaatcgagccaagtccgcctgaccattcccgacggcctcgatagggcggcgctgtgcggcgtgggcgatgcgaacctccgcgccgtcgaggagctgttcgacgcgaccgtcgcgctgcgcagcgaccagatcgtcgtcacgggcagcgcaagcgacatctccgtcatcgcctcgctgctctccgagctcatcgccatggtcgagtcgggggcgttcccatcggtcgaggacgtgaggcgctgcgccgaggtgctcggcaactccgacttctcgccgtcgtttctgcgcgaggacacgctgctcacctaccgcgggcgcgccatcaggcccaagacgagcggccagaagcagtactgcgacgccatccgtgccaacacggtcaccttcggcatcgggcctgccggcacgggcaagacctaccttgccatggcgatggccatcgcggcgctcaagcgcaaggaaatcggccgcatcgtgctcacgcgcccggtcgtcgaggcgggggagaacctcgggtttctgcccggcaccctcaccgagaaggtcgacccctacgtgcggccgctctacgacgcgctgttcgacatgaccgacatggagaagggcaaccagctgctcgagcagggcgtcatcgagatcgcgccgctcgcgttcatgcgcgggcgcacgttcaacgacgcgtttctcatcttggacgaggcgcagaacacgacgcccgagcagatgaagatgtttctgacccgcctgggcttcgggtccaagatggtcatcacgggagacgcgacgcagatggacctgccgcggggcgcgtcgggcctgcgcgacgtggagtcgattctgggcggcgtcgacgacatcgccttcgtcaagctctcgaacaaagacgtcgtgcgccactcgctcgtcgcgcgtatcgtcaaggcgtacgagcaggcgcaaaacgataactgaaaggggcagcgtagcatgcaggtaaacatcgacgtgcgcgggggagagaagacctgggataccgaggccatcaccaagctcgcgctgttcgccctcgagtacatgaaggtcccgcagggctgcgaggtctcggtgagcctcgtcagcgtcgacgagatccacgagctcaaccgcacgtaccgcggcatcgaccgtcccaccgacgtgctgtcgttcgaatgcgacagcccctgggaggctgacgaggacgccgagctcatcgaggtcggcgacgtcgtgatcgcaccggacgtggtagatgcgcagcgcgagaagtacggcaccaccttcgagcaggaggcgtcgctcatgctcgtgcactcgattctgcacctgctcggctacgaccacatcgaagacgacgaggccgaggtcatggaggccaaggagaaggagattctcgacgcttacggcctgacgggaatccgctgatgacgcctggcggcaaaaggcagtcgcaggctcacagcttcaaggtcgcgttccagagcatcggcgcggcgtttgcgggcgagctgcacatgaagatccacttgtgctttgccgtgctcgcgcttgtcgcctgcgcggtgctgcgcgtggacgtgatgggatggtgcctcgtcatcgggtgcatcgcggcggtgtttagcgcggagctgttcaacacggccatcgaggcgctggccgaccgcgtcacgctcgagcgcgacccgctcatcaaggtggcgaaggacactgcggcgggcgcggtgctcgtactcgccatcgcttcggttatcatcggccttgcggtctacattcccgcagggctcaagctcctcggcatgtaggtggccgcacggcagagggctgggtttcctcgtcaaggcacgcggcgaggatcggaagaggaaaggcaggttcgcatgagcgacctcgatgaaatgctcaaggcggcgggcatcgccgacgaggcgggggagtacgtcgaccctgaggtattccgcagcggattcgtgacgctggtgggcaggccgaacgccggcaagtccacgctgctcaacgcggtcatgggcgagaaggtggctatcacgtcgcgcacggcgcagaccacccgccaccgcttccgcgctgtctacgacaccgacgagatgcagatggtcatggtcgacacgccgggcctgcacaagcccgaggacgcgctgggcgaggagctcaacgagtcggcgctgcaggcgctcgaggacgtcgacgtggtcgcgatgctcatcgactcctccaagcccatcggccgcggcgacgagtgggtcgcgcgccaggtgcagcagctcaagtgcaagaagatcctcgtcatcagcaagaccgacctcgtcaagaaggccgtcatccgcgagcagatcgcgaaagccgaccagatgggctcctgggacgatgtcgtgacgctgtcgtccaagcagaaggtcggcatcgacgacttcatcgacgcggtctacgacctgctgcccaacggcccgcgatggtttccgaagggcacgggcgtcgacttgagcgacgaggtgctcatcgcggagttcatccgcgagaagatcctgcgccacacgcgcgacgaggtgccgcattcggtgggcgtgcaggtcgagcagatcgaccgcgacccccagacgggcttcatgaaggtgtgggccgtcatctacgtcgagcgcaacagccagaagggcatcatcatcggacacggcggcagcatgatcaagcagatcggctccgaggcacgccaggacctcgagcggctgttcgacgtcggcgtccacctcgacctgaccgtcaaggtcaagaaggactggcgcagcgacgcgagccagatccgcaagttcggctacggagagggcctgtaggggcatctccccatggcacgcaagacgtacaaggagcgctgcctcgtcctgagaaagaccaagctgggcgaggcggactcgatcatcacgctgctcgcgcgcgacgggcgccagattcgcgccgtcgccaagggggtgcgcaagccggcgagccgcttcggcgcgcgcctcgagctgtgctcggtggtcgacgtgctcttgtacccgggccgctcgctcgacgtcatcagcgaggtgcgctgcgtctccacgaacgacgcctgccgcatcggcctcgagaaggcgggtgccgccgaggtcatctgcgagttcctggaaaagctcacgcgcgacggcgccgcgacgggagaccgcgtgttcgcgctcaccgaggtcgcgtttgccgcgattggcaggggcacggagctgcaggcggggatgtttgccgccgcgcacctgctcaaggctatggccatgcagggcctgcggcccgccatccacgagtgcgcgctgtgcggggcgccgctcgacaaggtgggcttcttcgacatcagcatgggcggcgcgctgtgtgccgactgcgcgggcgaggctgcctcgtcgcccgtcgacgtggccatcgtgccctggatcgacctcatgctccgctccaccttcgacgagctctcgcgcgtcgagcaggcgcccgtgcgcaagctgctcgacgtgggcgagtcgtggatgcgcgagcacctctcgctgaatttgaagagcattccctttctcaagtcactctactaggctagaatgctcacgtctgctttattgcagtaaagtgatgtagaggagagaacgtacatgaagaagaaactgatcacgggcatcgtcgttgtcgcactcgcgtgcttcggcgtcgccgccctcgcgggatgcggtggcggacagtcctccagccagtcgtccgacaaatcgagcgactcgaagaccacgctcatcgtcggcttcgattccgcctacccgccctatggtttcgtcggcgacgacggccagtacacgggcttcgaccttgacctggcccaagaggtcgccaaccgcaacggctgggactacaaggctgagccggtcgactgggatgcgaaagacgcgctgctcggcagcggccaaatcaactgcatctggaacggcttcaccatcgagggccgcgaagacaactacaccttctccgagccctacatgctcaacgagcaggtcgtcgtcgtgaagaagaacagcggcatcaacagcctgtccgacctcaagggcaagaccgtcatgacgcaggtcgactctgctgcgctcgacgtcctcgagggcgaccagaaggcgctcgccgacacgttcaagggcggcaaggcccagacgatcggcgattacaacaacgccttcctgcagctcaactccggtgccgtcgatgcggtcgcctgcgacctgtccatcgcccagtaccagatcgccgcgtctcccgacagctatgtccagctgtccgacgcactgtcgaccgagcactacggcgttggcttcaagaagggcgataccgagatggccgatgcggtcaccaagaccctgaaggagatgtacgcggacggcacggtcaagaccctgtgcgaaaagtacgcgcagtacggcctgtcctacgacaactggctgctccagtaatcgacgaacacgccgcgaatgacccccgaggctcgtctcgggggtcatttgtctgcccagagggcttcaggtcgctgagccttcccggcagatagtgcgtgtctcacggcacgcgccggcaagcttgaagggaacgctttggaattttctacgatgatggccctcatgggctccggtctgacgctgacggcccagatctttgtcgtgacgctcgtgggcgcgctgcccctgggcgtcgtcgtcgcgctgtgccgcatgagcaggttcaagccgctcgcgtggctggcgacgctctacatctccgtcctgcgcggcaccccgttgatgctgcagctcatggcgttgatgttcggcccctactacctgttcggcgcgcagctcggcgccggctggaagttctgggcgtgcgacatcgggttcatcctcaactatgcggcctacttcgcggagatctaccgcagtggcatccagtcgattccgcgcggccagcacgaggcggcgcaggttttgggctacacgcgcgcgcagaccttcttcaagatcgtcttgccgcaggtcgtgaagcgcatcctgccggcgatgggcaacgagatcatcaccctcgtcaaagacacgtcgcttgccttcgtgctcggcatcatggagatgttcacgcaggcccaggcaatcgccgcctcccaggtcagcatgctgccctatgtgatcgcggcggcgatctactgggtgtgctgtcttgtcatcgagttcatcttgcatcgcatcgaaaagcgcctcgactactaccacgactagcctttggggcaggtcgtcatcgctgtaaggagaatgccgaatggccgaaacctctgaaaagaagacgctcgtctcggtcgagcacgcgcgcaagagcttcgggagcaccgaggtattgaaggacatctcgctttccgtccacgaaggcgaggtgctcgccatcatcggtgcctcgggtggcggcaaatcgacgcttctgcgctgctgcacgctgctcgagacgctcgacggcggcacgctaaagtttggcgacctcgtcgtcgcacgggacaatggcacgggcgtgagcgtgtacgccgacaagaagacgcagcgcaaggcgcgtgagtgctttgggctcgtgttccagaacttcaacctgttcccgcactacaccgtcatgaagaacatcatcgatgcgcccatgagggtgcagggaaagtcgcgcgaggaagccgaggcgaagggccgcgagctcatctccaagatgggcctcgagggtaaggaggacctcgtcccctgcgagctgtccggtggccagcagcagcgcgtcgccatcgcccgcgcgcttgcgctcgagcccgacgtgctgttcttcgacgagccgacgagcgcgctcgaccccgagctcacgcaaggcgtcctcaaggtcatacgagaccttgccgcagagcacatgacgatggtcatcgtcacgcacgagatgaagttcgcgcgcgacgtagccgaccacatcatcttcatggacaagggcgtcatcgtcgaagagggcaccgccgagcaggtcatcgagcacccgcagcacgagcgcacgaaggcgtttttgtccaagatatcggactaaccgttcgcggcccgtttttgtgcgattgtaaaatattctttaataacgaatatcttattaaaaatatgcacaaatgagcgtgtattatgcatcgagcattcgacaatgctaatcgtttgcatccgttaggggaggacacactcatgaaaagcaaggcactcaaggccgcggccctcgcgctttcctgcgcgctggccgtggcatgcctggggctggtcgcgtgcggcggctccagttccggcaattccggctccggcagctcgaactcgggcagcgccagcaccggcagctacaagctcgtcgagagcggcaagctgacggtcggctcggatctggactacaagcccatggaatacctcgacggcgacaagcccgccggctttggcgtggacatgacgcaggagatctgcaaccgcctcgggctcgagatgaacttcttgtccccgcagaacttcgattcgctcatcacgcaggtcaacggcggtacctccatggacgtcgccgtgagctctatcacgatcaacgacgagcgcgaggagctcgtggacttctccacgccgtactacgactcgaacctcgccatcgtcacgctcgccgactccgacgtcgcctccgcatccgatctttccggcaagcccgtgggcgcgcagtccggctcgacgggcgaggagtgggccaaggagaacctcggcgattcctcgtacacgccgtacacgggtccgaccgatgccctcaccgcgcttcgcgccggcaagatccaggcggtcgtcctcgacgctcccgttgcgagcgactacgtcaaggaggatgcgggcacgtacaagctcgtcgacgagatcgcgaccggcgagcagtacggcatcgccatcaacaaggacaaccccgagctaaaaaaggccatcgactccgccttggcggacatgcaggccgacggcacgctcgacaagctcaagcagaagtggctcggcaccagcaactagaaagacgcacgttcggccgaatcgtgcatattcgggacgttattatcacgaatagggtatattctgttagctgattgcggccatcgatgggtatgaccgctttgggaaagaatcaccaagggaggattcatgaagaagaagatgaccaagggcctcgtgctcgccctcgtgggcgttctcgcggtcgcttgcctgggccttgctgcctgcggcgggtcgggctccaacagctccaactcgtcgagccagaagtccgaggcgagctacaagctggtgcaggacggcaccctcaaggttgccaccagccccgactacaagcccatggaataccaggagggctctgacatcacgggcttcgacgttgccctcatcggcgagatcgccaaccgcatgggcctgaaggccgacgtccagagccaggctttcgacaccctggtcacccaggttgccggcggctccgattttgactgcgccatcagttccatcaccatcaacgacgagcgctctcagaccgtcaccttcaccgatccctactacgattccaacctcgcgatcgtggtcctgaaggattcgggcatcacgagccgcgaccagcttgccgacgccgaggttgcagcccagtccggttcttcgggcgaggagtgggcaaaggagaacctgcccaacgcaaagtacacgccgttccaggagaccccggacgccctcgctgcactgcgcaccggcaaggtcaaggccgtcatctacgatgagcccgctgccgaaaaccacgtcgccaacgagtacaaggactgctccatcctcgaggtcattccgactggcgagcagtacggcatcatcgtcaacaaggacaacgccgctctggccgaggccatgaacgagcagatcaaggccatcgtcgacgacggcaccatggacaagctcaagaagcagtacatcggctaggactgtccaaccgttcgcgccacctcggccattttgctcggccagcaggtggtcatttgaaagcaagggcgtataatgcgtccttgctttctcatttttacgaataagaacaggggaatcattcatcatggccagtgctttgaagccgtttttcaaacacgtgctcatcactgctctcgccttgtcggtcgtgatcacgttcgtcccgctcattgcgggggcgatgacggtcgactccaccacggcgaagagcaacgagacgggcagcgacaacatcctgggcggcacgccgacgcgcatcacctgggaggccgtcgtcggcgacggcgagaccgtcaacaacgtcgtggtccagctcccgcagggctccgagttcacggacgagtcgaccgcgaaggtcacggtgctcgagggcacgaagcgcctgagccccgccagcacggtctctatcgacaaggcggcggcaaatgtcaccgtcgatttctccgatcccatcactgctggccagcgcctgcgcgtcgagatgtacaagacctcgcttcccaacgtgacgggcgaggtgcacctcacgggtacctacaccaccaccgacggctcgaccggcgagctcggcgagtctcccgctatcacggtcacggcggcgtctccggccgagaagatctccaactggctcgaccagcagcctgcggtccaagcctggaactccgtcacgttcctgcgcctgttcttccagccgcagctcgtcgtctcgtcgatccccacggtggcgaccggctggctcatctcgcttgcgctcgtgctcgtgggctttccgctggccatcccgctcggcctgctcgcgtcgttcatgaagatctcgcgctctaaggtcctgcacgtgattgcggccatctacaccggcatcatccgcggcacgccgctgttcctgcagatctacatcgcgtttttcggcctgccgcttctgggcgtcagcatcaaccagtacgtgctcgccgtgttcgtcatggcgttcaactcgggcgcctacctctgcgagatcttccgcgcgggcatccagtccatccccaaggggcagttcgaggcgtcccgctcgctcggcatgaccggcccgcagaccatgttctcggtcatcatcccgcagacgatccgccgcgttatccccaccatgacgagcgagttcatcctgctctacaaggacacctcgctgctcgcggccgtcggcgtcatggagctcatgctgtactcgcgcagcatcgtctcgctcacgggcaacatgaccccctacatcgtcgccgccatcttctacctgatcgtcacgctgccgctcatccgcgtggtcaccgtgctcgagaagcgcctggcgctcgccgacaacggcggcagcgcccccaagaagaagcgcaagggccgccgtggcgcgttctcgcagatgaagagcgaaatcgcggagacggtcgacgaagaccccttcgagcccgactacaacgcgcagacgctccatcacgaggagtacgaggagaagaaggccgccgagagaaagctcgccgaggcggagaagaagaacggagaggcacatgagtgagaccgatagcatggtgagcatccagcacctctccaagtccttcggcgacacggaggtcctgaaagacgtcaacatcgaggtcaagaagggcagcgtggtcgtcgtgctcgggccgtccggttcgggcaagtccacgatgcttcgctgcatcaacctgctggaaaaaccgagcggcgggcacatctacatcgagggcaacgagatcaccgacccgaagaccgacatcaacaagctgcgcgagcacgtgggcatggtgttccagcagttcaacctgttcccgcacctgaccgccaagaaaaacgtcatgcttgcgcagcgcaaggtgctcaagcgctccaaggaggaggcggagcagatcgcgttgaaggagctcgcgcgcgtcggcctggccgagcgtgccgactacctgccctcgcagctttccggtgggcagcagcagcgcgtggccatcgcccgcgcgcttgccatggagccgcacgtcatgctgttcgacgaggcgacctcggcgctcgaccccgagcttgtccgcggcgtcctcgacgtcatgcgcgagctggcggaggagggcatgaccatggtcgtcgtcacgcacgagatgcagttc

SEQ ID NO: 4223 - DNA, 4891 bp, Unknown
  16S sequences of unknown bacteria
tctatgtaaaaatggtaaccgaaaaaaatcatccgtttccaccctgactgacacgattacagccggaaactcttcattatttccaatactataaccgtgctcatcgtcttcgtaagacattttaaagctaatctcgtacttgccgccataagcaaggagcctgcgcgcctcgctaacatatgccgccaccgacgattcggcagcatattcatcaaaacgcttttctcccataccataggcgctttcgtcgagttcaagcgccgctctgcacgctgcttcttcagctatcatcttaagtgtttcctgctcatgcatatacgcgttcatatccccctgataaactatgcaagtcaggcccatcataaatatagctgaaaatacgataaataccttcatattttttcactcgctgtgctgctatctataacataagtcactgtgttttcgctgtcgcttataccgaggaaccttccacctgccatcacgccgtcaagtcttacgcttactctgtaatggattaacctgccttctcccttcgcatagcgatacttgacctcatcatcggaagcaacctcaatgcactctgccggaatagaaattccctccgatatctcctttacaatgcgtgtctttaattcttcggtgaagcatccctcctgcttcgcctcttccttcgctgcgtaaacgacgctttgtataaatgccaccttttctccattcacctggtccgcagtgaactgcatcaggaatattaacattatcggcagcaccgccataagcactatgaactgtttcattccgtatagctccttatgcctatgcagcttctccacatatcagccatactgttcacaaccgaatcatcctggctccccattatcatataataaatcgctattcccaagaaaatcgtactgcacaaaactataagctgcttcatttcatcacaccctcgctaatactgccagtcaaccgcactttcagctatctttcccatcgattttgaagcagtatctgcaattgattccgcatcactcgcaaaacctgtgataatgccgccaattgcaagcccgagtataattgtggccacaagtacaataagttgtttcatttcttttacccccctttctaaaacatcatttcaaacatttctttctgctgcataaagtaagaaatgtaaataaaatttataaatataaggaaaatgttagccgtcgccggaaaatagataaaattacttatcatctcatctcttttcttctgtttggttatacaattttctcttatactcttcctgtatgagacaattatctgcgaaagctgctctggctgcatatgctcccacgatgttaaaagcgccgcaaattcacgtcccgcttccgttcccgtttcttcgcacataacatcctccgcctctttcaccctccccatacgcataagcgaaagcatctttatatatacctctttaagagcactatccctttcggcaagcctgcttatcacggtatcactgtttatactgcccttatgcgcaattatcagatttctcatatatgaaagactctcgtatatctccctgtccgaattttctctcttcagcgatttaaaaaagtccatttcccttgctgattcaacaatttctctacgctttcttaagactgctttccgcaaatccaaaactcttatttttatccctgcatttcttcttttgcttagcctcatagcataagcgctgtcccttgccgctattgtgcgcgcatctttatacacagcgtcattttccgagactctgtgtacattgccaaatataaaaacgtttcccatgcaaaacagtgcgtacacgattaacatcattaacttatcattcatttcttattaccccttttgcgttcactcatcagtaatcaaacctcctgtttcccactatcttaagcagcgcaatatttataaggaacataaaaactatgaatacgaagaacgcaaatccctgcggcgtaaaaaactgattgcgtaaaagaattctcgcttccacaccgacgtattttacggctaacaccagtgaaattatgtacgaaagcggtgccattattcttacgaggtttaccgcctctgaattcatcctttttcgctcttccgacagcgttctcgcctcgcggagctgcactatgatatcttcaatcgcatccgtaacatcaattccgcttataaatgcatttgccatattgtacgttgtcatacgtccccagtttgtatttacggcaaattcaaattccttaaacgctgcctttattttttctctgtctcccgtagctcgcgctgtaagcagcacaggtacgagcagcttcctgcaaagctccggtattttttcatctgccgccgcaagctcaagcgcctgctgcatattgagcgacgccatcctatactttgttaaaagaagcgatacaaaggcttcgccctcatagctcgccttatgtcttattgtctcgagccttatacggcagagtacgtacggcatcaatcctatcaaaagtccgaacaaaaccgcactgaaaagactgtagctccttattcccgttgctgccacagctgtaaacagcacgagtgaaaccataatcaggtgcttatcgctcaatctgcctcccgttaccgttctcataagcttccttaaatgcagcgtaagaaaatccggacttctgttctgagcaagccgcgtctttagccttcttttcatttttattttcataaaaactgccttgaaatcttcacggaacagcattaaaatcccactgataagcgccgtgcaaagaatggcatatattgtttccccaattttataactcatcatttatacccctctcccctgtatagcgagtatttcccttagtgccgctatccgcaagcgctctgagcttttcttcaaaccttgcaaaaacctccgcatcctcttccagccccatctcgcgtttttcatctgaaatatcaaagaaccattcccagctgcttctcgccatatcataaaggcaaacaggtttcatcgcaggctttccgcattttctgtcaaacctaagctcgtatatcgccttgagtctcttctgcgacttgtccttcagctgtataaaatgaaatatatagtcaaatgcggccgcggttctctgcgctgtaaactgcacatctcccccatacgcatttacaatctcctgtgcaacatcatacgaaaaattgagaggatcgcgtgaatgaaatgtaattttcatacgccgcgtaccttttgccgccgctctgagcaccgtatcgagcgctgctccatctcttgcttcagccataataaaatagtctgcatcgctccggagaagattttttgtaatcgcactcaatctgtctccatctgctataagctgcactatgggtgcttccggcatgagcttttccatcggaatctcaggatctgtctctatcatcacaccctcaagctctctattctcgtatgcctgccatgttgaaagaaatgtgctcttagccgttctcactgcccccgtaaacgccacattgtacccgagactcaccatatcctcaaacagtgcgatgctctcctttggtattgttccgcgctcagcctgctcctcaaaggtgtacgacggcacaacatagcgcctgaatattattacatcctgaccctttttcaccatagcacgcctaaatatcgtcacacgcgtaccgtcgcgcatatatacctcatgaaaatctttatcaagtctctcttcaggtgtcagcataaggaacgctctcacgagctgctctctgcgcttttcagtaattttctgcggtttcagggtcattcttccgccttcgagaaaataaattctgtctcctattatctttacagaagacgagtttttatatttttcggaaaaccattctgcaattgccgccacaccccagttttcgtgatataccgcatcttcaagcgaatcataccaataaggaaatactgtagagttaagattatgttctcgcaaaaaaagacttatttttttcttgaagaagcttacctccgggacgcagcccgttatcgcctttttttgaagttctaaaagcttttccggctcttcattgccgcttttccactcctttgcaaattcgtcgtaaacctcagcgcatacgcgcctaaaatcggcaaatttattttcttcgcacgcaacgcctaaaatctcattcttaaaatcgctggctactcctgatacttcactttttcctaccccgccgcccgcacccatctcaccgctttcgcctgctctgcctctgtttcttatatattcatctaaataaaacccttccatctgttcttccttttctcatttcttatctcaagccccaaatcttttattatatcagaagctattttttcaatatcgcgttcatatttttcatttgcgagcgcttttatcgtcttatactctatttccgctttccgccccgtatcggcaagcctgacagtgtatacatttttatcgtcaagtccaagtctcttttttatatagcctgcgctataaggatctttttccatatatttgtttattattacactgtcaaaatccattctaatttcactgtaaagacctgactgattttcgtaacgccttattgtcgcctcgttctgtgccaaaatcatatatgttttcttggcttcgctgaggccgcctatcgcaagaccgttatcgagctcacttcccgtatctgcaattatagcatcgaaatcatccgcgacgttcgcaagcagctgttttaccacagccggcatataaaaacgctgctcttcctccttttttacaccgcttatgacaaacaagtttccgaagccttctgccgctttgatatctgatactgatatgcg

SEQ ID NO: 4224 - DNA, 8904 bp, Unknown
  16S sequences of unknown bacteria
atttgagtcagatgtgaaagaacagggtgatgaagaattctacagggaacaggttataccattgtacagtgatctttaccgatttttgcgtgcttttgtgggagatcccgaagcggcgaaggatatcgcccagattacgatggagcgggcatggaggaaaattcatcagctgaaaaagagggatcgggtgaaatcctggctgtttcagatcggacgcaatgtatcgtcgacatattatacgtgcaatcagacgaaaattatctgcaacgattacgaccctgatcttaccatgggaaaactcagcgacgtcgaggcggacgtgctggaaattcttctggacaaagaacgttcgcatctgattctggaagctctggaccggatcaatccgaaatataaacccgtacttcagctgtgggcgctgggtgatttgacgcaaaaagagatagcggaagttctcgatatcaattataatactgcaagaatttatgtggtcagaggactgaaagcattaaaagaggaatattttaaactggaaagaggggtacggcgcagatgaatgatgacaaaaggctgtctcagatggaggctgagctgaaagagcgattcagagaagcatttgacgattatctgaaagaaaatggagaagaaattccggatccggatctgtcttttctgaacaagcccagggagaaaaaaaggcacagccacatatatcgttttgcgacggtggcggcatgtgttgctctcatctttgtcacttcaagctctatggctgtctggatgaattccgaggccgcacacgctatgaagtttaatctcgaaaagacatttcacaaaatcacagatggatttttctctaccgatgaggaagaaaacggggaaacttctgaaaatgagatatcgattaccatcgacagtatggaggacatcgacgacgcggtggcctttatgccggatctgccgatcccggaatatattccggagggctttgaactggagtcactgaaggtttcgaagtttgtgaatggaagttatatggcagaatataaatttaatggggaagcggaaagtgcattttttatattgtcacgtcaaattttagatacagaaataacagctgggttaacgacagattatgaaactattgaattcgaggatcgaagtatttattattctgaagatctttataaaaatgaatgtggtgcaagttttgttttagattcacagtatattaatatttctggagatataaataaagaaaatatgattgaagtagcattagaaattcaaattaataagtaaaatattaatatttataatgtgactattacagagattattgtaatagccacattacatttatttatatattaacgtgataaagttttgtagagagttgcagttgattttttaccattcactttgtcagttatttcaacttttatacgatagtttttccctgagctgattggaaaactacacaaatgtgtaataccagttgtatcataaacagtataggtggatggtaatacacctgaaacatttgtgtaagatgatgaaccaagtggtgctgattgtaatgtaatttttgaagtaatatatgatgctaaaccaagactacttgcaaagacatctacatctcctcggacactgttcgcagctttaaaggagattatataactaccaatagtcattgtctcaatcgaatcatctccgtcactctccgcatatgccacgctgccgaaggctgggatcaggagggtgacgatcatcaggagaatgaggaatttagaagtttttttgtttttcattttttgttcctttcttgaaaataaagtgtgaatgttacaacgtacacagaattgacatgctacatgataaaattgtttcaatgatttttttggggaattgttttttctttgatatacaaacgatcggtattatttttttataagatcaaaattatgttgcggattagaagtcttgaaagactttgaactgaaatcgctgaagattatgaagtttgtaaatgatagttacttagtgaactatgattagtaagtagtaatattacttttacgatcacttcaaaccatattttagaatatggagcaaatgcaggattaactatgaacccgaaaaaatttagttagaaaattttacattgtattatttttgatatttatatacaggaacagaaagtgtgagttttaataaaagatcagttaattgacattacagatgatataagtcgtgtgtttatgatgaatgtcggaatagaaattcaaccttaattagataataaaagctactaaccttctctttttatgagagttagtagcttttaataaaattatctggttagggttttataaagtgtaacggtagatccttttccatttactttatctgttatttcaattttaatgcgataattcttactggaggttatggggaaagtgcaaaggtgcttaatatatggttgattgtaaacagtataagttgatggtaaaactccggatacgtttgaataagatgcagatccaagaggtgctgattgcagtgtaattttggaagtaatcgatgatgctaatccaatactatgcgcatatacatctacatcacctctgacgctgttcgcagctttaaaggagatcacataactgccaatagtcattgtctcaatcgaatcatctccatcactctccgcatatgtcacgccgccgaaagccggaatcaggagggtgacgatcattaagagaatgagaattttagaggtttttttgtttttcatttcttattcctttcttaaaagtacagtgtgaattttacaacgtatatagaattgacataccgcatgataaaattgcttcaatgtttttttggggaattgttttttctttgatatacaaaagatatgcatcattttttttgacaagatcaaaattatgttgcagaatatgggagtaccgtttgttaaattatgattttttttctgtcgaagcatcgatgatgcagtcatttccggcatagggtccattgttcctttcgggttgtgctgaagtcatttgcgcgttctgaccaggctgataccgcagagctctgctccgatttgaaaaattttagaatggccagagaagtattttgaggtgagctatgaaaagacatcgcgatgaagaatttttcaaaaagaatattgcggctctctatggtgatgtctatcggtttgcacgcgctatgacggacgatgcgctgtcggctcaggacatcacgcagaatacgatggagactgcatggcgtaatctgcacaaactgcgaagccggcggcagatcagatcgtgggtgtttcatattgcaaaagaagagacggacaagtgtctgagcgggaagagacgtgcggatctttcctttgaagaagtcgaggcggagctgaatccggaactgctgatcgaagaatcagccgatatactgaagacacttctggaaagggagcagtcggatcagatcatcgcggcgctcaatctgctttcgccgagataccagagcgtggtgaaattatgggcgatgggcagtctcagccagagggagatcgcgaaagtgatgggaatgaaccgcagcaccacgcggatttgtctgcgcagaggactaaaagcattccgcaaagcgtatgcgtctttaaattacgaatcggctgaaagtgtgaagccgcaggttcaaaagagggaaatccggcgaaaagacgaagaacaaaaggctgaggagcagccggaaataccgtgttgacagtgcgatgccggaaggacgatgacggcatcgtttctttttttatgggaattttcacactattttcacatttctgccggaaaatcatatcgtttcatcacatgacaggagtaaaatagtgactcgtagcatgaatttatacataattattagatcgaagggaaggtgtacttgatgatcgaggtgagtcatctcacaaaaaagtacggaagtaccgcagcggtcagcgatctgagcttcaaggtggagaaaggtgaaatttacggatttctcggaccaaacggagcaggaaagtcgacgaccatgaacattattacgggttatatcgctgccacggagggggaagttctcatcaatggctgcgatattctgcgggacgccggaaaagcgaagtcgatgatcggctatctgccggaaataccgccgctgtataccgatatgaccgtcagggagtatctgatgtttgcggccgaactgaaaggcatcgcccgtccaaagcggcaggaggccgtggagctggcggaaaagacagtgcgaatcgatgatgtttcgccgaggctgatcaaaaatctctccaaagggtatcgccagcgggtgggctttgctcaggcgattctggggcttccggaagttcttattttagacgaacctacggcggggctggatccgaagcagattatcgaagtcagagatctgattcgggagctgggagagaatcatacgattattctgagttctcatattctctcggaagtgagcgcgatctgcgataagattatgatcatttcccgcggaaagctaatcgcctgcgatacgccggaaaacctcatggaactcatgcatccgatagttaaactgaagatacgggtgaaaggagacgaggagacggtaaacggcgttctttccggcctttcgggaatcagcggttacggtctgcgggagtccggcgaagagggcgttctgctggcggaaatcgagtatgagcacggaaaagatatccgcgatacggcggcgatggcatttgcgcaggccaagtgtctcgtggtgggcctcagcgaagagagtgcttctctggaagatgtcttcctggaactgacggaatcggaagaggcggaatatcctcaggaggagaccggggaagaatcggctttggcggacctctgtgaagaagatacggaatcagagtcagagacttccttatctgatacagatgacggcggggatttttccgtagcagaagaaggagaggaggatgagaatgaaagccatatttaaaagggaattcaaatctttctttcacaatatgacaggtccgatctttatggcagcaattttcgtatttatgggtatttattttgtcgcgtacaacgtgattcagggttatccctatctcacggcggcgctgtcgggcatgtcgtttattctcctgctaaccgtaccgattctgacgatgcgcagttttgccgaggagaggaaaacgaagacggatcagcttctactgacgtctccggtgtcggtgacacagatcgtcctgggcaaatatgccgcgatggtgtccgttctcggaatctgtatgctgatatcctgcattctgcctgtcgtgattcatttttacggcggcggatcgctgattgcggattattccgccatcgtgggattttttctgctgggcgcggcgtatatcgccattggcatgtttgtctcgtcgctgacggaaagccagatcatctcagcggtgggaactttctgtatactgctgattcttcagctgactgacgggatcgcatcgattcttccctccggagcggcggggtcttacgtatgtttctttctgctgatactcgcggcagcggcgcttctttatgcgatgacaaagaatatcacgatcgccggagggttcggtgtgatatgtgagattattctgacgattctgttctttgtgaagaaaagtgcgttcggcggagtattcggcgattttatcacatcgctgtctctgatcgtccgatttgacagcctgctgaatctgaccatggattttacggtatttctgtattatctttctgtggcggcagtcttctgcttcctgacggttcagatgattcaaaagcgcagatggagttaggaggtggcggaacatgaagaaaatcaatctgaaagaaaccggttccggcctgaaaaaatccttccgcacgaaaagcgtcaggttcggttcttacagctctgcgctgatcgcggtggtcatcgccgtagctgtagcattcaatctggtaatcagccagatcccggaaaagtatatgtcctttgatctttcaccgggaaaactttataccataggagaaaagaccgaaaaactgctgtcctcgctggaagaggatgtgacgctgacggttctggcggaagagtcctctgcggacaggacactgtcgaagcttctcgaacgctacgaagacgaatcgaagcacgtacatgtggaatatatcgatcccgccgtcaatcttgaggccgcgcagaagtacagcagcgtaagtcaaaacagcattgtcgtcagctgcggaagcaaggaaaacgtgatcgattataacaatatctatgtcagcgattattccagctattataccaccggatcttacagcacttcttttgacggagaaggccagatcaccagcgcggtggcaaatgtgacgtctgacgagattccggccgcctatacgctcatgggacacggtgagtccacggtgggaagttctctttcctctctcatgacgaagcagaacatttctcttcaggatctcaatctcatgacgagcggaggaataccggaagactgtgactgtctgataatcaacgcgccttcctctgaccttggggcagaagaggcggatcagattatcaaatggctggatgagggcggaaaggccgtcatcacggcaggctacaccgaaacagaactgaccaatttcaaccgggtgctggcggcatacggtatgaagatcaaccggggcatcgtcatggaaagcgcgaaccactattatcagtatcctctctacgtcattccgaacatcgaagacagcgagattacttcggatctcgtcagtgaaaaagcgaatattctgatacctcagacaatgagtattgagaagactgaatccgaagatgtggtcgtcaccgatcttctcacttcctccgacggcgcctatgcgaaaaccgtggtggatggaaagatcacctcttatgaaaaggaaagcggcgataccgacggtccgtttgctttcgcgtgtctggcacagaagaacggcgctgataccggcgccgatgaaagtacggacgctgccgccggtgaagattcaccggcggaaggagacagcgttgcggacgaatccggagataccgccgggcaagaggaatccgccggaggtcaggtgattctgatttcagcggggaccattacggacgagagtctttccaacagccttccggtggcgaatttagatttctatatgaattgtctcggaagtctctcagggggagatgacagcgcggggaatatctctatcgatgcgaagtcagtggatgcggaatatctgacgatccctgcgatgcatgcgaacatctggcttgtcgtggcggtaatcctgtttccgctggtgatactggtggcgggattcgttatctggttcagaagaagaaaaaaataaaggaataatcaggaggcccgaaaatgagcagacaggaaaaaagaatgagcggcgtgtttatcttgctgctgttgatgtttgtcttcgccattctgatcgctctttattttctcatgggatattttaacgagcaggcggagcagaagagcgaaaacagcagtatgatacctgagtttgccggtatcgatctcgaggctgtagacacgttcagctatgattatgacggagcgcttcagacttttctgaagtcgggcgaagactggatttacgctgaggatgaaagcattactctgaatacggctatggtggattcaatgctgaaggttttggagaatctcaagtatgagaaagtcgtcgccgatactcttgtcacatcttccgagtatggctttgaccagccggagatgacagtgacagtcagcttatccgacggtacgcagaagattctctatataggaagcaaaaatccgatggttcagcagtattatgctgtagcagaaggtgacgataagatttatactatcgattcacaggttctgcaggcatttctgcctgtatccgatctgacagaagaagaggatacatccggtgaagatacggacggcagtacagatactgcagatacttccggcggctcgaatgcagatcaatcgcaggattccgccggtacggacagctccgataccggtggaaacagcggtacggcgtcttcgtcaggaaatacggatgcggattgagtattgcagacagaaaaaagaccgctttgcctttgcaaaagcggtgagaacgtgaagaaaagggaagcacaccttcgaaaaaggggaacagggatgatataaacgccggcggatatttcgcggtcatccgagagatcggaagaacgggtctgcctgcagatttcgcgggaaaacagcggttaaggtctgagattcagactgccgcctgttttcccgcgatttattttttagattgcgacttttttcgggaaaggcttttcatgcttattattccgcaggataaccgagtccttcaaacagctttccagcagtgctctttaccgcgtttctgtcctccggcgcaccggtgacgagaagcagcatgccgtctatccggaggtagtacccgtaaaacggttccgcgtcggatgcgccttccggtacattttcttcatagtaatcgaaattgacgccggatcgcagtgtcgtgatatacgggcttgcggaggaatccggagattttgcggattcctcaaagaggatacgccgggcctcgtcagaggatggagttttcatatagatgatgttgaatttatcgttgtctgttacgactgcggattcataggtgagctggccggtcatctctgagaccgttccgtaagcggaagctgcggttttaaagtcgtccagggacgatactttataggagc

SEQ ID NO: 4225 - DNA, 5142 bp, Unknown
  16S sequences of unknown bacteria
gttacgaggtctgcgaagcaggaagcccattggctttagacaatgggtagttcacgaggttggcgtagaagtaccggagaccattgatgagctggaagacgtttgcgataagctgcttgaggcgggctatgttccgttcacgctggcaaacggctccaagtggaccggttctatgtactatatgtatctggtagcacgtcactccggaaatgatgagtttaatgctgcatatgcacaggaagatggcggctcattcacatctgacgcatttatctgggcaggtgagaagattcaggattgggtagaaaagggctacttcaacgaaggctacaactcccttactacagacaacggtgaggaccgtgcgcttctgtacaacaatacttgtgcaatgatgcttcagggttcctggaacgttcgtaacttcgttaacgacagccaggaatggacagatgcaaaccttggcgttttccgttttccggaggattctccatcattgaggataaccatatttatcatattaataataagcagtcatattaataataagcagaacctggccggcgcagagatcggcggtatcaagatgcatgcggcgatcgacgtaatcattcgcagaaaccacttccatcactgcacacgcggactgtggcttgactggcaggcacagggaacacgggttactcagaacctgttccatgacaatacgcttccgtatgatacaaatgcgaacactgagaatctggatggcattggtgaggatatctttattgaagtatcacatggaccgacactggtagataacaatatcttactttctgatttttctctgaagatgactacacagggtgttgcggttgtgcataacctgatcgccggaagctttaacgcaattggacatggccacaacaatggtaccggtgatattccttctgcgagatatacaccgtatcatgtaccgcatcgcacggagatcgatggctttatgtcgattctgcacggtgactgcagattctacaacaatattttcgtacagaagccgatccgtccgggtatgcaggcgatccatgaggtaatgaaggacagcgagtggactgactgcaatctgattacaggtactaatccttacagcggctatccgacagaggaagaatatctggctatgtttaccggctattgcggcatgggtgctgatgtgccgcgcgatatgtactaccggaagctcccggtatggtttggcggtaatgtttatttcaatgatgcgaagccggcaacgcaggagacaaacgcgattatagataccgagcacacagtaaaggttggcgtgaaggaagaaaatggtcactggtatctggatacggatatctatgagaagcttccgaagaccgaactggcaatgattgcgacagagacactcggtatggcatttgagccggagcagtattatgagaatccagatggaacaccgatcgtattctgcctggactattttggcggacgcagagatatccatccgcttccgggaccgtttgcagaggcagaagcggctaagaaggtactctggtaaatcatgcggtagggaaaagagaagtgtccggatcagcagatcagacaaaaataaaataataagatataaagtgaaaaagcaggagcgacatctcaaaaagatgccagctcctgttttttttacaggaaataccgttttatccggtaatctttccggttcggatgattgtataggtaagatttttatagattcgggtaagatttttaaatggaaaatacatcctgtgactgttaagatagattcatcaaaaagagctgtaacaaaaaagaaaaggagagataagacatgaaagcaaacaaaaaaatggcagtaggactgtccgtactgatggcagcatccgtaatgaacatcgcgacgatcccggcactggcagaggatgacgataaggtcatcaccttctggaacgtgggaacggagggagcagatcttgagacctatgagctggcgatcaagcagtttaacgagaacacgacgagcggctatacgatcgagaatgtaccgacacagaatgacaagtataaagaaaagctggtcatcgcaatgagctccggtgagtgtccggatatgtacacgacttggtccggcggtccgatggatcagtatatcgatgcgggttatgcacagccaatcgacgatctcgcttcccagtacaagctgcaggacaagtacatggaaggtgcactggcacaggcaacttataaggatcagctttatgcaattccggtaaagaatatttccgtagcgggtatctactataataaagcactttttgagcagtacggcatcgaagttccgaagactgtatctgagctcgaggcagcggcagacacttttgtagagaacggaatcgtcccgttcacactggcaaacggaccgaagtggacaggatctatgtatttccagcttctggcagcaagaaagggtggtctggaaccgttccagaaggcagcagcaggcgagggaagctttgaggatgagtgcttcgagtacgcaggtgagaagattcaggaatgggtaaataaaggatatttcccggaaggcttcaactccatgagtgaggatgatggtcaggcagctcagctgttctataccgaaaaggcagcaatgtatctgatcgggtcatggaagaccgcagcattcaagacggactgtgcggatggcggcagtgatttctatgatcagatcggctggttcaacttcccggcagtagacgattcagatgcagatccgagtatcatgtgcggtacacttggcgatcagttcatttccttcaactgtactggtgacaagctcgcagcagctgttgagtttgcatcttacctctccagcgacgagacaatcgaccagatggtaaatgcaagcctgattccgccaatcaagggtatcgaagagaagattaccgatccgctttctcagcagatcattgaggcggcaaataatgcaggagcggtacagctctggtatgaccagtacctgaatccgactgtggcaaacgctcacctggacggcaatcaggaagtctttggtctgaccatgacaccggcggatgcaaacaagaagatgcaggaggctatggacgaggtactcgcagagtaacaggattgaacataagcccaatttcatgagaatgtgatagtatggggagctgttgccgtgcggcggccgctccccatattaattaagtcaataatttagaaaaaaccggatttgccaaaacaggatagtcgcaggtgtcctgcttcggcagctccggtaggagggaatatatggagaaacagaattcgcttggcgcacgtagtcaaagaagcgtaaaccgggccgcagcagtttttctgcttccggtgacgatccttctgattgtatacatcttttatccgattgtggattcattccggatcagtggatacaaatggagcggtatcagtgtggaccgtacctttgtcggacttcgcaactgggcaaagctcgtgaaggatatgaacttctggctggcgttccgcaacaatgtcatcattatggttttgtcaattatcatccagatcccgatcggtctggcagaggcgaccttcatcgaatttgcgggaaagaaatcgacgatctgcaaggtgctctggttcattccgatgctgatgtcatccgtagcaattggctttctgttcacatatgcgctggcagccaatggtggtatcgtcagtgagattttcaaattctttggtgggaacaatattgatttgctcggtaatccaaacactgcacttctgacagttatcgtggtcatcgcatggcagtttatcccgttttatatggtttactgcatggcggcatacacgaatattcccacagatgtctatgaggcagcccggatcgacggggcgacgcgtggacagtatttctggcatgtggctctgccgcttttgatgccgtcgatcaagagtgcggcaatcctttctatggtcggctctctgaaatattttgatctgatctatgtcatgaccggaggcggacctggtacttcgacggaactgatggcgacctatatgtataagaaagcattcactgagttcaatatgggatacggctcgacgatcgcctgcggcatgtttgtgctgattacggctctgtcacttgtgactatgcgtatcatcaatggaaagggggaggactaaatgggagtcaagtataagaaaaaccggattaaaagccgcatttgctgggcgatcgcacttgtgctggcagcagcgatgctggtcatctcggtccttccgttcatttttatggtactgaattcctttaagggtaaatttgagatgctgaccaaaggtgtctttgcccttccggattccttaaacatggcaaactatcaggaagtgctggcgaaaggattttttcgttacttcttcaacagtgtgttcgtgcttgtgatttcacttgtgattttgctgttcatttctgcgtgtgcatcctatccactggcccgcttcaagtttaaactgaacggattttattacggagttattgtagcatgtatggcgattccgatccatattacactgattccggtattccagatgagcaagcggtttgggctttatgacagcctgggggcactgttcggaccggatgtggcgtttgcagttccgatttccgtatttattctgacgagctttatgaaaggcattccaaaggagatcgaggagtcggcccagattgatggttgtaaccgttatcggatgttcttcaccatgattctgccgctctcgaagccgggtctttctacgctggcgatttataatggtgttaatatctggaatgagttcagcttctcctacacgctgactcagtcagcgaagaatcgaactcttccgcttgcggtatgggacttccaggggcagtacgcaatgaatgtaccgatgattatggcggtactgacgctgaccgtgcttccgatgattctgctgttcatcgtggcacaggataagctggtcaaaggcatgactgcaggagcagtaaaaggctgacagaaaaatcaaaagggacagttcgtttccggaaaggagaggggagtttcccatagt

SEQ ID NO: 4226 - DNA, 8389 bp, Unknown
  16S sequences of unknown bacteria
tacgcttgacccctgcggcttctgcccctctgttcatttccctgtgcagataactcttgttgatggagaagatacggtctttctttttcagaccatactgcatcttgaaaaactcttgcatttccacacagagaaaatccggcatctgaatggttcggttgcttttcttggtcttgggggaagtaatcacatccttacctttcaaatgctgataggttttgctgattttgactgtcccacgctcaaaatcgaaatctgccggggttagagccaacagctcgccttcacggatgcccgtccaataaagcatctgaaatgcgtagtaggaaataggcttgtccatcatttcttccgcaaatttctgatattcctctttcgtccagaacagcatttctttgcgttcctcgctgcccatatttccggcttttgctgccgggttggagcgcagatcatagaatcgtactgcgtggttgaaaatggcggatagctgattgtgcagcgttttaaggtagctttgggaataaggctggtgcttttcgtcacggtaggcaagcagctcgttctgccacgcaatcacatccttggtggtgatctcattgatcttgcgcttgccgaaataggggatgattttggtcttgatgatattctccttggtctgccaggtgctctctttcagccttgctttgagatcggtagtataaatctctacaaaggcttcaaatctcatgtccaagtccccggcactctgctgctggaacttttgctcccattccagagcttcacggcgggtatcaaaccctcttttacatttttgctttcgtgcgcctgtccagtctgtgtattgcgtgaccacataccattttccgctttctttgtttttataagcaggcattttcttcgctcctttctgctccgtagagcctttcattgaaatactgacggtttactcgtcctgcaacggtgatatagcctttcgcctccaactcttggttgagcttacgcatgagcttgtatgcgtgggattccgaaatctccagcacccttgcaacttcatcaactcggataaacttcttttccattcaaatcctcctttcttgatttttgggtatactattccttatttagtgtcggaatactttctggccgccatccgatttgcccgggcggacattcttaaacatatccgtttaagtctgcgccatcagtatactaaacaaattccgttatgtcaagcggttttggagaaaatattaaatatttttgtttatgctatcttgacacacgctaaacatttatgttatacttacgacaacaatccgaaaaggagagaaaagctatggcaatcggtgaaagaatccgttttatacgcaatctgcgtggcatgacgcagaagtggctcggtcaagccgtgggatttccccaaaagaccgctgatattcgtatggctcagtatgagtccggctccagaacacccaaggaagatttggtaaaggctcttgccaatgttctggaagtttctcctttggctctgaatatccccgatattgacagcgatctgggctttatccatacgcttttcgctatcgaggacattcatggtgtgagagcagagaagcaaggggacgaagtacatatcgtctttgatggaagtaagcgcacaatggacgagtccattttcaaaatgctttctgcatgggctgaccaagccgaaaagctgaaaaacggtgaaatcagcaaagatcagtatgaccgttggcgttatacattcccggcagaggactccactcagatttgggcgaaagttccgtcccaggaactaagcgatatgctaatcgaggctttcaaggataagattgaggattgagccggataacttgaatttaacgaggtatgaaaaatgacgatacaaacagttgaacaaaacaatataatatgtgctgttatcaatagcaacgaaaaggtatttacagatgtacaatctgcacttgatgtacttatgactgccaagtatgatgcaggcacaaagaacatcgtaattgataaaaaactaatcgttgaggatttcttcatcctcagcactggtcttgcaggtgaaatcctccaaaaatacactaactacggtggacgcatagcaatttatggcgattactctcgctatacaagcaaacccctcaaggatttcatctatgagagcaataaaggtaagaatgtattttttgtttctaccaaaggagaagcaatcaatatgctgacaaactaaatgctaatttcccgaaccaaaccgcacatgtaaaaacaaacgacaaaaagcccgtactgacatccgatcagtacgggcttaaatgctaatatgggaattatatgagatagtcgaaattattctttactcacaagccacttgcaacgcagaataattgcattgaggtggaatcttatcaaaaccttatcagaagaaatgggcgaagtccgaaaaccgttgcaattactgggtttttcggatttttcgttttattcccattcgatcgtgccgcagggcttcggggtgaggtcgtagaggacgcggttgacgccggggacttcgtttgtgatgcgggcggtgatcttatgcaggatggcgtaagggatctcctcgatggtcgccgtcatggcgtcgacggtgttcacagcgcggaggatgaccggccaggcaaaggtccgggcattgtcccgcacgccgacggatttaaaatcgggcacgacggtgaagtactgccagaccttcccggcaagaccggcgttggcaaactcctcccgcagaatggcgtcggcctcccgcagcgcctccaggcggtcgcgggtgatggcaccgaggcagcgcacgcccaggccgggaccggggaacggctgccggtagaccatgctgtccggcaggcccagggccttgccgcaggcacggacttcgtccttaaacagcatcttcagcggctcgaccagggcaaactgcaggtcctccggcaggccgccgacgttgtgatgcgacttgacggccttgaccgtcttcgtgccggactcgatgatatccggataaatcgtgccctggcccaggaattcgatgccgtcgagcttgcgtgcctcttcttcaaagacgcggataaactcgccgccgatgatcttacgcttctgctccgggtcgctgacgcccgccagcttatccaggaagcggtcaacggcgtcgacataaatcagattggcatccatctcatcccggaaaacgcggatgacctgctccggctcgcccttgcgcagcagaccgtggttgacatgtacgcaggtcagctgcttgccgatggcgcggatgagcagcgccgcaacgacagaggaatccacgccgccggacagggccagcaggaccttcttatcccccacctgctcccggatgaggtcgatctggtcagcaatgaaattctccatattccagttggcctcggcatggcaaacgccgaagatgaaatcagagatagcctgcttgcgggccgcttcatcggcgggccaggcgggcgcgcccttatgatcggccagatgcaccggcaggccgcagtcataaatctcttggctgacgtcgatagagacgccgtccaccacacggttcacaccgccgttcagaatgacacccttgacattgggcagcgcctgcagctgctgcagcgtaatatcatggggatggatctcactgtagacgcccagggcgcggatttctctcgcgagtctggggttttcatcactgcccaggtcgagaatgacgatcatatcctgcttcattgtttcgttgcctcctatgttctgtcgttgcgcttatcgttctatattgccgcaaaagggcggcaactgctatgataattatagccgattccccgccgcattgcaagaaaaaccgcgcaaaagcgcgaaaattatcccgccgggccgcatgggggctcctgcggggaaaaggcgcggtagctctcgcccggcgttaacgccttgccgtaataggccgccagctggctgacggtcaagaactggtagccctgggcctgcagggtgtcgatgatctggcccgcggccgtcacgctcgtctcctgcaagtcgtgcagcagcacgatggcgccgggggccgcgtgggaaatcacatgctgcgccgtcgcctgcgccgggccgccccgccagtcctccgggtccacgttccagagaatcagactgagccccgcctgcgcggcctggcaccggacctcgtcactcacaaggccgccgggcgggcgcagcagcgccgtctccccagcctcggcgtcctgcagcagcgccgctgtctgggcaagctcctgggccagggcttccggggtcatttttgtaaaatattcgtggctgtagccgtgcaggccgatctcatgcccggcgtctgcaatggccgccgccaggtccggctgctcggcgatacgatagccgcagaggaaaaacgtcgccgggacgtctttttctgccagcaggcgcagcagcgcctccgtacaggccccattggggccgtcgtcaaacgtcagggccacggcaggcgggcagtcctgcattggagccgccgcaacctggcattccggcccggcaccggccagcagcagtgccaacagcgccgcaagtgctctctttttcacgcgattccgccccccggtgcaagttttttgctttccgcttgcttttcggctgtatccttagtgttgccccggggcggcggcattattccggttttttcgcgcaaatgctgaaaaacccggtcaaagatccagccgccggtagggcacggcacagtccagacagcgcatctgcccctcctggaagcgtatccacggcgcggcaaccggctccccgcagagtgcgcagggatagctctcaaaattctgcgctttttccggcagcggcagccgcaccggcgtgacggcgaagaggtccgccgccgggctctgcatataatatgcccggctctcctgctttgtcagccccttgggccgcgccccggccaccaggcgaacagacgcgccggtatcccgccggtaaaacgaaaacgcctgcttccccgtcaggtgaaagagcagattccccttcccgacgctgcaatgcagcacgacctggatcgcatcgacgccgcaggcgtcattttccgcgatgcagaccagctcctcatcctctgccggcgtcacatccagcagctgcgcggcgtatagcgccgcccggtagcccagcgccagcccgccgcaggcgtggccgtgaaattccacacatttttcccaaagtgcctcgtgcatgatgctcctcctgttctccggggcgcgccgcgccattttaccaagcttctcctctattataccggcccgcgccgccccgcgcaacggcaaatccggcaaatttcgccgtccccctgcgccccttgccattctgcgcgccgcccgtatcatgatttttaagcaagaaagtaagaagaaaggcggtggcagcccatgcagacgatcctgctccttgacgacgatgagaccatcggcgatcttgcgcaagaggtcctcacccgcgcgggctaccggaacctccgggcctacgccgggacggaggcgctgctgcttctcaaggcgcagcagccggacccgatcctactggacctgatgctgccgggcctgtccggtgaggcgctcctgccaaagcttgccggtagcccggtgatcgtcgtcagcgccgatacgccggactgcaccaagcgctctctccggcagcatatcagcaatctgcgccgcaagctggcaagccatatcggccgcgactgcatcgaagctgtctggggcatcggctttcggctgaaactttgacaaaagctagaccgtttccttgaccgcctgcttgacttttgcctgttaaactggcgccgtcaggcaaaaggatgcacttttattcatggaatatgtgcttgaaacgaacgcgctgaccaagcactaccgcggcagcatcgccctggacggcttgaccatgtacatcccccagggcgcgatgtacggctttgtcggccggaacggtgcggggaaaacgacactgatccgcctaatctgcggcctgcaggccccgacgggcggcagctaccccctctacggggccaaatctcccgacccccaccttgcccgcgcccgccgccgaatgggcgcggtggtcgagacgccctcgatttaactgggcatgacggcggcggagaatctccgccagcagtaccgggtgctgggcctgccgtcagagggcagcatttctgatcttctccggctggtcggcctggagggcgcgggcagcaagatcaatgcccagctgcaggccctccggcgtttccggacatttcccttgacggtataattcaacgcgcatccgcttgtactcgtaactgtatttcatatagctgtacccccaataccggatgtccagtattgggggtacatagcaagcccgcacggctgctttttgtattttttatatcgtacccgcgtttttcaagtgacgacggggtatatgccagtgatgatccggcccggcatgtcaatgcttcccgtgctccaacgcaggaatgctcgccttccccgcaccccatacgggctcgccaaacgcctttttgattttctcctcaaacagctgatatggaacgatccattctttttttccattgattttccacggaaacgcaagcttgttgacctctcggttgatctccttcgtgtgcagaatgccatcgcggatatagtcataaaagcggtagccatccaacgcccagccggattgcatatggttcatacttgtaatgatgcttttgtttgtcagtcgatcaaaccacacgaacgaagccgatgcaaaataacgctccagcgcacggaccatggccgcatctgccgcatacaggtccagcaagtaatgggcggccgcatttcccacaaactccagctctttttgcttcatgtcgatcaggaagatcacaagcctggtttcaaagtgcatcagctgcaggctctttctcccatcaaagtagaacagcttgcagccccattcatacaggcgattcccggactcctgacgcacctgcgctaagaagcgcgcttcttccggcgtcacctcacctgcaaagatctcatccagcgtttttatcttgtaccgctgcagcgtctgccgcgttgcataatagatcatacacacaccccatgccgtttaaaatctcaagtcatttttcttgcgccaagcccgccatcacagcgccgtcccccgtttggggacaaacagcccacgcagatcggcccgctccagctccaggagcttcacctttttgtcaataccgcctgcatagcccgtcaggctgccgttcgccccgacgacccggtggcacgggatgaggatcgaaatttcattgtgccccaccgccccgccgacggcctgggcagacatccgcggccgccccagcttcgccgcaagctgcttggcaagtgcgccataggtcgtcgtctgcccataggggatctgcagcaaaagcgcccagaccgcctggcgaaacgccgagccgtccggatgcagcagcggcagaaaatccggcttcttcccggcaaaataaaggtccagccagcgcttggtctggacaagaatcggcgtctggcgctccgtgtgcgccgcaggcagatgcccgccaaagtatttttgcccatcgaaccacaggcccgtcagcccacactcgtccgccgccagcaggaggccgcccagcggggaggtgtaatgctgcgtaaaaatttcccggttttccatcctatttccccttgttatttggcttgtttttcggcttatagtccttcatttccgggatcgcaccccccgccacggcccagaggtacaagctggccacgctgcaataggggtgaaagcggcggcggtatttttcaaacaacggacggctgatcgcccggtgatggtagaccatccgcagcccccgctgaatggcaaggtcatcgtagctgaaaatatccggccgctgcaggcaaaacagcagaatcatctccgccgtccaaacgccgatgcccttcaggctgcttagctgccggatggcgtccccatccggcagctgggcgacagcttccaggtcaaacgccccggcgtggacctgaactgcaaagtccgtcagatacgccgccttgcgaaatgtcatgcccagcgcctggagcttggcctcccccgccgccaggaccgtctccgcattcacagcgccgagggcttcctgcagccgccgccagatcgtctcctgcgccttcgttgagatctgctggccgatgatgtgatgaacgacagacgaaaacagatccggattcaccgcccgctcaatcat

SEQ ID NO: 4227 - DNA, 32759 bp, Unknown
  16S sequences of unknown bacteria
cagaacacccataaagttaaagggtggtctgtaccactaaaaaagttaaagagcccggaatttcagcgtggcagttttaagactgctgcgctgtttttataatagggaaaacatattgcaataaaaaaactgatataatagcagcggatgtggattaataatatatatcgggagtaatggaatatgaacaaatcagcgattaactttatttttacaaaggaagggttcattgcagagataaatgaatccggtaaggctagagaaacagcccgcctgtttgaaaaaacaggtatgaagcgctgtacagaatggggtttgagaataaaccggccggtataaatccttccgaatcaccagaggaaaaagatatgtcaaatccggtgctgtaatagatatgaaaatcagtgaaggcaaggtactggcaagagtacagggaacgaggaaaaccccgtataaggtagaggtaaaaacaagtcctttgaaggaagtgctctgtcaggaaattatagaacagtgcagcagcagacttgaaaacatagaaaaactgatgtcgggagatttccctgatgatatgaaagaactttttacaagagaaggaggcctgtttccttctccgagagaaataagcttcagctgcagctgccccgactgggcgcttatgtgcaagcatgttgcggcggcactgtacggcataggcgcacggtttgatgaagatccgatgctgtttttcaaattacgaagcatagatgtggacaaattcatagatatcacacttaatgaccgggttgagtctatgattgcaaatgcagataaaccaagcgacagaataataacggagaatgtatcagagctgtttgggataatttagcatgtatccaatacaaagagcagtatagcaatatagtccggttattatgaaaaaaacagctttacggcaggacaatttgcgcaaacttgttattcttgtatacaatttgtatacaagaatacatttttttggagcatttatattgcagtataccgctttagcgtgatataataaacaggaagaagttacaaactggctacagcagttaaaaagggtaatattaaaaaaggctattgtctgtactgtgtgcggagggatagtttttttatctggatgatattacaaggggattaaagatataacgacaaaaggaggtaacagatgttcggttttagaaaaaacaaaaaagagaagggtgagacaggcaaaggtgctgcccagcctgtcacaaaagcaaaggattctaaaatagtattcaagcatgacaggaatgaagccgaaattccgtcaaaggaaacctttataaaagatatggctgcaaagcttgaaaagaatgaagaaattccggcagaagtctatacagcgcacaatgtaaagcgcggactgagaaacgccaacggcacaggtgtagttgtaggtcttaccaagattggtgaggtactgggctataccaccaacgaaaagaaagaaaaaatcccttgcgagggtaagctctactacagaggatatgatattgaggatcttgtttcaagctgtatcaaagagaacagatttggctttgaagaggttacatacctgctgctgttcggagagcttcctacacagaagcagtttgacgatttcaaagagcttctcggagagaagcgcgagctgccttacggatttgcaagagattccatactgacagcaccgtcaagaaatataatgaacaagctggcaagatcggtacttactctttacagctacgacaaaaaccctgacgacacctcaatagaaaacgtcgtaagacagtccattgatttaataggatatttccctgcaattatagcttacgcatatcaggcgcagcagtcgttcttctttaaccagagtctgcatctgcattatcctgttgcagagctttcaactgcggagaatatactcagaatgataagacccaacagagaatatacagatatcgaagcaaagcttttggatgtctgcctgattcttcatgcagagcacggcggcggtaacaactcatcgtttactacacatctggtatcttcatcggggacagatacttattccacaatatcggcagccgtaggctcgctcaaaggaccaaaacacggcggcgccaacattgcagttataaatatgattgaggatatcaaaaaagaagtaaaagacattacagattacaatgaggtggaagactatcttgtaagagttctcaaaaaagaagcaaacaacaaaagcggccttgtatacggtatgggccatgctatctatacattgtctgatccgagagccaagatactcaaggagatggcaagaaaacttgcacagagcaatgacaaaatggatgatttccttctgtgtgacttcattgaaaccaaaacacctgagctgcagaggcagatgacaggagtagaaaagccaatgtgtgcaaatgttgatctttattcaggatttgtatatgaagcgctcggaattccgcctgaaattgcaacgccgctgtttgcaacagcaagactttcgggctggtgcgctcacagacttgaagaactgaccataggcaagaaactgatgcgtcctgcatacgactgcgtggaagaacacagagaatatatagaaataggcaagagataaacttggataaaagcatctgactcgaaatcggctcaggtgcttttttatgtaaaaaaattttaaagaacctattgacagagtaaattaaggggagtaatatatagacaacgattaaacaattgcttaatcgtttaatctaaaagggaggtctgcctatgaataaattaccgcatgatcacggcaccagtactgaatttctcgaagcaaggccatcagaagaaacctttggcaaagcttcggatgcgttttcgctgataggcgactccacaaggctcaagatattgtggctcctgtgtcacagcgaggaatgtgtgataaatattgccgcagctattgatatgagttcccctgcagtttcacatcatttaaaagtgctcaagcaggccggagttataacctcaaagagagtcggcaaggaagcctattatactcttgcggacacagaggaggctgaaatcattcacaatgcaattgataagatactggatatcaaatgcagtaaataaatatgtttaaggcaaaaataaaatataaataaaaggagaaattaattatgaaaagatcattcaaactcgaaaacctggactgtgcaaactgcgcagctaaaatggaagaagcaatcaacaagctggattcagtagataaggcagttataagctttatgacacagagacttacaatcgaaactgaaaacgatatggacgaggttcttgaccagtgccagaaggctatagataaggttgaagatgactgcagaatagtgagatagttatggataagaaaaaaaagaagaaactgatatgtataatagtcgcagcggtactgcttgctgcgggaattatcataaaacatacaataggtggtcctgctgtaatagttcttcttattccggcatatgtcatagcaggatacggaccgattataaaggctgcgaagaatatatcgcacgggcagatatttgacgagaacttccttatggcaatagcgactgtcggcgcacttgctcttggggaatacgatgaagcggttgctgtaatgctgttttatcagattggggaatttttcgaagattatgctgttgataaatcgagaaaatcggttgcagcgcttatggatataaggccggactttgcggttgttttaaaagacggcaaggaagaaacggtagatccatacgatgttaacataggagacaccgtactggttaagccgggagagaaaattccgcttgacggaactgtaattgaaggaaactcttcagttgacacctcatcacttacaggtgaggcgctgccaaaggacgttgaggccggcgatgaagttataagcgggtgcattaacctttcgggcgttattaaaattaaggtaacaagtatgttcgaggagtccacggtatcaaagatacttgaaatggtggagaatgcatcaagccgtaaggctcctgtagagaacttcataacgaagtttgccaagtattatacgcctgtagttgttttctcggcagttgcacttgcgataataccgccgcttgtaatagctgatgccacattcagtacgtggatatacagagcattactgttcttagttgtatcctgtccttgcgctctggtaatatcaattccgatgagctttttcagcggaataggcgcagcctcggcaagaggtgtgcttgtcaagggcggcaattacctgcaaatattatctaaggtcaacactgttatatttgacaaaacaggtacgcttacaacaggtaaattcaaggttgataaaatctgtggtgataatcctgatgagctgctggcgcttgcggcagcctgcgaacagtattcaaatcacccgatagctgtatcaatcaaagaagcttacaaaggggatatatatacagcagacgatgtgcaggaaatagcaggcagaggtattaaagccgttatagacggcaaagaggtctatgcaggcaatgccaagcttatgcacgagcttaacatcagcaatctgccggaggttacaggaactactcttgttcatcttgcatacagcgataaatatctgggatgtatttcggttacagatactatcaaggaagatactgcagaaggattgaaggctctcaaggatataggggtgacagaccttgtaatgcttacaggagacaacagagaaaccgcagagaaggttgcagagcaggcaggtatcacagaggttcacgcaaatctgcttcctgaaaacaaagtagagatagcagagcagataatcgacaaaggcaggatcacagcctttgtcggagacggagtaaatgacgctcctgttcttgcaagagtcgatgcgggaattgccatgggcggtcttggctcggcggcggctatggaagctgcggatgtagtcataatggatgacaatcctaaaaagatttctctggccatcagaatagggcgcaagacggtaagacttgccaaggaaaacatatggtttgcccttatcgtcaagctgctggtacttgttctcggcgcattagggcttgtaaacatgtgggctgcggttttcgcagatgtaggcgttgcggtaatagcaatcgcaaactctatgagagcgctcagagttaaataaacatatgaataaggaagatgtctgtcagtgcggcaggcatcttttgtcactttgacaataattataggaatgaataatcaataattcaaggaattgatatgtaataattacaggaattatgtttaccttgttaaaactctatgatataatccagatagtgagtataatatatatgaggtgacaatatggtacaatactataatagatttgttgaaaaaagcattgagcgtaagatgaaatcatcaggtgctgttgcaattgagggacctaagttctgcggtaaaacaacaactgctcttagatatgcagcaagcgctgtcaggcttaatacattaaggactatagagcttgcaaagcttgagccaagaaatgttcttaatggcgaagttcccagagttattgatgagtggcagacggttcctgaaatatggaacgaggtcaaagcgtggattgatgaaaatccggcattcgggcagttcgttttaacaggaagctcgacacctgccgacaaagaaaagatatatcattcgggagcgggaagaattactacagtcaaaatgagacctatgagtctggctgagtcgaaggattccaaaggtacggtatctataggcgagctcttcgaaaatgccgatgctgatgtttttgatgaaaacagggattttagtcttgaaaaaaccgcacactgtatctgtcgcggaggctggccgctttctgttgtggccggagaggatattgctcttgatgttacaagaaactattatgagggcctgtttaattttgagtataatgaaaatgaaaagttccggaataaaaatccggagcttatgaggatgattttaaggagctatgcccgcaatatctcatcggaagcgccgcttaagaccattcaagcagatgttatggggcagaacaacagaactcttgataacaagactttagatgattatctcgacgcccttaaagacttatttattattgaggatattcatgcgtggaaccctaatatacggagtaaagcggctataaggtcaactccgacaaggcattttgttgatacatcaattgcggctgcagttcttggcatatcacctgacgatcttatgaatgatttgaattcattcggtctgttctttgaggatatggctgtccgcgatctggtaatatattcgtcttatttaggcgcaaaggttaaacattatcgtgacagctcaggtcttgaatgcgatgctgttatacattttgaaaacggcaaatgggcagcagttgagataaaattaggcggagaaaaattgatagaagaaggcgcaaagaacctcgaaaagcttaaaacgattgttgacaatgataatctggcattcagaatggttcttaccgcaacaggcgctgcataccgaagaaaagacggcatctatgtagtgccgataaactgccttactgtttaacagctcaaactctgcacctgaataagtgcacatgcatcttgaaaatccaataagaaccggcataaaaacagcatgaataccatccggtttggtataattgaattgcccaaaaacaattaaaatctaaaaataaatagacaaatatggcacaataatatataataatgatattaaaaagacagaaatggcctgatgttatgaatggtaaaaaagattatcaagaatatattagagaactaggtcgaaaaataaagacatatagaattatgaaagaaatgtcgcagcaggatttagaggataaaacaggtgtttctaagagaagcatatccagattggaacagggaaaatccgtgcaggttgataatttattcaaaatacttttggctttagatcttggagaaaatatagaattactggttccggatcagactaagcgaccaagttattatcttaaaaaaactgttgatgaaccgaaaagagtacgcaaaagaactgaaaagagcgaattcaagtggggtgatgaacagtgaatgatacagctgaagtttatttgtggggaacacgaataggaattatacattttaaaaacggcaaatgggcagttgttgagataaaactagacggagaaaaattgatagaagaaggcgcaaaaccttgaaaaacttaaagctgtctttaataatgaacacgaagatacctgtaaaatgcgggtgtcttttttacagcaaagaattaacactcaggattaacactatcgttaatgctaacagttttagtgttaattcttgcattttcagtgttaatgatttatgctgaatatagaactttcaggaggaaaaacattgttacaggctgatgcatttaaaaaaccgaatatgattgatgaagtccgtatggaaaagtatctttctgcagttcgaaaggaacgcaaaaatcttgcggaaaatgtttctaaagatgagatactggaactgatgggaattaccagtgacggagttcctaccctcgcaggacttatggtgttttcaaactatcctcaaggatatttccctcagctttgtattacagccgtatctcttcccggaacagaaatgggagctgtaggagatgacgatgagcggtttatagataataagcggattacaggtgcaattccggatatgctggaagatgccgttaaatttgtccggaaaaacagccgcatcaaaacaataattgatgataatggtcgtcgggcggataaaccggaatatcctgttaaagccgttagagaagcaatattaaatgcacttgtgcaccgtgattacagtatttatgctgagaatgtacctgttcgcattgaaatgtatcgtgaccgtatggaaattatcaacagtggcgggttatacggcaaaatttctatagatgctcttggcaaggtacgccctgaaacaagaaacgctgcgcttgccaatatgctggagcttctgaatataacagaaaacagatattccggtattcctacaatgcgtaatgaatttgcaaaggcaggacttccggcaccgatattttcagccgttcacggagaatttaaagtgattatgaagaatggtctgtatagtgatgaagagcctgctgatgaggctgttatagagttttgcagcactccaagaacaagggcggagattgtggcgtttgttggtaagtctaagaattatgtgatggctaagattgtaaatccactggttaaaggtggaaaactgagaatgacaataccggataaacctaaaagtccaaatcagagatttgtgaaagcataaaatttaacttgccggtaacttgcacaggaaatttttgatactaaaatatttaaggagttgaaatttcacttcaactccttaagtagaactcttttaaaaatttgaatgtctatttataattaaagccgtagttcttcgtattttaatctgttcaatcaattatctactttctatttatctccttttgctggaatccaccactggttttctccacgctctgttgtaatatattctggccaacggaaatcaataggaggttcgtaatcacaaagacaaggaatccacttgctgcccccaataccgccaccggttctctcaatgaattcgtcctttgctgcctgcaagagttctggctttgtgagaagatcaattattgtcataccaatggtctttgatgtagttacaaatgttggatcaatacactcacgaatgccgcctagtgcattcattacccacgcaggatatgctttgcctggttgaggcggccttaatgccggtcttccaacataaagccttactgtaggagcatgccagcagaattctgtataatcatcagaggtaaagttttcctgccattctggaagaacttttctgagtttttcttcgcattcctgtggtgatataagattttgaatctcgtctatgaatggattttccattggctcataacctaaatttttctgtatctctctggctttttcttttgcagctgtattgtaaactggcggtcctgcaatttcaagattcttatatgttatatctgccattacatggttcggaaggcctggccttgattttgcaatccagtctttcttccatgtacagtgagttgcaatagccgctgcctcagcatttttatcgaggacacgaataactgtttcagccatttctacatctggaacacgaataaagaaatgtatttgcccgatttgtgcaggaatgttgtctgctgtcgcctggcccactgttgtgattgtttcattcattgaccagcccacattgtttgaaatcatatgctctttgaacattttggacattgtgtacatctgtagtactgcatctgtagctccaggacatcttgttgctgaatgggaggcagggataggggaatcatctggagaagatatccaagtctctgcattatcgcatctgaaagtatacattacaccatagccaacaccacaatgggtattccaccttgttgtattgcatagtggaagcatatagaatggatggaagctgatagcggcatctaaatcatcataatatcctgcagcagcatgaataggttttgaagctcttagtttttctgccggttctccaaagtatttcaaagtgcctggtatattgtatttctccatggctgcttttgctgcaagaaatccgccaaagctactcatgcctaaaatagaatgtggatctgtgtggcctccagcaagaggacttagaccatctcttggtcgctgaaccgtatctgcggcctgacaattacctggtatgccatcatattctgcatatccaccgattgttggtccttctccgtttttccatacagcacagaatgctgtaggcattcctgcactgccttcttctacagtaaaaccttcctctctcagtttttcaacataccacttggatgagcggtattctctaaaggcagtttctccaaagttccatattatgttgtgccagtcagagaattgagtttccctttctgttatccaatccatgataaattgttttttttgttctaacatttcagtattctcctttcatcacataatgatataagattcatatgtatataacaaaagcaaaacttatgccaagcaggaagtttcgtaaaaaacactgcctgctttttccagcatgtttttctttgttctatgtaatctgaagagattgcataaaagtcaatttgttgctaaatatatttttcctacgcaaattaataaaaggaaagaaaatatcaatataaaagaaagagtcagaggctcaattttaaacctccgactcttcagaatattatgtttatttatcattaaggctcattgttgagcttgtctttgactctaaggctatatttcttaaattttctttttagagtgcttaccgacaagccggaaagtttggcgatatcttcaagagtttcgtccatttttctaagttgacaaaaatatctgtgctcaaattcttcaaaagcatctgtgtagttataattttctacaaaggctatctcttcataagtttcagtttccggataaataataatcgatacatctctttcacttattacagcagtttgtgtcactacaacaagccgttctataatatttgaaagttctcttacgtttcccggccagtcataagtacacaatgtattgattgcacggtttgatatggttttctggaatccatatttattattaaacatagatagaaaatagtttatgaaataaaatatgtcctcaggcctctctctcagaggggggatttttatagggaaaacactaagtctatagtacaaatcctgacgaaatgtactgttttcaatcatgtcttcaagatttttgtttgtggcggctataatccttatatccacatgtttttcttttataccgcctacaggaagaaacacattctcctgaacaagtctaagcagttttgtttgaagagaaataggcaactcccctatttcatctaggaaaagagtccccccgtcagcgacttcagcaaggcccttttttcctttattgcttgcacctgtaaaagctcctccttcataaccaaaaagttcagattccagtaatgtttcagataaggcaccgcagtcaatcttcataaaaggtttaccttttctcatgctgtgattgtgaatccacttggcgcatacgtctttgccaacaccggattctccgctaatcaagacagatatatcagttggcgctatgcgttcaagtaaagaaagagtttttttcataataggactttcggatatatattcgttgctatttgctttcagtacattaagctgttttttatatctttcaatttcttgttttattttatttagttcagtcgcatctcgctcatttatataaatccatttgatagcattatcttcaaatagaggaaccccagttataattagctgtttatcgcccttgcactgttttacgcttacagctcgcttttccttaagaaccatcacagtgactgatttttcatagattccttccttttccaggtcagaagccagtttccctattatctggcttttatttacctcctcaagtttttctgcggctggattcatataaacaattctaccgtttttatctgctacgataataccatcataggatacttcaaagaaattaatccagtcttcattgaatttattaagtaaattaatcataataaccccctgtttgaatttttcttatctcacattagatgtattgtgatctatttgaacttactaaaagcatttccaagttgaagttttgtaacaattgtaactgcagcaatgattatacaggccttgacaattaattatagagatgatttcccgagtgattttgataacagcaagaaagattatgtaagccttcattttgccggtaagcttttctttacaattgtgattcttgttaatgatgagaaacttattaataaagttgttttttgaaagtgtacaatatttcttgaatcatagcgcatagcatggaagcttatttggattttctcagctattgcggctttatacttgccggtattctcagaagaagcatgtttgatttttggtagataacaccctgaataaaccttacgtttatgagttctccaaatgctgctttgttttttaagaaagtgtaaattttatacgggaaatcttctttagagtcttttctatatgatatcatattttaataaaagtgtatagctaatcaaaaagacctatattagcacatatgcagttggaaattgttttacaataacttttattgtgaaggttgcacgtttgacaatgcagattaaaaaatagtaatgcgcactgtgtttttatagcgaaattataatagagagatgaatttgataatcttttcaagctatttaatatgctgattatgtagatgtgttagaaacagaatgatcatagtatctaagaggttcatatatgagctcattttaattaaatctttgaataaggagagaataaacagtcccaaccagtagaatctcgtcattttatatgtttggcatatttcttgctccggttattgatatgatataagttttagcgtgcgaaattacacattaaaaaaataatgttatatgttcacacgatgtttatcaagaaaggagatatgattatgaaactcaaaaatatcaatttggaaattgtggtcataagcgttctgattgtttcggcaatagcggttagtttaatcattgcaccgatgaaaagccttgaggtgatagactctatatatgcactggtttcaaaactttttggcacaccattactatggttttctcttgctgcaacggtattatgtttctactttgcattcagcaggatgggcaaagttcgacttggagatgaaaagcccgatttctccctttttagctatatcggaatgatgatctgtgcaggacttgcctctgccagtgtatacttttcatttattgaatggatatttttttatagcggtccggcacttggtatcgaggcaggctctgctgaatccgttgaatatgctcccgcatacagttttacatactggggtcttataagctggcctccgtttgctcttgcagctctaccaatggcagtatcctattataaaagaaagaattccggtctgcggttcagcatagtctgtgaagatctatttggacttaaagaaaattctgttataggaaagataatagatattttgtttgttataacaaccctgggtggcttatcagtgactcttgggcttggcgcacctttgattgcgtcaatgttttcttatattacaggtgttccggacggattcacattacaggtaataattatcataataattgccatgattttctcattgagctcatatgtaggtctcgaaaaaggcatgaaacgaataagcgatacaaatatctatatagcaatagcatttgttgtattcattttgattgcaggtcctactttcttcatacttaaatatatcaccaatggttttgggatagcagtacagaattatcttcaaatcattttatggacagatcctgtgaataatagcgggttctcagaaacatgggttattttctatatatgttttgcagttgcttacgctccgcttatgtccctgttcattacaaagatatcaagaggacggtctgtaaaagaaatgattctcagtacagtgcttggcggaagtttgggatgtgtcgtgctgtttggtattgatggtggctttggtattgaagggcaaattactggtaagggggattatgttgccttatataataacgagggggttggttcaaccattattgcaatgctatcgcaacttccgattcctgtagttattagttgtattgtttttactgttatgctgattctgttccttgcaacttctcttgattcggcatcgttttcgctcgctgctgtagcaacgaagaaaatcggtgcagaagattctccaaattccatgttcagattgttctggtgtatcttgttggctcttatccctataggattgatgtttgcaggagcacctttgtctgcgatacaaaccgtatgtataacaacggcgattccttttgcggcggttacaatcatttttgttttcaaaggtaaaaagtggcttaaggaggaagttgtaaaactcgaaagaaatgaggaagaaagagtttttgctgaaatatttgaaagaatgaaaagcgaaaagaaagaatagaaatcagttgtgcaaggaagctttttaatgaaatgtcaacaagtaaagtggtgtatcacgatgttgacagctatcagagcttacttaacgctatgaattcaatttaataatgaaacaaggccttgactatctcaaagccttgtttttcatttttaaagttaatttagagagagacgagggtgcgggcatactcaaaaaagacacattcgatataagcgatgcgatttctgacactgcgcagtcctttgcggattttgccggagcgcaaggtcacaggcttgatatttcagtggaaccgggtgtcagatatacaggagatgagtatgccgtaagacagcttgtttctgtccttgtagataatgcaatcaaatatgcagagcctgataccgatatatattttgaaatgaaaaaagacaaaaaaggcgtgagcataagcaccagaaatgcctgcagcggtataagcaccgaagatacaaagaggcttttcgacagattttacagaccggaccggtcaagaaacaatgcaccggcggctttggtatagggctttcccttgcaagaagcattgcagggggacataacggctggatatatgcaaagcttccagaggataacatgatagagtttacggcagagctgagatagataatattttactcagattttacataaaaatcccttttaatttaacaattaaatgataaacttcagataaagaataaagaaaggaggaatactatggaaatattaagaagcaaaaaaggtttcatatgcgatatggatggagtaatatatcatggaaataagctgctgccgggagttaaagagtttgttgactggctttacagagaggaaaagaacttcctgtttctgaccaactcatcagagcgctctccaaaggaattacagataaaactggcgagaatgggacttgaggttgatgaaagtcatttttacacaagcgcccttgcaacagccaagttcataagcagtcaggcgccaggatgcagcgcgtatgttataggcggcgcgggacttgtgacagcacttcacgatgcaggcatcactatgaatgatgttgatcctgactatgtaatcataggagagggcaatacctacaactatgagaacatacttaaagcagtgaagctggttatgagaggagccaagctgattggaaccaacagtgatctgacaggacctgcagaggacggaattatacctgcctgccgggctatgatatcaccgatagaaatggcaacggggcagaaggcatatttcgtaggcaagccaaatccgctgatgatgagaacaggacttcgcatactgggagtacattcagaggatgcagttatgataggcgatcgtatggataccgacatagttgccggaatagaaacgggacttgatacagtgctggtgctttcgggagtgacagaccagaatgaaataaaaaaattcccatacagaccaaggcttgtattaaacggtgtaggcgatataccggaataaaaaacgcagaagaacaaaaaggccttctgcgttaaaaaattttatttataaggggctatagtatttaatagctctgtatcttctgctctattatctttcatacatttccaatcgtcagttataaccatcatatatctgtcagaagagtcataagacttccattcaggaatcatatcattgcaaggattccctgttttagcgaaagcataccaagtttcccttgtagaatccaaaagatttttaggaagtttgcttggatctccgttaagttcaggatatccatcaggattgttaagcacaaaagcaagttccatacagtgcattgctcgtccatatggagaaacttctgcattatcaaggccattataatcaatgacatcttgaactttaggagcccatgaccaacagtatacataagtgtttttgttccattttgaaacagcatcagccataaacaaatttgtttggcggaaattaatatcgttaaataaatctgccgttctttttaccttgtcattgcccattgataaatatttttcaatgatttcaggatgttcaagaactgaccagtaatttccggtgtcgccacagtcctctttaccaagttcgattttgcttagaatatatttattatctttgatcggattaggataattgtcccagtcagaagcatgatagtctttttcgccgtctgtatgacctatcataatatctatatcttttgcacaaccctcaagcagtttctgataaccatttatagggacaagatcaccatcagcaactctctgttgggttcccaaatggaaaagtgtgctatgcaattcttcttgataattttcacgaatttcatcatcagtaatagccagtaattcttcaagagaagaaacctcaagaatgtcaaagactttttctgcattttttagagactgttcaatactgatttctctattgaaaatatttccgctttcggcaattaccttatggaataaacctttagccttatcgattgtaagaagagccgaaacagccccaccgcctgctgactgaccgaaaattgtaacattttcaggatttccaccaaagttttctatattttcattaatccattcaagagcacggatttgatccaatacatttaagtttatggaatctttatattcttcggtatacccattgagagaagacaggttaagggaaccaaatatcccaagcctgaaattaacagttaccattatacagtcttctttatcgttgagattttttacaaaattgccaccgtagtacgaagggtcataggtgccacctctccaattgccgcctccatggaagaagaccattaccggtttgtttttagtgttgatatccttagtccaaatgttaaggtcgagacagtcttcgtcctgcttccattgcgatgcaacttctactttatcatcgatttgaatgcaagaaggaccccattcttgtgcataaattacctcatcggatgtggttttaggagcttcaggtggttgccatctttttataggagcagcataagagattcccaggaattctgacaccccgtttttttcctgccctatataggttcctgtagcagtgactacagtgggatcttctgccttggctttttcattgccgcatgcacagatggcaaaagcaagaacaaatgttagcagaataaaaaatacttttttcattttcttttacctccataattttttaatataataaaaaagaccagcacaaatctaagatctgtgttggtctattaaaggcttcttgcctaagattcctttaagtttctcaactctcaagtgaaattagtataattctcagcaagtatctttgctcaagaactcaatatcagtataataaatataaaagataatgtcaatattttttcgaacatttttgatatttctgacattggttaaaaaaccatataaaattctttgctaatatggtacaatgcatacaagcctaacggggaggtacgctatgacaaggaaaaaagctgttgcagtagtggtttttattatttctgttatattttgcattattgtttttcttatagtgtttacagaaaatgcaaacaagaatgtatataagtctgaattagaagaaaaactttactatgcaaatgctagttatacaaacagtttcaacggaaccttaaaccagatgatgtctgtagctgatacggtagccatacaggtaggatcggtttttaaatatagtgattataacagggaaggaagatttatagaggataaagaaaaaatgattaaagctgtgcgcaatattcttagaaatgagaaaaccttgtctgcagtatatataacctttaaccctgaattatttccagacaggcaggaaatatggtttatacgaaaaggtgataaaattatacaggttgactctgcttctttagcgaaaacatggcttttgaaaacaaacccgaatacaaaatatttttatgatgcaatggaaaacggtagtttttggggaggtcctgattgggagacgatcttaaaccactataatattacatatacaaggcgcataatagataaggaaggtgtgaaacttggaatagtaggaactgatataataagcagtcaggttacggatacagtgagcaaaattaaagtatacagagacagcaaggcatatctgttcaatgagaatttagagtatattgcaaaaggggacaatgacacattaacaaaagagatttataattttataaaaacgaagaaaaaacagtttagtgaaactccaggtatatattactttaattcgaataatgggagatatgtgttttcgggaagcaggctgaacaacgggtggtttcttataataatgcaacctgagaaaacggttcttgaaccgataacaagagtgattttttttacgtggtttcttgtgggagtgacgttattcctattaatattgacaagctgttttctttttaaaaagacttttttccctgccataaacaaaattgaagaacaagcgctgtttataattcaccagtcaaggcaagcaaaactcggtgaaatgatagcggggattactcatcagcttaaacagcctgtaaacaatgccaatattgtgcttatgaatatgcaggaagatgtggaggaggggaatgttacagacgatgtaatgcaggaacatataaaagcattagcagaaagcgtaaatactatgcttccaataataaatgattttgcgggttttttaaagccggacagagaaaaaactttaataaatgttaaagaggaaataaacagttgtttaagattaatgcggatgaaactttcttttgcaggtgttagggtagagcttcaagcggaaaaagaaatagaattgtatggctataaaaatgagtttgttcaatgtatgttgaatgtcatagggaatgcgttggaagcgcttgaaagaattgaagataagagacgtattattagaataaaaacaaaagaatgtggggatatgctggtaattagtatatacaataacggaagagaaatacctgcagaactgcaggatagagtctttgagccgtatgtgacgacaaaaacgaaagatggcggcacgggaataggtctttatctcacaaaagaaataatagaagaacattttgccgggcgtatatattataaaaatttggatgaaggggtagtgtttatttttgaaataccagtaaaaaaggaaaaggagtcggatacaaatgcttaatactttaaaagtgctttatatagaagatgataaaaacacaagagatgcgctttcttattacctaaaaaagagaacagggaagcttataattgcggggatgggaacagatgctttagaacaatataatattcataatccggaaattattatagtagatttactccttccggacatgaatgggctagaagtaataaaagaaataagaaagagggatgccataagcagaattattatcacaagttcagtggaagatacagaggttatattaaaaactgtagacatgggtatagacgggtatataataaaaccaataaatcctgtggaacttacagaaaagcttaatgcttcagcagagctttattatttgcattcgagcaaaaaaaataaaggaaatataattggtgaacctgaagaaaaaagaattcgagaggcaataataaaaaagcagattctaaatcttataaagaaaaaagcgggacgtggagcaagagatgttactgtttcatggattggagacacaatcgaaataatattgtatgattcatatacagttattgaaaaaacgttacttgaagacattcataattttagctctattgaacatcttagggggcttttttataaatcaattatggaggattttgaaggaataataatgactgcgacagaaataaaagtaaaaaatgaaaatctaataatagatgtaagaaagaaaactgataaattaaaatttacaactatagaacaaataaattcaattaggtgagaaatcaagagtgattatcaagcccaaagaattgtgtggcctttattattcttgccattctcttgaccctgcgcaggcaatcgaaagaattctggagacaagaggcgtgagtgaagataatctgacagcaagaggtgtgaagcttatgagagagcttatatcaaatgaacacaaaaagtagtgctgcattggcatacgatatacaaaaacacagaagaacgaaaaggctcctgtgttttttgtatgcagaacttgttttcaacatatgttgataataagtttgaataaatatttaaactataaggaagaacttcacaaggaatattgcagagataacataagtaagtattgaaacctctctgcctctgcctgtgaaaagcataatcacactgtaagatataagtcctattcctatagcgtgtccgattgaaccggaaaccggcattgcaataagcataagcgcaaccggaacaagctgcgtcatatcatcaaagtctatctttttaagaccgcccagcattataactcctacatatataagcgctgaagaagttgctgccgcagggattattgctgcaatcggcgctatgaacatgcaggcaagaaacagtattcctgaagtcagagcagtaaggcctgttcttccgcctgcttcaacacctgaagctgattcaacgaatgtagtgactgttgatgtccccgaaagagaacctgttatagttcctatggcatcggcagtaagagcctgtttcatcttaggcatattgccttcactgtcaagcattcctgctcttgaagccgtaccgacaagagttcctatagtatcaaacatatctataatacagaaagttattataagggttataacagtaaaccagccgatctccattatatttgagaagctgaatttaaacagtgttgtctgcgccatatcgtcaaaagcaggaacaaatgatgcatctttaagcgctgcaaacggatttgtcccaaggaatatcgcttctcccgcccagtagactacggaagataccagcatgcccagaagcactgaagccctgatgcctttgtggcttaatacaactatgacaaacagtcccacaaacatcgttataacggcaagcaccatctgaggataaccgtccgcaatatttttctgtgcaagggcaggtgtcagtgagccgaagaaatctctcataacatagaacatcccgccgtccttattggaaacgcctgcgtttgagccaaaccctatattaagaagcatcagtccgattgcaggtgcaattccgagtctgattccaagcggtatggcatcaacgattttttcacgaatgttaagtacagagagcacaagaaatacaataccctcaacaagaattatacataagcctgcctgaaatgactcaagatatgacatacccgtaaggcttacaatgttggcaactacaacggcaaagaagctgttaagccccattccgggagccataacaaaaggcttgtttgcagcaaaagccataacgaaagtgcctattgccgaggcaatacaggttgcaagaaacacaccgttccataattcagatccgccctcagagccaaaggctgtcaggatattcggattcagtgctataatatatgccatggtcataaacgtggtaaggccggcaaaaatctcggtacgcacatcagtaccgttttctttaagtctaaaaatcttttccataaaagtcctcactttatattaaaaattaaccaacaaaaaataattatattataccgatatagttatgtcaaatatggacctgtaaaaaaggaaccttcctgtacggaaaagttccttttcagactctatggtgatattaaaagtactgcaaattcacggtctttaagagcatccacctttatggatttgagagacacctgcactcctgaaatttcgtttatcatagccgtcaggtcatcttcaatgcacatataaaacaggcgtctgctttcctcgatatgccctgcatttttgtaatttgtcatcagtgttttttcaaagggaccgaggaccccgtaggctgttatctctatggtatttcctgagatgaatacaacagcatctctgggacctctgccggatttttctttgagaatcctcagtacaccctttcgtatgttttcttcgatttcttttttgttttcagaagcaaagtctttgactgaagtgtcccgatggcgttctttcattattgaactgccggctcttttgagtttgtcttcaagttcatcagtgtttatgggtttgataatataatttgaaatgtcaaggtctacagctttaagaatagtagatacatcgcttactgtcgatgtgataaaaaacctgcatttcgagtctatttctcttatttttttaatcatttccaggccgcttatgcccggaagcagaatgtctataatagcgatatcagggtgatgttcattaaaactttcgatacccttttcaccgttttctgctgtatagaccttgccgaaccgtcttttcagaaagcgttcaagaccggcccttgtattatcgtcatcttcaacataaagtacttttagatttttcagcacatccattttaaatctccttgaattctatagtgaaggtaactccttcatcattgtttgtgtagtatactctgccgttgaaatgattttcaatgatctgttttgtcaggtaaagccctagacctgtaccgccttttgcctcttttgtggaaaaataaggggtaaatatatgcctgccggcttcttcagatatgacgctgccggtgttaaagatatttatatgtatcatcttttcggcaaaatcctcgctcagctctattgagatctgccgcgcatcagggggtgaggcagaagcagcatctctggcgttttcgagaatattgaatatgcattgtgtcagttcattacggtagtttgtgacagaaatttttctgtcagcattaaactctactttgattttgtttattttaaggctttctgccatcatcgacagaaccttttctatgacatcgttaataaggaatgtttctttttttcgatccggttttaaaaaatctgcaaaatcagtgattgtatctgacattatagtgatattgtccttcattttttcggtatacctgtcaaagttctcgggtgaaagctctgaggcgtaataatcatctttcatatttgcaatatctatattgatactgttcagaggctgtttgcactggtgtgcgatattgcctatcatttcaccgagtttggcctgccttgactggttaatgattattatttcgttctgctcagcagattcaacaacaggaccgtagtatctccttatcagtattgctgccagagtaattataattacaatggttaacagcattgtggtcagcagcgtttttctggtatctgctgcagaggtcattactgttgtttcgggctgggctgaaacaagtatccagccgttattaagcttcgtataggctgctatgtatctgcttttgtcggaggccttgtaccagatatatccgctgtctgccgttgaggcagctatcctgcttttgacagaagaaaacgacagtgacgcgttattatcactgctggcataaaatttcatatccgaatcaaacagtgctatttcgctgtcctcatatatctttacggatttgagcatctttacaacttctgtcatcagcatatcggagccgacaatacctatgagattgccgtctgcatcataaaccgattttgtatgggttgtcatatattcgtcaagagatgactcgtagttaagcccgccccagtagctgccgtttttaatggcgttgtaatagtaattcacgcgagggttgccttccacaagccagctgggagcataaagccttgcgtctattgcggtaacttctccgttcttgtaggcataccagacctcctccatccctgtgtggagatcggggttgaaggttacatacagtcctgagaggtgatctgtgcgccggagagagtatttaagtatgctgcctgtctgctgtttgagctttgtaaatacatcataatcatttatgtaatcatattcagaaaaagtcaccttaaccatagcctgcatcatattgaccagactttccatactgttaaaaactatgttaaactccacacatgcgcttctgactgcatattcaaccttgtcctctacctcggttttaagtgtttgctgattgcggacaagaccgataatctctataggaagcgctacgataagagctccggcaattattagtatgagtacgcgtttgaatatttttttcataattataatccgccttaaaagtgaaatttctgtattttctgttgactttgaaaattatatatgctacagtatataaccagatgagatgtttgtaaaccatttatatgggtgacaggatcttaagttttttaaaaagagagttgagtaactagaaagtcacttatcagagtattgctttttatggatcaatgcagttgtttgcgttggtctttttaatttatatatttatttaaaggaggaagagaaaatgagaaaaactctggcttatgtgctgtcgctggcagtcattctgtcaatgacaatgatgcctgtaggtacttttgcagcaaccggaagcgctccggctgctccgactgcagtaaaagctgtggcaaaaacagaaacgagcattaagctttcgtgggcaggaagctccgatgcgaaggggtatgccgtatataagtatgacggcaagagctacaaaaagataaagactactgcatcgaagtcatttacaaacacaaagctcaagaagaacaaagcctattcgtataagattaaggcatacaaaactgtaaacggtaagaaggtatacagcaaatactcatataaggttaaagctgtgccaaaggcaacttcttctaaaaaagcaacaaatgtaacaaaggtggttctggataagacagctcttcagatgaaaacaggggagacagcagaacttaatgtttcactgaaaccaaacgggaagcttgttacaaacaagatcgtatggtcaagcagtgacaaaaaagttgcaacagtagactcagaaggtaaggttacagccgttgcaaccggaaactgcactataactgcaagagctcacaacggtataactgcaaaggctgacgttaatgttcttacagacctttcaatggcagaggacatcagcaagatgactgcatttacaaaagatgcgacagaatatgccgagaagctgggatatgaacttgcatataatatggatcttgcagatgacaaaaccggtttcagaacagcaggctcagatgcagaacacaaaactgcagattatcttgcaaatgaatttaaaaaaatcggtcttgcagatgtgacaaaggaagctgttactgttgataaatggcagttcaatgaagcatatatgacattgaactataaaaacaagagcggtgaagcaaagaccctcaagattgatgatatggtgtcatatgccgcacagggaacaaaacagctgggcggtgattacagcagtcttgaaatcgcagatatgggtagaggtacagaggctgagtatcaggcttactataaaaagaatgactgcaaggacatgagcggcaaaatagttctcgtaggtgtggatcagtggaatgatatatggattgacggtccgtatatggaagcggcagttcagaaggctgcggcaattgtgacatatcctgtgggaggatatgcaagctatgatgatgacacacttaatatgcaggacatatgtgcgcctgatatgaagatgccttgcacatcaataaccaagaacgatgcagtaaggatcaaaaacgtaatcgaaaacggaactgctgtaaaggctgagctttatgttgataatgaagtaggaagccagaacggcacatcatacaatgtagtaggcaaaatcaagggaacagcaaacacaggacagcagatacttgttgcagctcactatgataagtatttctacggttttgaagatgactgcatggcaataggtcttgttgcaggtattgcaaagactatgattgactcaggtttcaaacctgccaacgatattgtatttgttgcacatggcgcagaggaatggggacgtttcgatacctcaactgactgggcaataggctcatgggaaatgataacaaaggtacatcctgaatggcagggcaagacgcttgcgcttattaactttgaaatgccgggagtagacagttataatgacaacggagttatgcgtacaacttatgaagttggaggaataggaaaagacctgcttgcatcaggacttcttgcaaatgtgaagagcttctacaaaaatggagttgttgtgaagaatgacgacgatgaactgcctagaactgactgtatttcatatcagttcaacggagttcctgcgtttatgccaaggcaggaagataaatcacagtggtcaaagaacagataccatactcctagagatgataataatgtaactgataccaagggtgacggtgttcacagcaaagcactcattgaatatcagatggcactttactcggcacttgcgatgtatattgacggaacacctgcactggagattgattttaacagcagatgtgatgattttgaacaggcaatagaaggtaccgaaaaatatgcaacagcaacatccgttgcagaatacaaggcgcagcttgcagagctcagaactgcggctaaggcaaaccttgaggaagcaaagaaaataaacgccgactatgaggctgcatacaaggcaggcgatgcaaaggctatggaagcagcaagagcggcaggtattaagcacaatacagaagcacttaaagcatttaaatatgtacaggatgaatttatgggccttgcagattatggcgatatagaagttcatcacaagtgcctgcagaataaccttgacctgtatgataaggtggttgctgcgctaagtgatggtaatattacagaagatgatatctggattgcggcagacattaacggatattatgaaaattacgcatatctgtacagtgatgaagtatgcacaatgtcaaatgatcttctgatgaatacaaaggttgaaagcaactggggttcaaacaaaatgactcttgcaatcaaggactcatggaagacaacaaagaatatgtacgcaaaatggaatgaaggcgtaaaagatgcagcagagtacaaggtattcgcagatgaatacaggggctatatggatacacttaagactaagcttcaggcttatgtaaagagtgagacaggcgcaatgaaagtattaaagacaatgctgtaaaaggtaaatagtataccctctttattgggagtgtcgtttcttgcgaggcggcgctcccgttttattttttgcctgcattgttgacaaaagcagtaagtaaacatataatgagttaatgtgcattgcgggatgtacattgtaaaatgtttaacagaaaggaagataaaatggctcctaaaaataaatttacaagagaagaaatgattgcagcagcattaaaaattgttcgcagaaacggtgccggttcactcacggctaaggctatcgcagatgaactgggcatctccacaaggcctgtctttacctgctttggcactatggatacggtaaagaacgaagtgcgtcaggctgctgaagaaatatataacgggtatataggcgagggacttaaagaaaaaatcccgtttttcggtctgggcatgcagtacattcgttttgcaaaggaggaaccggagctttacagactgctgtttttaatgcagacagcagacggaagcagcggagcatttcagtctatggtgcactcccaggaaacagcaagaggctcgcttgtaaaaatatataatatgaccgaggcggaggctgacagatattttcgagacctgtggttggtggtccacagtattgccacgctgattgtaacaggttgctgtccgtattcagacagagaaatcggaaacattctcacaggcttcagcatcagcatatgcaggtctatcaaagaaattgaaggctttgcatcagacagctttgacagagatgagattttcaaaaggctgacagcagaataaaagtatttatcgcaaaacattaaattaacacttgcttgtaacgcagcgtaatacggtaaacttaccggtaaaagaaaagccttaggcagaaggagaattttatgcttgatattaaaaaccttactaaaacatatggagacaaaaaagccgttgataatctgacgctgcacatagcgccgggagaaatatgcggatttatagggcacaacggcgccggcaagacaacaactcttaaatcggttgcaggcatactgcagtttgatgagggagaaatcacaatcggcggcaggtccgtaaaaacagagccgcttgaatgtaagaggcagattgcatatattccggataatcctgatatttatgaatttatgacaggaatacagtatctgaactttatcgcggatattttcggaatagatgagacggagcgcaaggagcgaatagaaaaatacgcgcagctttttgagcttacagatgacctgacagcagctgtagcctcatattcccacggaatgaagcagaagcttgcggttatctcggcgtggatacataatccgaaacttattattatggatgaaccttttgtgggacttgaccccaaggcagcgcatctgctcaaagaaatgatgaaagaggcatgcagcgagggcagcgccatattcttttcaacccatgtgcttgaggtggcagagaaactgtgcgacaaggttgcagttataaagggtggcagactcatacgctcgggaagcatggaagaggtaaaaggcgatgacagtcttgaagccgtattcctggaactggaggcggagtaatgctgaagacccttataaaaaaacagatgaaagaaatcttccggggatatttctacgataccaaaaccggcaggaacagagccagaggcgcgaccatagcatttatagttgttttcatactgcttgtaggaggcctgctgggcggtatattcacatggctttcaaatctactctgcggtcctttcgttgcaatagatgcaggctggctgtattttgtatttatgagtctgatggcaacatttctgggagctttcggaagtatattcaacacctatgcaagcctttaccttgcaaaggataatgatatgctgctgtcactgcctattccggtacatacgattattgcggcaagactatgcactgtctatctgatgggccttatatattcctgcgtggttacagttcctgcttcaatcgtatattgcgtcaccgcgggagtaacggcaaaatcagttatcggcgcagtatttacagtctttatagtatccgtaattgtcctgatgctttcctgcgtgctgggctatctggtggcggttatagggcgcaggctcaaaagcaggagtattgttacggtacttatttcaatactgtttatcggcgcatattatctgctgtgtatcaaatcaagaaccataataacagagcttacccagaatgctgcattctatgaagaaaaggtcaggacttcagcctatcctctgtatatgatgggaaaggcagcagagggaaatcctgctgcaatccttgtagtcattgcagttacagctgctctggcagcagtaatctatatatgcatgtcaaagagctttattaaaacagcaacagcttcggcagctctgacaaagagtaaaaacaaaaaaataaagacagatttaaaaacatcaggcagagcgcttctggcaaaggaattcggaaaattcacctcaagctccagctatatgcttaactgcggccttggaattctgatgcttccactggcgggagcggttacagttattaaaggtggctgggttatggatctccttacctctgtatttgatgaaacaggctttatgatgatattgtttgcagcaggcgtatgcatgctctcaagtatgaacgatatggcggcggcctctgtctcgcttgagggcaggagcctttggattatgcagatgctgcctgtagatacacacaagatacttatggcaaaggcggctgctcagatgatattaagcggagcagcttcccttatatgcagtctgtgcataatagtcgttgtaaaaccgggagtatacgaggcagctatattcctcctgctggtgctgatatatactgcggcttcgtcattcttcggacttgtgttgaacctcaaaagacctaatctgacgtggaccagtgaaacggctcccgtcaagcagagtatggcggttacggtggctctgtttggcggctggctttatacagttataacggcgggcggatttttcctgctgagaaaatatatttccgcagatgtgtatatgacaattatcacagcagtaacagcagggctttgcatagctatgtactgctggctgaaatcaagaggagcaaagattttcgagagcctgtaggggcattgacaggatatatcagagggatataataagaacaaaggagaaggtatggaatatataagggttactaaggataatcttgaaaaagagcacatatgctgcgcaatttcaaagaattcggatgtacaggttttgtcaaaaaaagcgtggcttgcagacaggtttgacgagggtcttgtttttctcaaagccgcggcaagaggcaaatgctttatagaatatatccctgcggagaatgcgtgggtccctgtcagggcagacggatatatgtttatcaactgcttctggattgcgggaagtctcaagggtaacggttattcaaacgagctgcttgaggagtgcatcagagacagcaggcagcagggcaaaaaaggtctgtgcgtaatttcctcggcaaagaaaaagggatttctttcagatcccaaatttcttaaatacaaggggtttcaggttgcagatacggcaggccgtactttgagcttctttatcttccttttgaggaagcagcggataagcctgagtttttaccgcaggtaaagagtcccgaagcggacgggaaaggctttaagatgtactatacggatcagtgcccgtttaatgctaagtatgtacctgtactgaggcagactgccgaagctaagggcataccggcagagtgcgttcatatacagtcggtggaagccgcaaaaaacgtgcctgcggctgttacaacctttgctcttttttatgacggacagtatataacccacgagctgatgagcgaaaagaagtttgcggctttgtgcaataaatatagagaagaaaaaatataatggagaggtaaatgcaatggagcatattattgaagtaaaaaatctcaacaagcactttggtgatgtcaaagctgtgcaggatttatcatttcatgtaaaaccgggagagctttttgcgtttctgggagtaaacggcgcaggcaagtcaacgacaatatccataatgtgcggacagctgttaaaggacagcggcacagttatcataggcggtgaggatatcgaaaaaggcatcgcgggtattacgcgcagactgggcgtggtttttcagaattccgtactggatcagccattaagcgtcaaagcaaatctgcagagccgcgcggcgctttacggaattacaggcgctgattttaacaggcgtcttgaagagcttgcggagcttcttgattttaaggggctgctgaaccgtaccgtaggtaagctgtcaggcgggcagagaagaagaattgacattgcaagagccctgcttcacagacctgaaatcctcatacttgacgagcctaccacaggacttgacccgcagacaagaaagctgctgtgggacgtggtgcagaaattaagaaaagacgagaatatgacagtattccttacaactcactatatggaggaagcggcagatgccgactatgtggttattttagacagcggcaggatagttgcggagggtacgcctcttgaactcaagaacgcttatacaggcgacttcataactctgtacggaattgatgagactgaagcctcaaagcttggcatgccttacgaaaagctgaggggggcagtaagaattgcagtgccgaacaccgctgcggcaacaaagctcataacagaaaatccgcagctgtttacggactatgaaattgtaaagggcaaaatggatgatgtgtttcttgccgttacaggca

SEQ ID NO: 4228 - DNA, 2420 bp, Unknown
  16S sequences of unknown bacteria
cgaccgcctcgacgcccgccttgccgatggagacggtggggctcaaggtgttgcacatgctgcggagctgcctgatctgggctttggtgagttccatggggattcgctttctactatctgttgcacgtatcgagtgcgcgcctcaacctgcgtcgcacgcgaaacgcgctgctttcctgcttttcgcgagtgtggagggtagcatacctcgccaggccgtgcccgctcttcacacaaggtgcccaaagtttgccgtacggcgagcgtgagctgccggggagtgcacgtcagcgaagcagcgcgcttattcgaagaactgccgtatgaggtcgcaggcgcggcgcgcctggggcgattgccgcatcccgtgtctcgcgagaaatcccacctgcacacgcgcatcggggcttgcgaggggcgtgaagtgcaagccatcggttggcagcgcggcgtcgttttggcaggtctcgaacgcgcgcgagtcgatgagggttgcgtacctgccgtgcgcgaactcgacgagcaacctgatatttgacgtcctgagctggatgtttctgagcgggtgctccttgaacagcagctcgacctgccgtgccatctccttatacgagttgcgcgcgagcggcgtgtccgaaagctccgcaagctcgatctggtcgcgatcggccagagcgaaaccctcgcgccacgcgacgccgatcgtggtctcgaacagcgggtagaagtccagcgagcggtcctttgcaatgctcgcgcgcgtcgggttgtatatctcggtcacgaacacgtctgactcgctgcatttgccgagccgctttctgatgtccttgaagctcacctcgcgcagcgccgcgttgccgagcgtctcgcgaaagcgtcccatccccgcgagcatggcggtcatgtaggccgaggcgtagatgaccaggtcggcagaagcgttctctgcatttccgccctctttcaggctcagctcgtacagggcatccatcatgtccttgtagtcgtcgaagatggtctgcgcatgcccgaggaacagcttgccggcagcggtgagctcgacgccggcgtacgtgcgctccacgagtttcatgcccagctcgtcttcgagtgtgctgatggccttgttgagcccctgttgcgtgatgaacgagcgctgcgcggccttgttgaacgacccggcacgggccagctcgataaagtaccgaaacgcgtcgacctgcatgcgccctcccgaaaaatgcagccatacattctttgcttctcgaattcttcacttttcgattatccaggctttgacctgcaatttcaaccaccggttgcatcgacctgcaaacgcttggttaatctccgtgtctcaccctgcggctagaatcgaatcgaaagcacgcgcaacggccacgccggctgtgcgcgtgcacgagaagagggagaaaggaagggaaccatggctgagggagagagctacgtctacacctgctgtcccggctggggcgaccacgagttctgcgcgatcaagaccatcgtcaaagacggcaagatcgtccggaccgaaaaggccgactacaccggtgccgaggccaacgagggctacatctgccagaagggcatcatgtcctgcaggcagccgtacaaccccaagcgcctgctccacccgctcaagcgcgtaggcgagcgcggcgagggcaagtgggaagagatcagctgggaccaggcaatggacgagatcgccgagaagctgctcgagatccgcgacaagtacggccccgaggcgcttgccatgtgggacgttgtcgcgtccgtgccgccgagccagggcatgcaggcaattctttcgtcgcgtttcctgggcctgtggggcgccaccgacccaatccagggctatggtcttgacaacggcccgttctacgcggcgttcttcgacatgggcaatttctacaagtacatgacgaccgatccggcaaacttcgattcgtccgactacatcatcgtgtggggcgccaaccccatcgaaaaccagcagcgcatcgccaagcacctggtcgaggcgcgcagccgcggcgcgaagatcgtcgacatcggtctgatcttcgacggcacggcaggatttgccgacgagttcatccccgtcaagcccggctccgacccggcgctttccatgacgatggcaaacctcatcatccagcgcaagcagtacaacgaggagttcctgctcaagtacacggtcgcgccgttcctcatccgcgacgacaacgatatgtacctgcgtgacgaagacggcaactacgtggtgtgggacctcgacaccaacgctccgatgagcatggtcatgggcagccaggacagcccgtccgagcacatggagctcgacggcgcgcacgtcgtcgacggcgtgtcgtgcaagacggcgttcgccc

SEQ ID NO: 4229 - DNA, 32759 bp, Unknown
  16S sequences of unknown bacteria
ggaagcttagctcagctgggagagcatctgccttacaagcagagggtcataggttcgagccctatagtttccaccatataaaagtgcggaatatcaaacatatatgcgggaatggctcagtggtagagcgccaccttgccaaggtggatgtcgcgggttcgaatctcgtttcccgctccaaagatacttccgcacttttattttatgttcggcgctatagccaagtggtaaggcaagggtctgcaaaaccctgactccccggttcaaatccgggtggcgcctccaaactgcatgccggcccctttcagggcattaaaaagggactgataaagtccctttttcgtttcaattctttccgtataatatgctggtatggcgaaataggcagacgcaagggacttaaaatccctcggtggcaacaccgtatcggttcaagtccgattaccagcaccagaccgtaacagtttgaaccgttcggttccaatgacgatacgatcccctttcgattttgaaaggggatcgtattttttgcttgcaacgcaattacagggcgatcacatcggtggaaacttccagtccgcggctgtcttgtatattgatataataatatttcgctcccgcagggatctgcacggaacatcttcctccgtcttgggagccgtccacagacttccactcggtattcatatccaaaatatcgttttcggtgtaatatccgataacttccccgaccgaaatatttttcggaattttaatcctcgcggattgattttcggaggttggctgcccgtcgatcaaaatcagactgtcgccacccttgcaaaagtaatcggcaaaggcgtacacttcgggcacttccaacgcgccctgcggctgcccgtgcacaaacgcgtatttcagcgacattgcggcatacaacacggaagccctgcacttactcgtcgattcgaccgaaaaccagtaatctttgttgccgttcaggaataaaaacggcgtggtattttcctttaaaatcccgacgtcatcccaaatctctcccgcacggccggtcacgagagtactgaacgtacaatgccctatcttctgttccagacttccgtaaacgggagccgcgcatacgaaccgatcgtcatacgcgaccgtctggcaggtaagaaatgcgccgtaagagatgcccgtgatccctatgtgcgaacggtcaacgcaatcgaaactccgcaaaaaagaattgctgacgatcacagaggcgatcgcatgatacgcccactgctgctctacgggataattcatatccgtcagcgcggaattggaaggtccgtgttccttgatgctctctttacggttattattcgtcatcaggctcgtgatctcgggcatcctgccctcggtatccatggcgatggcggcgtatccgcgctttacccagaaatcgacccattcgtaatatgccgtgccgtcgccgccgtgcacgagaacaatgcccggcaccttattttccgcgctcgccccttccggaataccgacaaaggcaaatactttggtatcctgcacgctgtctaaaaaataggcacggatattccgttcttcgtaatccagttcctcatatcgttcgaacgcgggcgtctgccacagggattcgggaaattcgacctcgcccccgcgatataactgcccgtccgttttcatctccgtcttgatcggaaacatcgttccctcctcctcatgttcgcacgccgtacacgcaaggcagatcagcacaacgagaaacagacataaaaattttttcatcgtttcccccctctttttcagccgcgcacggcatattctttgagcaaccgtacgtatgtgcggtagtcctgtaaactgaccgacggaggcgtctgatgatcgacggaaagaatatatctgcccctctggatacacggtttcagccgttcgaattcttcccgcagcgctttttctccgccgttcatgatcatcttattgaaattgccgataaacgcggtatccggatatcttttgcaaagttcatttacgtcgcaatgcgcctgcgcttccaggggatggtatcccacggctccgacttcgttgaaccaagcgatcgcttcaaaaatatccccgtcgctgtcgacgagtacgggcaacccgtatccgttcaagacaggcaccatttcgcggtaaaagggcgccatgaacgcgtcgaaatgctcccggctgagcatgggtccgttattgtaactcacatcttcggcaaacgtgacgtaatcgaacggaagcacgttcatcgcatattcgaccgctttcttttgccaggccttcatatccgacaacattcgtttgtacagatcgggctgatcgtaaaaggaatacaagtgcgcctcgatccccatatattcgcggggctcccagaaagcgccgtccagaatcaattcaaggatcagtttgccttcgctcttatattttttgaccatgcggatgaaatcatcgtccatacgcggttcgggatataatgtgggaagcaatattttctcataactctcttcgtcgacggcccccatgcccgcgcccacgactttggcaaacggagtgcgctcggtatacggccgcgcccaccaatgcgcaagcagatccagcccgaaatgttcctggatcgccacgacgtcgcgcatcgcataagcataattttttcctgcgggcaagccttcccccgcccagcgggaaatggtctgatcccaccacagcgaattttcgataacgggcatcctgtccgtctcttcgccccgcaaagttttcaaaaaccgttcgtccgccctcattttctttctcctcaatcgatcaaatttttcagcatcaaaaagtacagataatgtccgtaatccgtgggatgattgatcccgttgcgaaggagatcgtccggctgcttatattgcagttcatccttccacagcgcgttcacgtccgcaaggcaggcgcccgtgcgctcggaaacttcatacagtttcgcaacgtaatcgtccatgcgtccgctcgtgtggatccaacggggatgcggacaacaaggagatataaggaccgcttgcgcgcccgtatcctgcacggcgcaggtgatttccaagatatttttataataatcgtccggcggcaccgtcagtttgccgccgatcgtgttctgatcgttcatgccgaacccgatcgaaacgatatcaggccggcttgcaagaacgtctctgcgatatctgcgcactccttcgaaagtactttcgccaccgacggcaacgttttcgatcggcacggacacaccgaacttttgcgccgcatagcgggaaaagcgttcgaaaaacgtatattgcgggatacttgcttcgcagccggtgctgatgctgtcgccgaataccgtatagcggatctcgccgctgcggcgcgcttcaaaaaattctttcagtcttcccgccattccgtttttgcgggaaagttcccgcgcgcggaattcgggcgtccgctccgtcgcggcgcagcactcgtaatcggcaaagagcatatacggttcgttgccccagaccgaaaatttttcgtggtcgaaccctttcagatcgtaaaagggcgaaacgctgaaatcggggatcggcgaacctttcgcgcggcggatcttcccgtcgcggtattcatacgcctgcgcgggaaataccctgcgcgtttccccttcctgtctgtacactacgagcgacgacggatcgatatccgcatagcgcagacttttccacttttcgccttgcaaaacaaaactttcgtgttcctgtttaatcttcatcgttttccctcggaaaagcaacgccgtattcttttaaataatacgtatccgtccagagccgcatcggaggatcgcaccagcctggttcgtccgcaaacgtcgtaaacccgaccatgcgcggctccttcaacttattatggtgcggaccgaacagattgcgcaaatcgttataaatatgtaactccacttcattctcgccgtcaagcaaaaattccgtcgcgtctaaacggctgttccagaggatatcccccaaaaactttccgttgatcaaaacgcgcaccgcaacgcctttcagcgcacaggcaaattcgagcgcaccttcccgcagatgcaagcgaatcttcttccgcgcgacgatctcgccaatgtaaaacggaaatccgctctctccgaaggcggaaatgcgggtcggcatttccagttgcgaaagcgcgaacgcaccgtcggaaacgagcatatcgccctctctttgcacgcccgaaacgcagaaatctccgatcagatagatattttccacctcgggcagatcctgcaaacggttgaaatcgctctcgatcgcatcttcgcccaagagcaccctgcgcacgtcgtcagaaatgacaaaatcaaagcgcagcgatatttcgatatcccccgccgaaagatcggggagcgggacacgggaaatacattccgccgcgaaaatggaaaaatttccgtgcgaaggtacgggtttgccgttcacggcgatctcgtaccgctccgcgtcttcgatccctaaatacgcgccccgcagcggcacgtccgaatgggcgcggtagaccagtttcagactgcaatttctgccgtcgcgcaccaatttttcctgcaaaagaatgggagcgatattttcggcgtacagttctccgtcccgataacaatccacacggtcgagcaacagcgcgttccgatcggacaggccgcatacccagccgtcctccgaaaggcgcagaaccgtcgattttttctcccgattttcgccgtcaaaaacaaacagggcgctttcgccgccgttcaatacgtattcctccgagaaagtttcgcgcagggtgatcagatccagcctgctgccctgctttcccgcgcggctgcagacagaaaagcgtacgcttctgtttgaaacgttctgcacgctcacggcttcctcgttgtccagcacgaaccgccccgtccgaagatcttccgtgcagtcgccgcaaagcgcgcagtcgcggaaaggctccaacacctccggccagcgctcgtcccgatcggcgagcaaaaccgtgccgcctgaatggcggaactttaccaaaacttcgctctcttcgccagtaaagcacaccgcggcggaatagacgcatttccctacgcgcagtttttgatcttccgcgcttccgtatgcgcgcaaaatattggcattggtaacgtgatatgaaatatgtttcttttcgagaatattgacggcctcgttcaaacggtcggaaaagatattctctttccccacgccgaacgtttcttccgcctgtccgagcggactgacgagcagaacttcggcggtgttttccgactccgcggacagtgcgcaaaaacgtgataaatacaaattgaaatcgtccgcgatcttaaaatacggctgaaaaggtacgattcccgaaggataatcgcgcttgcgcctgccgcgcgcggaatacggaatgatataacacaaattcgagataccgtttccgatctgccaatcggcgatcgttttcagatcctgcacggaagcaccgtacccgacgcaggcgtaactttcggacgtgttttctttttttccgaattgtttgcagatcgaggcgacctggcgaggcgcgagcgcgttttcgccgatatcgcgtcccagccaatccatgccaggattctgcatgagggaatagacggagagtatatcgccgcaggatagtatctgcctgtcgagcgatttttcctccaaaatgtgccccgtcagcctgtatccgtaccgttcgcaccaacgcgagatctgcccgacgtaattgcgtaaaaacagggtgccgatcgcatcgaaatacagtcggcggatacgcttataatcgcccgtttccataaacagttgaatcccgaaatcgcgtatgtctgcgccgttctcccgcatgagcgtttccacggacggcgtatagggcatacgcagcataccgaactgcggttcgtcggtaaaaaatccctcgatcctgttcccgtagcggacgcggtatttttcgtatgtgatttcgataaacgtctgcacggcgtcttcgttgagcacgtcgatatatccgtcattggaaacttcgcagaggaaataactcgcgttctcttctttgcacgggcgggcgtttgcatcgtagcaggcaacgagcctgccgcatatcttttgacgggaatcgaacaattccagccagcgcgacgcatagtcggcgtttttcgccgttacctgtccgcccgccgaaccgctcggccatcccatttcatcgtatatccagaaccgtaagcccgtcttttcgcactcgtccgcacagatatcgatgatgcggaaccattcctccgaaagataaggcgccgtaagtccgctcctcgcatgggcataaaatccgcccaatccgtgctcagccatcgtgcggatcagtttccgcaacgattcttcgcatatcgtatcgttcaacgtcaaaaagggcttcggtttatataaatccgctttgtcgcgtaatgtctgcaataacttattcatcgaatttacctatcaaatgatcaaacgtccaaaagatccacttcgaatatttcgtgcaccacgctcttgccttcatcggtgagcatacgcttgttcagcatagacacggcgcgctgcgccatgatctctttgggcactttcattacggtataacgcgcctgatcttcaaaactatgctcgaaaaaggcgacgagttcgtaatctttctttttctttttgccgtacttgtgcaatacggcgcgtatcatgggaaacaactcgttcgaatagatatttaaccctatcttttcataatttccttccagaagttcaccgaaacgtgcggcaaagatcggatcccgcacgtcatagcgatataattctctctgcccgtgccgaagcgcggcgtcgtcgtatcctttcatacggtcccgcgaaaccacgctgtccatcgtggaatcgtaaaaatacgccacttccctgcatttctttttatataaaagttcggtgatgcggtacgctcccgaataatcgtccgcatagaccgcgtcgcacatgagcgattcgtgagggcggccgatcatgacgtaggggatccccgcctctttcaatcgcaaatagttatatgtgcacagttcgccgcggcggcggaagggaacgacgatcgccccgtcatagttcccctccttgatctttgtgatgcaatcctgttcggcctcctcgctggaattatagaacacgtccagactccacccgagcgacgccgcgcaggtctgcaccgcattcaagatcgcatcgaggtattccgagcggttcagcagcatcagcgcgacgcgccatacgactgcgggataccgctcttccgccgacgtgccgcccgcggacacgaccgtacgccgctttcccttcgaacaggcgagatatcccatggattccaattccgtcatcgctttgcgcaccgtaccgcgcgatacggaaaaggctgccgcgatgtcttcctcagattcgatcgaatctccctgattcaagtcgtgcgtttcgatccgatcgatataatgtttcacgatctgttcgtaaacaagaaaaatgcggttcatccactacctctcaaagttcggcaaattgatacagatcccctttccctccatagatcttctgcaatgcaaatgccttttcccgaggataaaaacctcggccgatatcgtaatcgggctccaaaaacaacccgaacatcacctcgccgacgccgttccagagcgcgtcgtgcgcggaacaattcagtcggaagaaatggcacgtatgtacgtaatccatgtccttcatcgtgtcaaagtacagtttcagccaatcggcatgcttttgttcggaatcgtcgttcagcgtataatatttgttgttgatcaagtatcggtccatatcggtgcagtcgctttccgcggcgtcgagcatctcaacgggcatggtaaacccgaattcggtaaaccatacctctttatccccgtcgccgtgctctttcatcacctgaaaaacggcgtcgttcgcctctttccacgcatcggcgtcgggctcctttgtcaaagatatcccgttgaccgtatcgtacggatgccatgccacgccgtcgaaatagttgtcggcatcgctgcacttttcttcccccgcggggaactcgccgctctcgatccgctcgtacagtgcttccatgaagcggccgagcgaagggatcccttcataggcgggcgcaagcccgggcgtgagtgtgaccgcgtcgggattgacctcgcggatcgccttggcggcgtaatacatcaaatcgacgttgatatccgcgagtttttcaaactgcgtttccgtgctgtctttttcgtatcccgtgtacgtcaggaaagtgacttgattcgtttcgttgcccatttcccagacatctacgtcgggcatcgccgctgcgacagccttccagattacataatatttgtgcaaaaactgcatatattctgagccttccgacgtatcgcgcgctgggataaaatttccttctttgccgtttgcagtggaaggcatccgcggaaaaaagtttcccatcgccgtaatttcctctacgccgtttttgcggatctgatcgacatacgtctgatacagaagccgcgcgtttttatcgatcgaggagaggctttcatcggagaacaccgtcgtttgattccatcccgcatacagcgtctgcggcgtgacccaaagtcggaaagttttcgcccccagagcgccgatgagcgaggacgccttttcggaattgaatccttccacgcccgaacccgcaaagggttccccgatgccgtagagcaaactttctccgacttccgtgccggggtccggatcgggtttatcggaatccggggcggtgttacaagcaacgagggaaaccgcgacgagcaatgccgcaagaaacgcgcataatttacggatcatttttcccctcacgatttcgcgggcgtttcgtatttggcaagatcgccgctgccgccgtagatctgctgcaatttatatgctttcgccttggggctgaaccctttatcgcccgtcggttcgcggaaaaatccgaaatgcgactcctgactgccgccccaggtcgcggcatactcgcattcgtacaaacggaacgagagcacgctttcgacgaaaggcagttcgttctcgcagtattcgaaaacacgctcggtatagccgatctgcaattcttcgacgtcgtccacgccgttatcggaaaagccgagttcggagaaaatcactttctttccctcgtccccgttttcgatcacgatattatagacatccttttgcgactgtaaccaggattcgtcgatactttttgcatacggatgccagcaaagcgcgccgaaataatcgtcgggatccttcgacttcgtgttgccgtagggcgcctcgccgctcttgatgcgggcatagacgtcctcaacgaaatattccacgtttttcatgttcaactgcgtgggcgaaagcccgggcatgatcgcgatatttttcggattcgccgccttgatgcccttcgcggcataatacatataatcggtaacgacgatcacctgttcctcgcgcgagaatccgcccacgccctcttccagcgatcctgcgatcccctgatagccgttgggatggaaaaaggtattggtgttaaactcgttgcccatttcccactgcgtgatctcggggaacaattccgcgactttttgccacatttcggtaacggcttgcagccaatccccgtagtgctcgtcgtcggggcgcggcgcgctgtttgccgaatcggggcggaagcccgaatatgcggggaataaactcgcctgcccgatcaggttggtgacgcccgcattgcgaaacttttcggacgcggactgcaaatattcataaatttcttcgtcgtattgaccgggcgactggataaacccgttcggcatacggaaacggaatgattttgcgccgagcatggcgacaaaatcgaccgtcgtatccagatcgaacccgcgcacctgcgtgagagaagtactgctcgcgcccttttcgtagagcggttcgtccatgccgtacaggagcgatttatcgatatccgcataaggatctttttcgcccccgccgcaggcggatagaccgaacgccgcaccgagtgcgaaagtcccccctaaaatcaaacttaaaatctttttcatcagcctttaatacctccggctaccgtattttccatgatcgttttctggaagatgctgaaaagaacaataatgggaacgacggagatcgtcatgatcgcaaacagcgcggggtaatcgtaggaattggcgcccgtcgtgatatccgaggacaactgatagatgccgactgcgagcgtgggatagttgcgcaaatacatatacggcgcataatagtcgttccaatacccgataaacgtgatgatacccaccgcaaacagcgacggtttcgcgagcggaagcatgatcttgaaaaagatggtcgcatgccctgcgccgtcgatcttcgccgattccgcgtacgtcaaggacagattcttgaaaaaaccgtacagtaggaagaagttgaaaccgaatccgcccgaatacatgatgatcaagccgatatgcgtgcccgccaaccccgtatcgttcatcaggcgataggtcgtggcgatgctgcccgtcgtcgggatgatcatcgtaacgatgaccaacccgtagatgacgttgcgcaatttgaaattatatttactgaccacataggcggcgcaggaactcgccagaatcgaagcgaaagttccgcacacagacagaacgatgctgtttgcaaacagttccgccatattatactcggtaaatatcctcagatagttttccccgtaaaaggatttggggaaatccagcggataccaaaagaaatcaatcttcgagcggaaggattgaacgaatacccataagagcggatagaccagcgtgatcgcatacaacgtgaaaataatgtagacgatcgtatacgcgatcttatgctctgaaaaggccttattgatcccctttttcgcccgaacctcgtttgtctttaccatacaagatctcccctgttattcattccgtcaaattttctttttcttacgaaagcacagcactgccgcggcaagcactacggcggtcccgcccgcaatactgaaccctactgccgtacctgcgcatccctttttcttcggatcttcgtcgccgggtttttcgcccgggtcttcgccgggattttcaccgggatcggagggcttggaaggatccgtattcggattatcgacgcccgccatgttgacgaactgcacgtcgtcgatcgtaatcctgctgccctcgggtacggtaacgcctatgcttcccacgaggcggatgccttccaacgtgcacagagccgtttccagcgtttcctccgactcgtcctcgatcatgccgtagagcatcgctttatcggaagcgagttccagacgcagcgtaacttttttgcccgcgagcgccgcttcgacaaagtttttaccgacagcgatctccctcgaaccttcgggagtgataaattcaacgctcgttttgtccgtaaaccgaagggcgtacccgacgccgtcctgcccgaagatcagatcgaaggaggaagaacccgccttcatcgacgtgacgtcgaacgtgaaatagcagatctcggagaaccctttcgtgcggaaagttccgcctgcaatgatcaatgcgccgtccttgaccgcaacgcctttctccgtgatcgcccacagatcgccgttgaaataccctttgtcgaaattggcttcggcgttgggttgggtggaatgattctttatataaactttaacgctatcctgcaaaatgatctcttcgttcacggtcaccgcgaattcggcggtatagataccctgcgcggtaaacttgaacgtaccgtccgcctgcgccgcgatcgcattgcctgcggcatcctttacgataacggagagttcgccgccctccggcatatcgtccaccgtcggcgtcagatggaacgtttcgtcgaggtatccctcgcgtttgagcgccgcaaagttgaacacgggtttcgcttcctgcacgtttttgacgcgcagtacggcgccgccgttttcgacgttggttttgagcgcgtcgcctcccgtacggatatacgaatcggtcagaactttggaaaaatcatcctgaaacaaagtaacgccgtctttatccgctattttcaggttatacaggacgacgtcctgatttgcggcgggcgcgcggaatgcaaatccgaagtagccgccgtccgtcatttccttggagtaaagattttcctgcgtgaggatcagaatgtcctgcaacgactcctgcgcggtcatgcccgtatacgaatccgcgccttcgatgctggaaacgtacacgttgagcgtaccggaagcggaaatattcatgcgcaggcggatacggtcgacgaatttcagaccgccctccacgccggtattttcgttataattgccgttgtccgcagcgttcgcatcatacggtaaaacgattgcggaactggacatctgcataacgtgcgtattataaaaattgctgtttgttttatccgtgaatacgccgaaaaagaacgtcgcttcgttccgattcatcttcatatcgagcgtgatctccgcgccgccctgtactttggtgtcggcatagaccatcacgtcgcccatcgtcatcttagaattgacggaaagcgaactctcttcgacgatttcgggaacggcgagagcgcccgcttcgatcgccgcgtcgatgccttcgctgcgcacataggcttccgtcgtgtatttcagaaaaccgttatccgtaaagatctggttgcccgcgccgtcgcgcacttcgagggagtacaatttgtacgcgtcgtttgctcccgcacggagcgctaagcccgcgtagatctgctcgtcggaagcgagagcgctgtaataccccgcctgtgtcgttatgagcgtttccgttgtgatttgcgcgttgtcgcccacgtatgtagaaggatcttccgtgctgcgcgcgtaaacgttcacgtcgccgttcgatttgatctcgaaacggtacattaccctattgtaatagtacgtgttccaataatcctccatatatttgccgttatccacaggcgtcgcggcgtcgctgaagaaagttttgatctcctgcgagcccatcataaaggacttatgcgcatagggagcactgtccgttttatctgcaaataagccgaaaaacatcaccgaatccgtgtactgccccatttccgcctcgacatagaggtttaagccgtttgccagagtgagcggggtattgacatacgacattttatccgccgcactgctgcccgcaatactcttattgaccgttatatacgattcaggcgcgctctcttccgcggcaaaggttcccgtgaagcaaatgccgaagagcagcgcgagcgacaaaatagatgttatgatccaattgtatttctttttcatctctttttcctctttaagccagcagggaagcatcgcctgtgacccgcttggattcctctacttcaccctccgcaatgaacgaacggttcggatcgaggttggtgatcgaaaaattcgaaaccgcgaaattgccgttgtaattgcagcagatgccgatatagccgaacgtgttgatatcctcgacgaccgcgcgcggaacggagagcatgctttcgggttcgtccgcatatttgaaataaagagttacggtgcggttcacggcaacaaggcggacgtttatacgctcgtgacccgtttcgctgttcatatcctggaaaaagttatacgaactttcgatcatggaagacgccgtattgaactgcaccccggaaagcccctcgatattcataacgcccacgatacccgtatcatgattctcattgcgcggagcgaaagtgatcgtcggtgcctgggcatatccgtcggtgtaacgatttttggcaaacgtgatgccgatccaactgcagccgcccgccccttgcgtaatgtcatacagatcgaagttcaatacgaaatctgcatactgatgcttggtcgaaaaatttgcgttggggtcagcgttgatgaaagagatttcgtcgtaacgggtcttcattgcgctgccgccgatataccagttttcgccgttcagataggtaatgccgtctttatccttgattgtgaaatcgatagcttggctctgagagccgctcgaaacatacgagtagacgttcaaagtaacgttgtcgacctcaaatgtcgaatcgctgcccgtcgaaacaaacgcgatgctgccgtcgacggaggtgaatccgttcagcgtcaccgcaaaagcgttgttgcaatacacgtccgccgtaccgttcgttttgacgcggaacgtaaataaattagcgccggaaagttcttccccgaaagcatagcggctgtccccgacggagagcacgctcttgccgtccaccgttttcaggttgacgaccgtctgagaagaagcgtttttgccgacgatgagattcatgccgtccgcgccgacggagaacatatgcaactgataggaaagatcgaatgcggagatcagcctgtcgtccgactgcactcgatacttcgattcgatggaagcgccgttggcgacgcgcgccttgccgagcgggccggtaaaatacgatccttccagccttagatcggcggactgccacatacgaaactctttttggggatctgcttgcgaagccccttccatgaagtcgatgcaatcgccttttagatcgcccttcggggtatagagcacgtcgccgctcgccccatcggtgaccttgatacccgacaccgtaacggtgcccgtgcttaaacttccgaatccgaaatatcccgccaaagagagattatcgatcgtgccgaccttttcgccgtaagcgggttcgccgctctcgggcatgggcgcgataaagatatccgcactgttttcggggaaatcgcccgtggccgaagcggtcttcttgatgtgcgtgacgactttgacggcatacatcgttccgtcgctcgtcatcgccttgtcgccttcaagcgcgatcgtaacattgccttctttgggctgcgtaccgaatccgttgtagttgttgatcgaactgtccgtaaagacgagtacgttgcccggctgcccgattatcgtggtaaaattctggtcggggctgtccaacccgatatacaggccgaaccagtcgctcgggttacaatctctcgaaatcgtcatttcgaggatataatcctcggtaagcggcgtccccttgccgtcggacgcggcggagttgttcagccccatccagttgcaggcaggcgaaaactgaccgtttaccatctggatcgcgccgccgtaatccttgacggccgcgtccgttgcagaagacgccgtccagttgtccgtgttcagcaccgacgaattgaaatcgtcgctgaacgcggattccttggtgcgggcggcatcgccgacatatccgttcgggatcgacaggaacaggctgcacaaaagcagcagcgacaataaaaccgtaccgatcaaaccgaacctggttttgctttgtttcatattttcctccttgtgatttattctttctaaatatctatcaaacttaaaaatcgacgtccggcgtgattttttccatgaaccatttaatgaacaggacgaaaggcacgcctaagatcgagaagaagaggccgagcgccgccgcgctttcggtatcgccgccctgcatcaactgcatcacgcgcagggcgatcgtacccgtactgccgtttacgccgcccgtttcgccgcacaaaagcatcggctgcaaatagtatccgaatatgctcatagagccgataatgaacagcgtcgtgatcgtaggcatacacaggggcaggaccatctgcaccatctctctccaaagccccacgccgtccagtttcgccgcttcgaatatttcctgcggtatgcgcttgatcgccccgttgatgagcacggcgttatagccgagccccgcccagatgccgaacagaaacaccagcggcatcgccgtcggtgaaagcgaagagaaccagtctacgtccacgccgaacagtttgctcaatgccgaatccacgggcccgaaatccacgtcgaacataaaacggaaagacatggcgaggacgacgacggacaatatggacgggagaaagaagatcacgcgatacgcgctcgttcccgcaagttgtttggaaagcaaaaatgcgatcataaacgaaagcggcaaaataatgaaattctgcacggggaagcataacagcgagttgcgcaggttgttctgaatggcgatatcctcgcccatgaacatatcgcggaacaaaatcgcgaaacgttcgaacccgaaccactcgtactgcgccgtctgcgaattaaagtgaaaaaacgtcagacggaacgtgtcgaaattgacgtaaagccagaacacgcaaaaatgcgcgagcggataggcgagcatcagacatatgaatatcgttgcgccccaatctcttttgcgtttcttttgcttcatcatctccaaagcggtgctttccatatctgttttccctattaagaaagtttctcccaagtcgaccactgttttttggcatattcatacatatcgttgacgatccattcgggcgttaccttcgtttccgtcatcagattgccgaacacgttgtcgccgtacttgggccattcgctgacgtttgcatacacgtataacggactgtttgaaactctgtacatcaaagtgctgttttcgaacagttcaaagcaactctgcgcaaattcgctcgtcccctcgatcgtggaaggtttataattgaacgcgcgcggcacgcccgtgattttcgtaaagcgctctacccactcgggtctgttcatgtaagccaaaaacgctttcgccgcgtctacgttctttgcgtttttgggaatgcaggcaaaatctcccgccgaagtattcaaaatctgttcgtccgactttgcgccctcgattatgggcgtagccatcatcttcatgcggaaaccgggtttcgtgaactctcccacttccgtctcgatccaagaaccggtcggagtcatcgccgccttgcccgctacgaactgcgtctgcgcggacatatgatctcttcccatcggcttgtctacgctgttgatgatcgatccgtcgtcgggatcgacgatcaaatcctgccacaggcgaagcgcattcgttctgccgggatcgttgaacacttcgggggactcgaattgatagaaattctcccacgtatccacgcccgaagactgcgcccaccacgtgagcacgggaaaactccaataccccatttcctggccgccccaactgaagggcgcgatgccctttgcaacgagtttttggcaaagatccttcaactgcgcttccgtcttgggaggctgatcgtatcctacgctttccaaaatatcgacattgtacacgatacccgtgcacggagacgtccacggcatgacgtaataatgttcgtcatctccgcgtttgggcgccattttgccgtaatccacgaaatcggaagtcatgatgtctttcagcgtcagatcggtctttgcaccgctttccgcatatacgccggtattgccgacgtcgtatttcgacgtgatcttgatatcgttgacatcataactgaacgtgccatcgaacagatcgtccatatcggcgagccagcccttttgcacgtattcgtgccagttcgtgtacaaaatgaacatcagatcgggcagatcgcggttggattccaacagcgttttcgcattttccgtcgctttcgcatccgccgtaagttcgaccttgatcttcgtcgcctcctcgaattccgcagcgagttcttccagccattcgctgcccgtgccgcctttataatatgtaatcttcaaggtgccgtttattcccgcgtcggaatattcgcggcagccggcaaacagagtacatacgcccagacacgcagccaatgctaccatcaataatctctttaccttcattgatttaattcctcctacctaatttattgatcaaccgaagcatcatctcttcggtaaatttcccgccggtcagatcgtacagcgcgcggagaggcatattccgcatcacgttgtcgaacatcggatttccgatcgccttaccgttttcgatgcgcacgtccgcattgaacgtgcccatgatcgcaagacagagatacggtttcagttcctcgtccacgatcctgcgtccctccgccgtgcggagcaactcgcccacgatgctgtttcgatcgtaatgcagcggatccccttccacatccagttcgccgccgatgatttccgtttcgcagtcggaacagaatgcaaatctgtattttccgccgtataagcggaacgaatgctgcgaaacgtcataatttttcagccgttcgaggggcaggctgtattgcagacgccgcatttcccccgctcgcaggaaaactttatcgaataactttaattcccgcacgggccttgcgatctcctcatcattgcacgaagcgtacagttggacgacctccgccccgtcgcgcgcgcccgtatttttcagggtgacggagatagatatttctttctcgccgccgatgatttcaagcccttcgtacgcaaacttcgtatagccgagcccgtatccgaaaggatacgcgggacgaatgcctttggccgtataatagcggtaaccgacgaatatgccctccccgtaatacgcggtgttcccgcgatttccgaaatacggagccgccgaacagtgccgcagatcggcgggaaaagtctccgcaagacgccccgacgggcttttttcgccgctgacgagtttcgcgacggcgctgccgacgcccgaccccatcatgtaacattcgaaaataccctttacccgatccctccaggaaacgtcgaccgcgctcccgctcatcagaagcacggcaacattcgggttgatctttgcgatcgcctcgatcgcttcgatctgttcggaaggaagcgcaagcgacgcgcggtcgtacccttccgactcgtacgcggcgggcaagccgcagaacagcaggcatacgtcgcaggtatcggcggcccgcaggctctcttcgaaatctgcgctcttgccgttttcgccgaatgtttcgcaatagaaaacgtcgttgtaaatatgtttcaattcatctaagggcgagacgggcatttcgtgctcgacgtgcgcgcttccgcctccctgcaagagaggctctttcgcgaaaaagccgaacactccgatctttttattcttcgggacgggaaaaatcccgtcgtttttcaaaagcacggcgcaatccgccgccaactcgcacagcaaggctttccgctccgcaagcgtatatactctgctctttttcctgcgcatcgcgcacaggcgcagtacggaatcgatcagatccgcgcaggccctgtcgagttgacgcatcgcaagttctccgctctccacggcgcaaacgagtttttccgaatccgcgggattggaaggcatttccagatccattctcgccctgacggatgcgacgatatcgttgacggcgccccagtcggaaaggacaaaccctttgaacccccattccttgcggaggatatctacaagcagatctttgttttcgcttgcatacacgccgttgatcttattataagaagacatcatggacacgggcgaggctttttcgacgactgtgcggaagggcgacagatacatttcgtgcatcgtacgttcgtccgcgaccgaatcgacgctcatgcgccgtgtttcctgattgttcatggcaaaatgctttacgcagcacccgacgtgctcctgcgcgcccagcacgaacgccgccgccatttcgccggaaagatgcgggtcctccgaatagtattcgaagttacgcccgcacagaggcgaccttttcagattcatcgccgggccgaggatcaaatcgagccctgcgtttttaaattcgctgcccagcagttcgcccgcgcgccgcgccgtgtccacgctgaaagacgacgccagcgcgcacgcggaagggatcacgtcggtgtcgcaccccggcatgcgtatcccgttcggactgtcggacattttcacggagggcaggccaacttcttcgatctccagagtgctccagcaatccttgcccgtcaggatagcggctttttgccgcaaagagagtttcgataagatctcacgcgtttttttcagcatttttcatcctcgttttctcattctgtgtccctattgtaatataatttatcccggagttaaagcacaaaaaatatacaagtttgcgccgtaaatcccgacaaaacaggcaatttcaagtttaaaaaatatacaaatttccgcggcatgaaaataaattgctctctttttgaacttgctttttgccgctttttgatttataatcgaaaaaacgaggcgtacggggacaattttacgatagcgcccgtactaaaaaggagtaacatgaccgcccgcgaacgctgtttacaagtttttgaaggcaaaacagtcgacagattgccgaatttcaacattatcatgggcttttccgcagcctattgcggcaaaacgtaccgtcaatacgtttccgatcaccgcgtactctgcgaatgcgacctgcggtgcgcggaagattttcggctggatatcctttccgccatttccgacccgatgcgcgaagcggaaagtttcggcgccgaggttctgttgcccgaggacggcgtaccctacagccccgcgcctttgatcgcggacctttcccaaatcagacgactgaaagccgcagcccccgaaaacagccccagaacgctcgaccgactgaaatctgtggaatacttcaaaacgatcgggaaagactattgcatcggcggttgggtcgaaggcgccttcgcagaatgctgcgatctgcgcggcatcgaccgctttctcatggatatcgccttggaagaaccggactttatccacgaatttttggaaaaaacctgcgaacaggccatccgtttcgcactgctccagatccaggcgggcgcggatatcatcgggatcggcgacgccgccgcctcgctgatctctcccgccatgttcgaagaattcgccttcccctatcaaaagaggatcgtcgaagcagtacatcgggcgggcgcgcgtaccaaattgcatatctgcggcaatacgagcgcggtactgccgcagatgatcgaaacgggcagcgatatcctcgatttagactggatggtcgatatcggaagcgcaaaacgccttttgcaggacaagacgacgatcctgtgcggaaattacgaccccgtagcggtgctcttgcagggatcgcccgaaaagatcgcgcgcaaagtaaacgaatgcgccgacgccgtcggaagttactacttatcttcggcaggctgcgaagttccgcgcgatacgcccgcggaaaatctgctcgccgttgcggacgcgctcgcagcaaggacgccaaacgcataaaaaaaaagatatccgaaatttcggatatcttttttcttttactttttattattccgacgctttaaaattgtaaacggggacgatacggcagacgacatcgaccgagggaccgatctgcgcgaggatagaatccatgctcttgtacgccatgggggattcgtccaaggtatctacggcaatgcaggaagaataaacgccctgcatttcgcggcggtattcctccatggatagcgtttcatttgcctttttgcggctcatgacgcggcccgcgccgtgcggcgcggaacagttccattcgggattccccttgccgatacagataaaactgccgtcccgcatattgacgggaagcagaagtttttcccctttctttgcggaaaccgagcccttgcgcaaaatcatttcttccgtatccacgtaattatgaacggtcgaaaattcctcttccgccgtcagccccatgccgcgcagaatgacttgcgtcatggctttgcggtttatgtccgcaaacttttgcacgatgcgcatatcgtaaatataattttcgaacagtttgccctcgacgtacaccagttctttgggaatttcgctttccctctgttttttgagcgcgccgacggcggtctgtatttcttcgaaacgcccctcgcttttgagccgctcgatcgttttgtctatctgatattgcgcgcggtcctgcaaagcgcgcaatccctgctcctgataataatcgcacacttcaacgcccagatgacggctgcccgaatgtacgacgagatacagatccccgttttcggcgcggtctatctcgataaaatgatttccgccgcccaacgtgccgacgctcttttccgcgcgttccagtccgacgcgcgacgcgcagcgaagttcgttcaaatcgacgttttcggtgaaagcgtgcggcgttttgcggatatttcgcccgcaggggatatttttgcggatgagcgcgtccaacttttcgaaatcgatgttcttttccgccagtttcaccgtttccataccgcagccgatatccacgcctaccatggcgggaacgattttatcgcgtatcgtcatcgtcgtgccgatggtgcatcctttgcccgcgtgtacgtcgggcatgatgcgtattttgcagtttgcgaacgcctgcatatcgcagaccgcgcggatctgccgcgccgccgcgtcttccaactcgtcgcagaaacaaacggcggcgttacagagaccttgtatttcgatcatttttattctcctttattcctttttttgcaaaaggttcacaagttgcgaaagtatgtcgacattgccgtttaaggtaatgttacccacgttttcgcagatacgctccacgtattcgagttctttgagtttgtagagcgtctggttttcttccatcagtttggcggtatttaaaagcgaacgcgtggacgccacctcttcgcggcgggcgatcacgttcgcctgcgcgcgtttctccaccaccaaaacggtgttcatgatgtcgcgtatctcgcctggaagaacgatatctttcacgcccgcgtcggcgatctcgacgtacagcgacttttctttggctttgaggcgcgcgaaaacgtacgcggatacgccctccttgtcgtttagaagatcgtccaatctgtatttggacacgcagtcgcgcagcgcgagttgcgcggcgacgtgcagttgttcggcgtaatcgttcacttcctccgcgatcctgataaaatcggtcactctgtaattgcacacgaaattcacgcgcacggaaactttatcctgcgtcaggatctcctgtcccagaatatccatctgcgtcaggcgggtatcgacgagatcgacgtccacgcgcaagtcggtctgccagaaatagtacgtgcccgcgtcgagaagtttagaaaacctgtgcccgatatacaggcgcgctttcagatactgcgcgacttcgactttccgatagagcgaaggatctattttgtcaaagatatagcggggaacatactctccgacttcgggcgaagagagatccaccgtttgaaattcgtgcttgtcgatatccgagaaaaaggcgtatttgcccgccgtaagcgcgtcggaaaatttaccgttgacaaaatggagcgctaaggcgccgtccgcgacttcggcgacggtaagtttttccgcgaccgcgcggtcggagagcagtgtttccaacgagcatttgcgcgaatataatggctgatcctgcgacacgatctcgatttctttcgagccggatacgcgatatctgcccgcgtttaaaagccccgcgaacttgccgccgtaaaacagtaaccccttttgattttcattgacgatgatctttttcatattatatgtacctccgatagagttttgatgcggaatacgaccgttccaacgcgccgcgcggctgaaaatttgagcgggcggccgcggccgcgggaagttgtttttccggcgtccgttttcgcgacgcggtatccgttttcaggcagggcggggcgcgcattgtcgaaaaaaaagttttttctcccgacagaacggtcttttcactttgtcgcgcgcgaaaccgcgcgcatctcttttgccgctttcgcggcgaataccaaaccgctggcatacgtctgacacgtacggtaggattcgaacctacgaaaaagcgcgggccgcgtttccgtctttggcatgcgtttcggaagatcctgacgcaccacagtgattcgttcatacacacgcagaaccgactcgcatgagtattttattacagaatctggaaattatcacggaaaaaaagttgcgaactctaaaagagtccgcaacttttttgcattttcaatctttctgtgatgagcgccgcgaaactttgcggcgcgacgactttgacgagcggtccgaaggacagcacccgtatgacgatctccgtttcgtcctccgcgtcgtataaaatttccaggcggtagcgcgtatcgccgagcctgcgcgtttccttttcgaaatgcgcgaaatgcagcacgacgcgctccaacgcgttgcgctcgtcgaaaagttccagagcgacgcgccgtttcgaccgcggccgtcccttcccttcggcggaaatggtctgcccttggcacgttttgacggaaacgatgcgcgcgagattgaggatattcccgtatcggcaatgcgaggagatcagacggaacttatcgtccttttccgaatattccagccgttcgggaaagacgttcacgcgcaaaggctccccttttctgttcaacacgtcgattttgaggggaattttgcgcccgatcgcgtccaggatgacgcggaaattacggatatagttctcatcttgatagggatctccgtccgcgtatttgtcgaacacgtacacgtcgtcgggcgtaaacagcggttccacgccaaaatcttcgatcttcccgccgaacaggcggatgcgcggatcgaggcggatcgcctgcaaccagcgcttttgcaggagcgtgagcggcatttcgggcatatgttcgagcggggttttccccctttcgtccaacaactgccaccgctcttcccgcagtgcggggacgatggcgagcacgctttccgaaaaggcatacgcgcggacgaccccgcgcatttcctcttccgtcacgggatgatcgagcgccgctttcagaatcttggcgacgacgttataataactgccgtacagttcgctgaatatcattcgtcctctccgtataacgcgtacgtcgcgcgcagatcgtttttaaaccgcgtttccagttctttatcggaaaatttgagcgatacgatacggcagataaaggtgcggatccaggggatcatctcctccgcgtcgtacacgtcggcggaaaacctgctcgtatgttcgtcgatcttctccacgcggccgcagcgcttttcacgttccaggcggcggtgtatgtactcttcgtcttccccgtaacgcacggtgaattctacgtgctccgtcccgttgcctctgccccgcatgctcacgccccacatgcgcggctgcatgccgtccagcgtcttacggagcgcatcgaacttttcaaagcactctttcgcgacgacggtcagaatattgtccagcctgtacggcttcattcttttcagccgcagattgtacgccagaagatattgtcggccgttctgcacgctgatgaatatgcgcaggggcacgaccgcgttccgactcttcgcgcccgtattccggttgacgctctcgatttctacgcgcctcttttcgtgcatggcgcaaaagagagaacagaggatctcgctgtccagcgcctgcgtgatataatgatgtttgaaaacgaacggcgcttcgcgcgcgtccgttttatcgagaagaaaggagccgatcacgccgcagggcgcgatttccgaaaagaggtccagaacattttcgtcgggcagagggaccgacgccgcgcggcggtacaggagcgctttgccgcgtttttccgtttccaaaataccttccgcgacgtattctttgagttttttccgcaccgtcgattcgtcgaaagttttgggattgcggaacgcggcgaggtatcggtcgatcttttccatgatttcgggaagaggaagcgcggtttcgtaatcggcgagaatatcgaagagaatgaaatgcagcgtcacgtcgccgtcggtgaaacttttcgccttccatgcatgatagagcggattgcggctgacgacacggctgtcgatctccaaaaacacgcttttgccctccacggtgcggcaggagccgacaaagtcgcccaaccaactctcgacgcgccgccgctcgtcgtcgtaggagcgcgcgctcttcatagaaaaattttcgcggcttttgaacccgtaaacgtaaaattcccgcacatattcgcgtatgcgtccgaaatttttgatcagttcgctgtacggcatgctcttcctctttcaaattattatgtccagtataccattccttccctcatctgtcaacagcgcaccgcaagtgcggtgcgctgtcggatttaaatgtagttatcgcccgcaaccgtctgtaaaacgacctgcgcgtagacgcgcgcgagaaaatcgttgggatggttgacgttgtttcccgtcatgtcgcggaaacgtttggcttttaacaggtcgagatgcatggcggtcatgtccgcgaccgcgacgaaatcgtatttttcctcccgttccagcgctttcagccccgcaacgtactccttttgattgccgtaaaaccattccgtttcgttgttgggtacgctcgtcgccaccgcgacgacagcgcagtcgggaattgccgcgtgtatcttgtcgatcatttcggagatcatccgcttatattttgctaccgtgagatcggcgtcgttcatgccgaacgcgatcacgacgaggtcgggcgcatgggagatcacatttttttccacgttctccaacccccattcagtgttcgcgccgccgagggaggtattgacgcattcgatttttgccgcatacttatcttccagagaacttgcgaccatttgcgcgtaggagggcgtatagggcaaagtattgccgccgtactcggtgccgctcgcgttgcagcccgcggtgatgctgtcgccgtaaaagacgatctttgcggccttttccccttccagttttttcaaaaacttgcccgcccgatcgctcttatcctcgggaatactcccttcccagacacagtcgtgcgcgtaggtcacggcgatctggcgggaagtaaaggtatccttttcgccgtatttgatatagcggttttcctgaaatcctgcggcgtacttgccgaaaacggcgacaggcacgctgtcgggctcctttctgtaatattcgtccgtttcaaaatacgggatcgcggagccgcgaaggcgcctgattttgccctcttcggtgaggatataatctttcccctccgtatattcgacgttcagcccgtaactgcgcacagacctgatttccgcggggcggtacaatagcggcgcttcgtcctcttcgcccacgaacaggaccgtttcgttatacatttcgcgggtgtgccagacagggcgcagccaggtttcaagactatatgaatcgtacggcatccaatctcccctttccgccagatcgtcatcgtgcggggcggagacgcaaccgcaaagaacgattgcgcacagcagccccgcgaaggcggctctcaaaccttttttcatttttctctcactacccgtctatacggcgtaatcgtaggaaccgccgcctacgcggtaaatatttttgccaagacaaatttccgcgctcgtctggggcggcacttcgatatgcacgctgatcctgccgttttctctcttccactttgaaacgatttcgccccgcaccgtcttcatcgacgccgaaacgtgatcgacgagtcgggtaaatacgggcgcgatgcggatcttatcgcacgcgaacgcgtcttccgcgacgtcgatgccgcctaaatagcggtacaggaacgcgtcgtaactgccgaacatgggatggttgaaagaatgcatttcgttctgcatttccgcttcccagcgctcccagacgctggtcgcgtcgttttccatcatgtaaccccagccgggatacgcgggatttttcagtatattgacgacctcgtcggcatagccgtattcggcgagcacgtaaaagacgtggcggtagccgatattgccgctcgtgcagtgatggccgcgcccgaccgcgtcgcggtaaatattttccgcaacgcgcgaacggaacgcttcgggcacgatgcccaaagacagcgcgagagcgttttccgtctgcgtgccgccgcagtaatcaaaggtcttttcgtcgaaatatttttcgtgcagcgcggcggcgcaacgctcggcatgatcgccgtactgcgcttcgtcctccgcgttgccgacgatcacggcgaggcggcgcatctctttgagatgccacaaaagatacagcgaagatacgtacagattgtccgcgcgcacgtccgcaaacggcgtgacccagtcgccgtaataggaatattccatgatataattttgagagcgcgacaaaagatattccacccatttgcggatcgaagcatattccgccgcggcggtcgccctgtcgccgtaataacggtacgcgtaatccgcgagcagcggataaatgacgcacacgggatcggcgggcacgccgcccgtataatagggagccgtatcgccgatgccgccctccgccgtctgcgtgtgggtgatatcgcgtataaatttgggaatgaaccgcgacatatccacgttatacatcgtctgataaatgcgggaacccagatcgttgagccagccaaaccgctcgtcgcgttgggggcagtcggtgagaatggaatgctggttgttctgttcggtgcgcaccgcgatctcgtgcagggcgttgagcgtcttgtcggaacaggaaaaatctccgatcaggggcgcggcggtatgcacgtgttcgcccacgcaggacaaaagttccgctttgcccgcaatttccgcctgcacgtagcggaacccgtgataagtgaaccgcggcgcgaactcttccacaccgtcgccctttaagatataggtatccgaacagcgcgccgaacgcagattgagttggttgacgtacccctcattggtgagttgttcgccgaatttcagcgtgacggaagcgcagcgctcgccgcgcacggaaattttcagccaccccgcgatgtttttgcccacgtccacaatatagacgccgccgcccatatccgtcctcgaaacttcgggaaagcgcgcgcacacctcgatcggctcgatctcctgcgccgccaattccccgttcggggcggccgcggcgatggtgtacatccagccgttcgcccaggtaggctcgaacgcgagcgtgttccagtttttaggatatttgtcctcgatgcgcgcgtcgtacacttcgccgccgtaaacgctgttgtccacggtggggctgccgcctacccaccagccgtagccggggcccgaatggtcctcgtacacttcgccgtcctcgtactccacgtagatctgcgccagaagtttgcgcgcgcccagccagccgtagcccacttccacgccgatgacgtttttgcccgcagcgagatcttccatttcgtacgcgcagtagaaaacgcgctcgccgtattccgtgacgccgggattgagcaccgcattccccatttttctgccgttcacgaaaaattcgtgataaccgaggccgcagatatatgcgcgcgcacgcgcgatctttttatctttcagcgcaatcgctttccggaacagcagcgtgccgccgttgaagttgacgggcacggagacccattgccccttccagtcgcttttctcgtacagagcggtctcaaacgaggcgatttgcgaacggtagcgattcccttcgccgtccgttgtttcacagcatacgaaatatcggctgtgcgagcaaagcggtctgccgccgtactgtacgccgacgctcgcggcggagcggacttcgccgctgtcccacatatcctcactgccctcatagaggagtttttcgctcgtcgccacccgtatgcggtaggatgtctgctctcctttaaaacttttttcatattgccaggaaaaatgcggcgtccgcgattgaacggcaagcggccgctgctggtattctgttctgaaattgatcaattccgacattttcgatctccgtaagttatgcaaagcgaccgcccccgtccgacaaggacaagacggtcgccgcagaatttttttattcggtttctatcattttcccgcccccgcgggggaatactcgtttttttgcggcggcggaaaacgccgccgcggtttgtccttactttttcgcctttttacggaatccgacgacgagcgccgcagcgctcagcgcgatgaccgcgcccgcgaatacggatgcgcctgcctccgcgacagagccgcagccgcctctctgcacccttacggtcagttgcgcctggtacgtcttgccgtccaccgtcactttcacggtcacttcgctctcgcccgcagcgtccttatcgtaacctacgatctccgctttggaaagatccgccttttccgtcttgccgctcgcccagacgaggttggcggtcaagccgctcagatcgagtttttcggtgccttttttgacggtgaggacggtgccttccgcaaattccagtccgacgatgccgtccgtgacggtcacggtaacggtctttgtcttttcgcccgcgacgccgtccttcaaggtaacggtgacggtggcggtgccctgtttcacgcccgtgatgcggccgttattgttgacggtaacgatgctctcgtcgctgcttttataatagaagttgccttcggtcgcggtatcgggaacgcgcacggcgccgaggctgacggtatcgcccacctgcacggtcgccgtttcgttcactttgagatccgtataggggatatagatgccccagaccatgccgtcgaacacaaacgtcacttcttccgccaatctgcattcgggaacgatcatgcccgtgcccgccttcatggcggcgttatccgtttcggtcggagcaagttcgcccgtccacatatagccgctgaatcctgcttttaacgtgatgcggtcgccttcctgcatatagggagccttgttccagttatcggcgtcctgttttccgtcatagaatgtgggaagaatcgccacgttgccgccgccgagattgtaggtaccgcactttacttcggtaccgtcagcccgcgtgtatacatacttcgtcgcatcggggatgcaggtcgcatcggtaatattcgcaacatttacggtgctgtcgggatactgtacgaaaatgctgtaactgaaccattcgacgaccgcgacttccttgatgtccatgggaatgacttcatatacttcgacggaaacgtcgagcgtatattgtttacccgcgaacgaaacggtcgctttggaaactttcgtgcccacagtcgcggtatcgacgtcggagagcgtgcagttttcctcgttcagtttaaaatcgctgccgtacacgtccttgccgtcattgtcgaatacggcgtgcgccgtgaaatccgagggaagagcaagtttcccgcctttttccacatagattttataggaagtggcaaattccagccctttcatttcgagttcgggcaaaacttccacttcgtaagtttcgctcagatcgcccgctttggcggtgatggtcgccgtcccctctttcacgccgagcactttgcccgtcgcgtcgacggtggcgacctcggcgtccgaagtggtataatgtacggtggaagccgcgccgtcgttgagcgtggcggtcagttgcaaggtcccgcccacgtgcaccgcgttgtcctcgggattgttgtcgatggtaagcgtcttgggatcgtgcttggcgggatcgtatgcgacgagggtagcgcccgccgtggcatagatataagaaacgtccgctttcatctgatgccccgaaaattcgaatccttctttaacggtgatcaccgttcccacttcgttcggaccgtgcagacaaaaaagataggtttcatgatacatatagtcgaattcaccgcttatgtcctcacgaacggaattggtgatcttgacgttctcgaccttgccttccacgttttctgtatcaactttatcttttacgttgaaattgatcagaaatccgccccaacccgggtcgtaattgatattgtttacggtaagttcgggaagttcgtcggagggcgtcaccgtcagtttgacggaagccgtctttccctcgtacgtgcaagtcaaggtataatcgcccgctttcgtcaagtcgtattcgcccgatatcatgtcttttgtgacgaggaacggaacgacctcgccgtccgcataggtcgctttgccgcgcagagcggaaagatccaggaccgttgcgcccgcctgaacagtcaattcgcccgcgaccgcgacggattccaccgcgcccgtcggctctactttcgtgaacgt

SEQ ID NO: 4230 - DNA, 9712 bp, Unknown
  16S sequences of unknown bacteria
tcctatatgagggtagcatatcagaattggaatcctcaacaactattttctccggttgtaccgagagcctgtccattccggaataaattctgtacatctgctgataaacacggcgtgtattctgatatttcccagatgagtaaagaccgtaaatttcttcaacactgtatggaagattatataaattttctcttgtaataatcacgaaataattatccgatttctgaatcgctgatgcaaattcttccgaacgtataaatgcattttcttcatctataaaaacaatatttcccgaaatattctgcaaaatcagtttccagtctattccctcaagcaccctgcatggaacatcacagatcacatcgatcccactcgaattacccatgttcgcaaattgccggatcatattaatcagagttgtctttcccgtcgcactatctccttttatgatcgtgatattccttttaatttcaaattcataatgcagtttattattttttacaattacccggtgtctacccttcattcattatcacctatacatactctccggcaatctccacaaattctttcatattatggacggtctgccctgtattcaaaattttcgcttcaaatgcatctttcccaaaattcatgatatgacgcagattgatcgtcagttcttttgcttctccaatttgtaaaatccattttgaacaattatcaccacatgcagaagcattaaacactctctcattttcatcaaacgccatcagcatcagcgtctttactcccccagataattcctttggtgaaataggaccaagtatcggactctcaattaaatgtgtaccaattacatctgatttgtctacatcttttatcattttcactgataaggaatttgtaatccattcatcctcatatgtgttatcgaaatatgtcggaggatgataaattgcttccggcatatcacctaaatatatattcagcattttactcctcccagactgggcttcttatttgatactatttgcaaaaaagagccactgcaaatcgtatgctatgactcttttttctatctcatcttctatttatctcttagtacagctttgcaccagccgggattctgtcatttaccatcagaaggttcagtccttcgtgaccgtcttcctcatgtactgctgagatcagcataccttcggaatcaattcccatcatctttctcggtggcaggttcacgatagcgattgctgtcttaccaaccagctcttccggctcgtaatactcgtgaataccgcttaaaatcacgcgatccttgcgttctccgtcatccagtgtgaacttcagaagcttcttggacttcttaactgcctcacatgccaggatcttaactgcacggaaatcagactttgcaaatgtgtcgaaatctaccatttccttgaagatcggctcgatctttacattggagaaatccaccttctcagcaggcttcgcttcctctgccgatacttctgctccgtctgcctttgcctctgccttctttgcagccgctgcgccgactgatttcattgtcgggaacagcagtacgtcacgaattgcctctgctcctgtcaacagcatacacatacggtcgataccgaatccgataccacctgtcggcggcataccgatctccagtgcgttcaggaagtcttcgtccgtgtggtttgcttcctcgtcaccggcatccgccagagcatcctgctctttgaaacgctctctctggtcgatcggatcgttcaactcggagtaagcatttgccatctcccagccgttcataaagaactcgaagcgctctacgtattccggattctccggctttttcttggtgagcggggatatctcaatcggatgatccatgatgaaggtcggctgaagcagatgctcttctacatattcctcaaagaacagattcaggatatcacccttcttatgtctctcttcgtatgcaatgttgtgctcctttgcaatggctcttgcctgctccagagtctcgacttcgttccagtctacgtttgcatatttctttactgcatctaccatggtcagacgctcaaacggcttgccaagatccatctcgatgcccttgtatacgatatgggtcgttccgagcacttcctgtgcaacaaaacgatacagattctcagtcagatccatcatgccgtgatagtccgtgtatgcctgatacagctccatcagtgtgaactccggattatgacgggtatcgagtccctcgttacggaatacacgaccgatctcatagacgcgctcaaggccgccgacgatcagacgcttcagatacagctccagagaaatacgaagcttcaaatcttcattcagtgcattgaagtgtgtctcgaacggacgcgccgccgccccgcctgcatttgctacgagcatcggagtctctacctccatgaagccctgaccatccagatatctgcggatcgtgctgatgatccgggaacgctttacaaaggtgtcctttacttccggattcataatcagatccacataacgctgacgatatcttgtatcggtatttgtcagtccgtggtacttctccggcagaatctgcaggctcttggagagcagtacaagcttctctgcatggatggaaatttcaccggtcttcgtcttaaatacgacaccttcgattccgatgatatcaccgatatccagcttcttgaatgccttgtattcctcttctcctacgctgtcacgtgcaacgtagcactggatacccccctgaagatcctgcacgttgcagaaggaggcctttcccatgacacgttttgacatcatacgccctgcaatccgcacactctgggattccagtttttcaaaattgtccttgatctcagcgctgtggctggttacgtcatatttcgtgatctcaaacggattctgtccgtttgcctgaagctcagcaagcttctcgcggcgtaccttcaaaagctgcttggtgtctactgcctgttccttcttctgttctgccaattttcccactccttttcctctatcagatgctgttggggtcaaaaggtattttgcccccaactgatgcctacgaattgctccgctgcgaagcagctcccgcaattctgcaaacattcgaaatccgctgatttactacgtaaatcgctactttctcatgtttggcgggtcccaagttcaaaagccttatcatgcaagcatgaacggctttttgaccttttgaccctggcatcagatacttctctcgatgccaagtaccttatatgcgatctcgcctgcctgtgtctctacctgtaccgtatctccgacgctgcgtccgatcagtgccttgccgaccggagactcattggaaatcttaccctggaggctgtttgcctcagaggagccgacaatcttgaactccatttcctcatcgtactctacgtcgtatacctttacggtacagccaacgttgatcttatctacatctacctcatcctctacgacgacttctacgttcttaaggatcttttcaatctcctcgatacgggtctcgatgtcacgctgctcatccttcgctgcatcatactctgcgttctcggaaaggtcaccctgctcgcgcgcctctttgatcttgccagcgacttcttttcttctgtttacctttaaatcatgcagctcgtcctcgagcttttttaatcccgcataagttaataagcttttctttgcttccatttttatctacacccttcctgctattccattgctcttcttgtaagcaaaacagattgcaatgcgaaaccgcactgcaatcatcgtactataatagctgattcgcacccttttgtcaaggaatattagaagcgctccatcagcatttcttcgagcttctgatagctctcgacctcattgatacagccccgcagctttgcagaattcgggtagcccgccgtgtaccaggaaatgtgtttgcgcatttcccggataccggtatattcccctttgtactcgatttccatacgtgtgtgccgcagcatcatatcgcggacttcttccttcgatggacgcggcggcagctctcctgttgccagatagtcccggatctcccggaatatccatggattgccgcgggctccgcgaccgaccatcacgccatcacagccggtctcatccagaagctgcttcgctttcccggccgagtccacatctccgtttccgataactgggatcgagactgcctctttgacctgacggataatgtcccagtctgctgtcccggtgtaatactgctctcgtgtgcgtccatgcaccgcaactgccgctgctccggatgcctcagcgatccgcgcgatctcgaccgcatttacctcagatgcagtaaagcctttccggattttgaccgtcaccggctttttgatcgcgcgtacggtcttactcacgatctgctctaccagcttcggattgcgcatcagcgcagagccttccccattgccggctaccttcggcaccgggcagcccatattgaggtcgagcacatcaaagtctctctcctcaatatatgcagccatctcgctgataatatccggatctgccccaaacagctgcaaagataccggatgctccgccggcgaagtctccagaagcgccaccgtattcttattatggaaggaaatggcttttgcactcaccatttccgtgcagaccattccggcaccctgctccctgcagagcaaacgaaatggcaggtcacttacccctgccatcggcgccagtatgatattgttttccagttctacatttccgatcttcatgaacctatcctcatccaagtccgtttgccaatagcacacggtaatacatttccagcgagcggagcagctcctcttcgcttcgctgcagctccttgatcttcagcaccgcaccgatctcgtcgtaggtcgtatcattctctgtggcctcagtgcgaaaatgcagatagccatctttgtcaaactccagcagcaaaataccgcccacatcattggtatacagaacacacatcaccttcagctcgtcctgaatctgcttcggaagattactgaacctcgggttcagataatatttttcatcgtaggaattggctccgcagagcacaacagtttcttcttttcgttccatagttgcctctttctatctataataacgcgaacactcgcaatccatccctgcagctctgctgacagggcctagctttcgctatttgctcatgaacgtagtcgcttcgcgaccgtcagaataagccagtaaacagagatcccggttggggatcagctggggatgctttgcctcacacatacccgtaaattccgcgcaccgatacctcgcctgcgtagactggctggattgttccatcctcccgttctacgagcagatcacccttttcatcgatcccgcgagaaatgccggtatactcattgcccggctccagcacacgtacctgaccgccagtgccggcaagcagcgcattgtactcctcctgcagcaaagaaacatcctgcgtcttttcaaataatgcgtagcaccggtcaaactgctccatgcacgccgcaatcagtcccgcgcggtctgtcttcgccccggtcagcagccgcagagaagatgccgtctgctgcagctcctccggaaatgactccatatttacattgatcccggctccgatcacgaggtagttgatatagtcgacctcgctgctcatctccgtcaggattccgcagatcttcttcccattgaccacaatgtcgtttggccatttaatcctggcatcaacattgcaaaattcccggcacgcattcgcgatggcaagtcccatcaccagtgtcacggaggacgcatgctccggccggatggacggacgcagcaacagactcatcgcaatcgccgtatccttcggcgtcacccatacgcgacctctgcgaccttttcctccggtctgttctccggcgagcacgagcgtcgtgcgccgctccccggcctccgccatccgctttgcctcattatttgaagagtcaatgcggtcataatatacgatattccactctgcatgtctgccctgcagacggctttgtacttcctccgccgtaatacagtccggacgttcaagaatccgatacccctttcgaggcacggattctatcacataaccttcttcttttaactgattcatgactttccagactgcagtccgagatacagcgagcttgtcgcaaagctgctgcccggacacataaccgtcagcctcatacagagcggacagaatacttgctttcatctcttccgtcctttctttctggcatgtacgtcaagcggatattcgcaatccgcttcgctccaacatctttttataacgaaatcagattctttaaccattctaaattgtagtaaaggaagttgccggtatagccaatcagcaacagcaggctcacccatacaaccaccgtccgtttctgcacaaacccgaagagggtcagtgctatatgcagcaggatcgcaagtgcactgatcacattcaatatccagcggctctgcaaaatgccaagcagaaacagcacgcacaggatatcggcagccagagccgtaagcatacagaacaacagaaccagacggatatccttttccttcatttttttaattcttttcatgctccagtcccatggttgctgcaatgacagccttaatcgtatgcatccggttctccgcctcatcaaagacaacagactgtgctgattcgaatacctcgtcggtcacttccatcgcatccaatccgaatttctcatgaatctccttgccgatcttcgtatccagatcatggaacgccgggaggcagtgcatgaaaattgcgctgtccttggcatacgtcatgacctttttattgacctgatacggcaacagtgcacggatccgctctgcccatactgcatccggctcacccatagatacccatacatcggtgtagatcacatctgcatcctgcgcaccctcagccacatcctctgtcagtgtgatcgtcgcaccgctcgcctttgcatattcctcacactctgccacaagcgcagcgtccgggaaatactccttcgaagtgcaggctgtgaaatgaagacccagctttgcgcagacgatcatgagggaattgcccatattataacgggcatcgcccatatacgtcagcttcttgcccttcagttcgcccagatgctcctgaatcgtcagcatatcagccagcatctgcgtcggatgatactcatttgtcagaccattccacaccgggacaccggcatatttcgcaagctcttccacgatctcctgaccaaagccgcggtactcgataccatcatacattctgccaagcacgcgcgcggtatcgcgtatactctctttttttccgatctgagaaccgctcgggtccagatatgtgcactgcatacccagatcatgtgctgccacctcaaaggagcagcgtgttctcgtactcgtcttttcaaaaatgagcgcgatatttttccctgtgcgcaccgattcctgcacgcctgcctttttttctgccttatattttgcggaaagctcaagcaggtaagtgatctcctccggtgtatagtccttcagtgtcagaaaatttcttccttttaaatccatggtctcatcctccgttgttcagtctgtcctgggtcagtcctttgccacttctaccgctgcctttaccgccgctgaaagattctgcagctcagacggaataatgatttttgtcgctttcccgtcagctaccttttccatcgcctcaaagctcttcagtgcgagcacagcctggtctgctcccgcctctttgatcagacggataccttccgcattggcctgttgtaccttgcgaatcgcctcagcctcaccttctgcctcacggatcatcttttccttcgctgcctctgccttcaggatcgctgcctgtttctctgcctccgcatcaaggattgccgactgctttttaccttccgacacaagaatcagagacttcttttcaccctctgccttcaggatggattctcttcgctcacgctccgccttcatctgcttctccattgcatctacgatctgcgccggcggaagaatgttcttcagctctacacgattgaccttgatgccccatgggtcagtcgccacatccagggaagcgcgcatctgggtattgatcgtctcacgggaggtaagcgtctggtcgagctccatgtcaccgataatatttctcagagtcgtcgctgtcagattctcaatcgccataatcggactctcgacgccataggtaaagagcttcggatcggtaatctgaaaaaatacgaccgtgtcaatctgcattgtaacgttatcttttgtaattaccggctgcgggtcaaaatcgactacctgctccttgaggttcacacgctttgccacacggtcgatgaacggtaccttaaaatgcatgccgacatcccaagttccctgatatccgccaagccgctccacgataaacgcctgcgcctgaggaacgatcttcacacaggatgccagtaccagcaaaatcaaaatgatgaggatgaccagaaggatctgccccacatgaagtgaaaaaccgccataactacccatattaaatttcctcctttacgatcagcttgactccgctgatactctgaattttcacacgggtatttttcaggatccgtgtgttttcctgctcggtacgcgccatccagtactgcccgcgcacctgtacctgtccgctgttcgccagattgtcaatctcctctgtcacgacagcagtctcaccgatcaaactctgtgcattcgtcctgatccggccatgattcagccatccggcagccacagggcgcgtaaaaatcagaagaatcacagatattacgcaaaataccgcgatctgtatgaaaagccctgctcctgccaacgccagcacaaaggccaccagcgcacctcctgcaaaccagatcgtagtcaatcccagcgtcactgcctcaattgcgagcagtaccaccagaagaaccagccagactattgcctgcatatcaaatcccatgcagtcatccccctttctgccgtctgttagttgccttgtattctagcatatttttatataaaaaacaatgaaaaggccgccccgattatcaaaatcagagcagcctgttctcatctcctgcggatagtgggactcgaacccacacgcctcgcggcacaggaacctaaatcctgcacgtctgccaattccgtcatatccgcatattcaaatctgttttatctctaagtgaagaaaaagctccgcatccgcgatgcaaagccctcactacgacgaatcgccaagctgggctagccggattcgaaccggcgaatgcaggagtcaaagtcctgtgccttaccgcttggcgatagcccattaataaaggtggataaagggattcgaacccttggcctccagagccacaatctggcgcgctaaccagctgcgctatacccaccataatggttacccatatttaattttcttttttcaaagaaaacgagcctgaagggattcgaacccccgacccacggcttagaaggccgttgctctatccaactgagctacagactcatagagcaggtgatgggaatcgaacccacgtattcagcttggaaggctgatgttctaccattg

SEQ ID NO: 4231 - DNA, 32759 bp, Unknown
  16S sequences of unknown bacteria
tacaggcgaaaccaggcaacatgacagccggaacagacggcaaaaccattgacggtatgggaatggccaggataaacgccctcattgaaaaaatgcgggatttcagctatcagcctaacccggcaaggagaacgtatatcccgaaagctaacgggaagatgcgtcctctgggaataccgtcgtttgacgacaaactgatacaggaggtggttcggctcattttagagagcatttatgagcctacctttagcgactactcccacgggttccgtatgaacaagagttgccatacggcgctcaagtatgtgcagaaatacttcacgggaacaaagtggttcgttgaaggagacataaagggctgttttgacaatgtagaccatcaagtgctgattgccattctgcgaaagcggattgcagatgaacacttcattggtctgatttggaagttcctaaaagccggatatatggaggactggaattaccataatacttactctggcactcctcaaggctcgattatcagccctatccttgcaaacatttacatgaacgaactggacagctatatgacggaatacgcagagaaattcaactgtggaaaccgccgtaaaatcaatcctgcgttcaaaaagaaattagatgtctgccgtggaaaggaagaaaggctcaaaagaaatttcgctaaaatgagcgaagaagaaaaagagggattgtctgctgaaatcagagagctgcggcgtagccttaaatctatgccttacagcgacccgatggatgacaactataaaaggatttgctatgtccgatatgcagatgactttctgataggagttatcggcagtaaagaggacgcagaacaggtaaaacaggacgtaggcagttttatccgtgaaaaacttcatctggaaatgtccgaggaaaagacactcatcacccacggacatgattttgcaaagtttctgggatacgaggtcacaatctccaaaggagaatacaacaaaaagaccaaaaccggggctaccagacgagtgaacaacggaaaagtcttgctccatgtcccccatgacaaatgggtaaaatgcctgctctcctacaatgccctcaagattaaatacgacaagcagaatggaaacaaagaggtttgggaacctgtccggcgcactcgtctgttgcacttggacgatttggaaatcctgaaccagtacaacgcagaaatccgtggattgtataactactaccggctcgcaaacaatgtatccgtactcaacaacttctattatgtaatgagatacagtatgctcaaaactttcgccggaaaatatcggacacgaatcagcaaaattatccgcaagtaccgtcaagggaaagattttgttgtggaatatccgaagaaaaacggcatggtgggcaaagtgctgttctacaatgacggtttccgcaggaacaccaaagttgaaagcggaacccccgacataatagcaagagtagtcgagaactatggacgcaacagcctgattaagaggctgcaagcaaacaaatgcgagtggtgcggcgcagaaaatgtgccgcttgaaatacaccatgtacgaaaactcaaagatttaagtggcagaaaacaatgggaactcgccatgattgggcgtaagcgcaaaacaatggcactctgcgtagactgccacgataagttacacgctgggaaattagactgacacctggagagccggatacatcgagaggtgtaagtccggtttggaggggagttcccggaaacctgccatagtgatatggcaaggcgccgggttcttaccctacttctgacgagccttgcaccgatcccatttgccaccagcgtcaaccgggagcttggcagcatgggctccaactatttcaagtccctgctggccgttggctttcagggtgtgctgattttggtatgcgtggcgatctatgcggttttggtgcagagcatcgccattggcagcgatgtgatgaacgccgtctggacgtgtatcggctatactgtcctgctgtgcttcaccctgttcaagacgggcagccttgccaaatccattttcggtgcgcactaaatcttcgggccaacttgacccaaagtaaaacaacagcacggctccttgaaaccgtgctgctgttcgtcatacctgatgctcaataatccattttaccatgctttcaaaggagcgtattcccgccgccacttcgaggatcatggcggacagctcatcctgcgaatagtccagatcaatgccgttcagggcaaggaaaaccagcatggtgtgtgtgccgatccgtttgttcccatccacaaaggcgtggttttgaatgagcccgaagccgagccttgccgctttctgctgcaaggacggataggcggcagtttcaccgaatccctgaaagggggcgttcagagcagaatctaaaagcccttcatcccgcaggccgtctgttccgccggtttcctttatcagctcggcgtgcagcatcaggatttgctcttttgtcagttttttcatttggcaagctcctcatacgcctgccgattcttggcgatcagccttttggaaatggaaaggacatcttcatcggatgcaagctgttcctgctccgcctgcccaaattccacgatcaaatatcgtgggacattgtttttcagaatgacggcggcaccgctttcatcgacaagtcttgccactttggaaaagttctgattggcctccgtgatggaaacgagactgcttgtgttgatattcacggttatcacctccacccttattatatgcgaatattaggataaattcaacctatttcaaaaaagaaaggaaaatcgcctatcgaaaagtacagcatcatatactccgacccgtcgtggcggtatcggatgaacaagggacagggcgtggccgaaaaccattacggcaccatgggccttgcggaaatatgtgcgctgcctgtgtcggagctatccgccaaagacagcgtactttttttgtgggccaccctcccacagctccccgatgctctccgggtcatagaggcgtggggctttcagtacaaaacgacggcctttgtatggctcaaacgcaacccaaaatcggacggatggtttttcggcctcggctattggacacggagcaacacggaaatttgtctgctggcgaccaaaggccatccgaaacggaaatccgccgctgtccatcagctcattatttccccggtggaggctcacagcaaaaagccggatataacccgtgacaagattgtggagctcatgggtgatcttccccgggtggagctgttcgcccggcagcgggctcccggctgggacgcatggggaaatgaagtggacagcaccatcacattgtgaagtgaaaggaggttttctatggcctatgtgccgatgcccaaagacctgtccaaaattaaaaccaagctggccttcaacctgacgaagcgccagctcatttgcttttctgtggcgggtgcggtggggatccccatgtatctctttacccgtgcccacatcgggaacagtctggcgctgctcctgatgatcggcctcatgcttcccggctttatgttcgccatgtacgagcgtgacgggctgccgctggaaaaggtgctgcggaatattctccgcacctgctttctccgcccccgggtaaggccgtatcagaccgaaaacttttatgccctgttgaatgaggaggcgaaacctattgaacagaaatcagcaaaagcaagcacccatatcaaaaggccgggccgcaaagcgtaagcccggcgttccctatacagcccagcagactatcccatatcagcagatgtacagggacggtatctgccgggtggacgaccgcttatacacaaaatgtattgagtttgaggacatcacctatcagctggcacaccccgacgatcaggccgccgtttttgacgggtactgtgctctgctcaattcctttgacagcaccctgcctttccagctgtctttcatcaaccgtcgctctcgcccggacaaccgctgtcaggggaatattcctctgcacagcgatgcctttgacgatctccggcaggagtatgtggatatgctgacgaagcagctcgcccgcagcaacaacggcatggtgcggacacggcttgtcaccttcggcgtacaggccgagagtgcccgggccgcccggccacgtctggaacggatggaggctgaggtgacaggaaacctccgcaggctgggcgttcgctctcatcctctgtcggggcgggaacgtctggaactcctgcacggccagcttcatcccggcgagcgtgagcccttccgcttttcgtgggaggatataccgcaatccgggctttccaccaaggactatattgctccgaccggctttgacttccggcagagccggtcattccgcatcggtgcgacatggggtgcggcctcgtatctgcaaatcatggcatcggagctttccgaccggctgctggcggagctgttggagctggatgcggaaatgaccatcaccctgcatatccagacggtggatcagaccaaggctgtcaaggctatcaaaagcaaggtatccgacatcgacaaaatgaaggtggaggagcaaaaacgggcggtgaaatcgggctatgacatggacattctgccgcccgatcttgtgaccttcgggcaggacgccaaaacgctgctggaggatctgcagaatcacaacgagcggatgcttctgttgacctttcttgtggtaaacatggctgccacccggcggaagctggataacgatctgtcggcggtatccggcgttttgcagaaatacaactgctccctccggcgactggatttccagcaggaacaggggctgatctcctctctgccgctgggcctcaatcagattgagattcagcggggtatgacaaccagcagcacggctattttcattccctttctcacgcaggagctccgtatggacggcgaagctgtgtactacggggtgaacgctctgtcccataacgtcatcatggcgaaccgcaagacactgaaagtgcccagcggtttatatctgggcaccccgggcgccggaaaatccttttccggcaaacgggagatcgtccatgtgtttttagctaccgccgatgacatcctcattgttgatccgatgggagaatatgcgccgctggtgcggcagttcggggatcagggacaggtcattgaaatttctatggacagcccgtaccacatcaatccgctggatttgtatatggtgacggacggggatatgtcgccggtcagcctgaaatgcgattttgtcctttcacttatggaggcgacccttgccgacaaggaggggttacagccggtggagcggacaatcattgaccgctgtgttcggctggtgtaccgggaatatctggcacaccccgacccggaacagatgccgcttctgcaagacctgtacgacattctgaaccggcagccggagcccgaggccagacggctggcgactgcgctggaaatctatgtttccggctcgttgagcatcttcaaccaccgcaccaacgtggatttcgaccgccgtgttgtctgcatcgatctggaaaagctggggacgggcctgcggaaaatcgccgtccatatcatgcaggatttgacccatacccgggtatccatgaatttcgcctccggaaaatatacctggtgctattacgatgaatttcatgtgctgctacaggacgagctgaccgcccggtatttcgtcaccatctggaaaatgctgcgtaaaaaagggtgtatcccgtcagccttaacgcaaaacgtgaaggatctgcttgccagccgggagattgaaaacatactggaaaattccgatttcatggtactgctgtcacaggcgcagggcgaccgcaagattctggcggagaagctggggatcagcccgcaccagctttcctatgtgacccacagcgaaccgggcgagggattgctgtttttcggcaacaccattctgcccttcgtggatcatttcccgaaggatacccggctgtatcagatcatgacgacccgcccggaggaggtacagcatgacccggcaggatgatcccacttcgggccaagttggcccgaagtcccaattccagccggacagcgaaaagccacgcccatccgagcggctgcggccggacgaggagccgggaatcgccaaatcaaagctgcgggcagacaagactggatccaagctggaacaggccagagtaaggctggccgctcaaaagccaaagaagccgcccggtattggaaaaaaggcagtacggcagatacgggccgggacatggcaatatcttcacgacaaaatccatcaggtggagcaggaaaacgccggtgtggagggtgcccacaaatccgaactgaccgccgagggagggctgcgcaggctgtcacgctatgcgaaaaagcggtggaacacccgccccgcccggctggcggagaagtgggaacgcaaaaatattcgggcaaatacgaaatgggaatttcagaaaatggcgcaggagcatccgacgttgaaaagcaatgttctgtcccgggccgtacagaagcacaagctgaaacagcaatatgcgaaaaaggcacgacagacggccaagcagggagccaaagcagcgggcaaggtggcatcgtatacggaaaaggcggcccgtgccgtgggcggggtgatcttgcgtcatccggtgggagcgctgatcgtggcggcggctgtccttgtggggtatctgctctgctcggtgttctccctgttccctctgctgggaggcgggatgacgggcacagtggaaagcgccgccgcatataccgctgcggatgccgatattatgggagccgaaacggactacaacgctttggaggaagccttgcgtcaggagctggccgggatcgaggcagcacacaccggctatgacgaatatcgccgtgatgtggacggtatcgggcacgctccccacgagctggccgcctatctttccgccaaatatggtgcgtacacccgggcaggggtacaggaggagctgcgggctttattcagcgagcagtatgtcctgacactgaccgaagcggaggagcaatgggcggacgccgacggaaatatccatgtgcggcgtgtcctgtacatcaccctccgcagccgtagcctgtccgatctggcaggctcccggctgaacgccgaacagaaggagctttacgatgtcatgctggaactaaagggcaacaggcccgacctatggaatgaaaggagcgcctatgaacagtaagattgaaaaaatcgacagagaattggaaaaggcccgggataaggccgccgaatgggcggccaaagtgcgggagctggaacggcagcggcaggaggaggaaaacagccagatcgtgcaggcggtgcgctccctgaagctcacgccggaggagctggccgccttttttcagaatcccgccaacctgacagcttcgggccaagttggcccgaagtccacgaacaagagcaaggaggaatcagcccatgaagattaaagcctgtattccgacggtactggccgccctgtccctgtttatccttccggccagtgcggagccgctttcaccgcccggcaccggaacagtgatcgacagcggcaccgacgaggacggcaaggaattttacaccatccaggcccccgacaaggccgtgttctatctcatcatcgaccggcagcgtggaacggagaatgtctattttctcgatgcggttgccgcaaaggacttgctgtccttggcagagccggagaaaaaaccgccggtcacgcagaccacagccgccccgcagccggagactccggcccagcctgcaccgcagggctccggcaatctctggcttcttgcggcggtgttggccgtggtggccgctggcggcgggatcgggtattacttcaagatataccgtccccggcatcaagttcccgatctggacgagaatgacagcgacgagcctgcgccgtgggatgacgataccaacatagacgaagaaacggaggaggacgaatgaatttcaccgacagtccctatgaaaagatgatgaaggaaatcccccgcccctatcgggaggaggttccctgcaagacctgccgccaccgtttccgctgtaaggggcggtgccggaaacggtttcgggcgctgcgggaaaagcaggccgatgcttggggtcagaccgacccggagcgatagatgcggcgggagcttacccgtgacgagcggcgggcgatccggcgattggtgacaagcctatgcgctaactatgacaggacggaggggctctgcttgccgctggactgtccctgctatatgctgaacaagtggtggacgggcggcttctgccgttactttgaggcagcggtgctgccggtgaattcggcactggcagcggctgtcaccggcaaaggagcagccccggacacccggctctgtgcggtatgcgggcgagcgttccttccggctgggaaacaggcatattgctccgttatttgtgcagaggccgcccgccggaaacggcagcgggaatacatgagaaaaaggcgggtcgggcgttagctttagccgcccgtaagcccgcctgtatcaacgcttcccggtcacacttccggggcgggtggtatctgttcacctcccgccccggtttatggccgaaaaagctaacatcgaaaggagtatgccgatggatatggtacagggatatgcaatccggcaagtggttttgtttgagaacaaccgtgggatcgctttcggggaaaatccggcggctccctcaccgtttgcaacatggcaatataccgagaatgacagccagcgggattattattggggacactatttcccggacgaaaaaagcgcacgggacgattttgattcccgtgtgaaaaggtatcgcagcgatatgggattcaaggaaaaatcttccattatcggcaggctgaaagaggcttccgaccggcaggaaccgtccaaagccgacaggccgatggagcgagaggacagatgacgggacggcgtacccgggacattcatctccatgtgatggtgtcggcggaggagcttgcacagatacgggagcgaatggcggatgcgggtatccgcaacgccggagcctatatgcggaaaatggccctaaacgggtatgtgcttcatgttgatcttgagccggtgcgggagctggtttccttgcagcggcggtgcgccaacaatctgaatcaggtggctgtccatgccaacacctgcggcgtatacccggacgagatcgccgggctccaacgggactatcaggcgctatggagccgggtgtccgctgtgctgaatcagctggcggcgattgtggataaatgacgatggcaaagggacaggccggacaagactcgacccccatcggcatccttgcgtcctccacggcccggatgatacaatataggtaggatatatccactgaaaggagctgcaaatatatgcgtatcattttcaagatttttgccgtgccgattatgctcatcctgaccgtggtggttgccgttttcaaagccctgcttcatgtgggcgcatggctgctgggaatagcctccgggctgatagcgctgctcgctgcggcaatgctgtttaccggggaatatgtgggaggtggtgtatacatggcgctggcgtttttggtgtcgccctttgggctgcccaccgtgggggcatggcttctggcccatttgcagatcgtcaactactcactgcgggatttcattatgagctgacagcttcgggtcaagttggcccgaagtatcgaacacgaagaacggcggcccgatttgggccgccgttcttcgtgtatccatcctgcccgtcccattttggtatccgtctatcacattccaaaatctttcacaatacggaggagatgacgtacacggccactacctatctaaaatcgcatcatatcagtagcggcaagacaattcgggaatccatgcaggatcgttttgattacggacaaaacccgtacaaaacgcaggacggagatttgattctgtcctacgaatgtgaccccgaaacggctgacgcagaatttcttttaagcaaggcaaagtacaaagcaattacaggcagggagcagaagcgagacgaggacgtgctgtgctatcaaatacgccaagcctttccacccggcgaattggatgcggaggcggccttgcaaaccagctatgaactggcgatgcgctggacaaaaggcaatcatgccttttttgtagtgtcccacgtggatcgtccccacccgcattgtcatatttattataattcgacctcgctggattgcgcccggaaatttcgggactttttagggtcgggccgtgccttgcggcggttgtctgaccgggtatgtattgagcatggcctatcggtgattaccaacccaaagctgcacagtcaggggaaattcaagcactacggcgattggctgaacgcaggtggaaaacaaccgacctatctggaacagctgcggacagtcatcgatgcggcgctggcgaaacagcctgctaactttgccgcttttctctcatacatggaggcggcaggatatacagtcaagcacggtcgcagcgggagcatcagctttctggctcccggccagaaacgtcccactcgtctgcgtgcctccaccctcggggaaggctacgggccggaggagatacaggccgccatatcgggtagccgacggatcacggaggcgacggatcgcaaggtcaacctgatcgtggatattcaggccaagctgcgagagggtaaggggccgggctatgaacgatgggccaaggtttttaacctcaaacagctggcggcggcgctggcctatttacaggaaaacaacctgctggaatatgcacagcttgaggaaaaagcggaagcggctgccgggcagtttcatgctctgatggacgagatcaagaccatcgaggcagcgctgaccgtcaaccgggagctcaaggcagccacggtgaaatatgccaagacccgtcccgtttttgaagcctacaaggcggcgggctacagccggaaatttcttgcggagcatgaagcggagctggcgatctaccgggccgcccgaaccgattttcagcggcttctgaacggggcgaagctgccgaaaatggacaagctcaaggaggagggccgtaagctgaccgaccgaaaaaaggcgttgtatgcggactatcaggaagtcaaacgggatatgcaggaggtgttggccgccaaggccaacatcgactatctgctcggctacgacgggcaggagaaaaacaagaaacaggagcgatagcggatgggacgcataaggagcaaagcgacgcaaccacttcgggccaacttggcccgaagcaccgggtttggggaggctccccaacaagcagttttatgcggtttcgccgtaaggcaaaccgtgtaaaacttgcaactgtggccacagttgccctgcttgccgctacccactaccaaattctaaatcatagtttagtcattatatctgatctggcgcagactggcttgaacgcatatccagcttaatgcgattcgccacattctgtatcttgaaacaaccctgtagggtcgatgagcgggaacagaaaattattatagtcaattattttacatttgccatgcctgtggctgtctgcaatgccaaaggagctggctgtatgcactcaggcgtacaacaatgatattctcaacttttcccacaggaaatgccaagtgtgtcgcagaatgtaagcggaatggtattcagcttacggtgtgagtcgataaccgggatgcactgaccatatctgctcatcgtcccaatcacgcaggccggacggctgctgggaatattaaggtagatttcctccgatccgcttcaaaaacatacactatttcttcggcggtaatgcgctcattgctttcaactcgcgtcggcacagaattgcgcaaaggacaaatgccagggtatccgccacaggccccgccacgagaatgccagacaactgccagaagtaagagcagatgagcatagccgggatataaaacaacaattgttttgagagcgaggcaatagcagccttaactggctgtccaatggcctggaagaatatccccgcagccagttgtaacccgtccagaaataccagcgccaaataaatgtggaagcattgcaccgcaaattcttcatacaggtcggattcagttccaaaaatacggataagctgcagggggaaacattgaaaaatcgcccatgacgccaaagtaataacgctgcagacacccgcgcttaacagaaatacctttttcacccggtcatatttctccgcgccatagttaaaacctataatcggctggctgccgctggcaacgccaataccgatggaaagcgccagcacattcactttcatacacaatccaaaagtggtgattggaatatccgggccataaaccgagctcgccccatacttcgtgagcagattgttagaaatcatagcgacaactgtagatgtgagattgttaaagcagctcgcaaatccaagacttgcgatccgtccgattatttgcatatccaatccaaaagatgctttcgtcaaacggattgtttgaaatcggaacagatatactgcgttgcaaatcagcccgacgcattgactcataatcgtagccagagccgccccctccacgccccagtgaaatacaaaaatgaaaagagggtcaaggatcgtatttagaatggctccgatcatcatagagaacatggcaaatttgggactgccatctgtccgaattgccgaattgatcacgatcgcgacaatggcgcaggggaatccaaacacaatgatgcggccataattcaggacataggggagaatgttatctgtcgcgccaaacaaccggcagaggggcttcaaaaaaatggatgccagcacaacgaaaatagcgctgatcacagcggatgaggcgaccgcattcccgactcccttagccgccttttccggttcgcctttccccaggtgcaaactgaaaaatgccgcaaggccatcgccaaacagggctgcgaccgaaatcgcgatcgtggcaatcggcgcaatgatgttcgttgccccgtttcccagaaagccaacgccctgaccgataaagatttgatccaccatgttgtacagcgaattgataatcagtgaaataatacttggaatagcatatcttgccagtagcttgccgacccgctcatggccaagtgggtttgctgtttgtacattgttcatggcaaagtcctccttcgctttaataaatagaattctatctatatgggcaaaaaatttaccgggtgttttctgtcattttcaggatgaccgtttcgaatacctgcagatcctcctcggcgatgccgtaaaaaacactgtgcatatagcaggtaatgcgtgaagtgatgtcggtctgcattttgagcgccttgtctgtcaagataagcttcttaaatctgccgtcaccagcaatagtttcccggcgcagatagccgccccgaaccaaattattgaccaggcttgtaacagaggggcccttgatatccagaaactcttccaagtctttcgtaaacacatctttccgcccggactccatcatgatgtaatgcaagacatgggcttgaatgccggtcaatggcatatctgagaattgacgcatgaaatagcggcgcatcattctcgttaatttgtcgaactttcccatcaattttacatcatccatcgtacacaactccagtcatacagatagaattctatgcaagtacatgataatacacctgcgtggttcaaatgtcaaggggggagaatattattttgcaatatatctctgtgatgtaaatagatatgaaccaatctagggcgtatctgaaaagtcagacaacttcgtcattttaacaaaagggagatagaagccacatatacgaacgccaaaaacgaagtggcgagtttatcatatctggaggcaacacgacggaactgtttaagtttgttgaaaaagcactcaaccaggaggcgctccttataaagacaccaatcaacataccaaggctcttttgcgttctgctttggtggaatcacatagttagcattgtgctgtgtgatataagagcggatctcgtttgttccataggcccggtcacccagaacattgcagcctgcgattgttgttgattcaagcagaggaacagccatcttagagtcatgaacctcaccgccggacagcaggaaagaaacgggatttcccagcccgtcaacgatagcatgaatctttgtggtttttccgcctcggcttgttccgataaactggttatattctgaatttacagccccttttttgctcccgcactttgcggatgtgcttttatcgaagtgctgtcgatgctcagattttccatatcagcatctgcgttcagggcatggaaaatagcctccagcgttccatcgtcacgccacttgcagaatctgctgtatacgctttgatgtggaggataccggctgggaatatcctcccatgcagagccactacgagcaagccagaggatggcgttcaacatagtcttgttatcccatttcgcaggacggcctgttttggctactgggaaaagatactggatgcgctcccattcgtcatcgctgatttcatatcgttttgccattggctatcatctcctatttgtttttagtgtagcaaatgataaccttttgtgcaattttttgttttcagatacgctctagtatgttaaacaccaaatttacctccgctacaaactgcattttttatccggcgctttctacattttatcactggtgctgacactttcttacaatttattttccgcattgaactcatttagatagctctattattaatagacgacttaaaaatgctcgcaggcaacgtgtcgcaagtattgagcaacatatgttgttgaagctaatttttacgatgtgttatgctgattttatacaaatgctttgtctatgaaaacaaaagagatccagggttagcgttcatagcgtagaggcacagcatgttggactctgctgctattttattacttggcattgagaattatatgggaggtagtttcatgaaagcttcggagtttgcaaaggcaaagacagaatttgacggcggcctgtacataacagacaatacggaaattgtaaatgctactcctgcaatcttggatctattttcatgttatgaattaaggaggagcgatacgacggttgccttttataaaaggatatgcttttcaaaagagttctcgccagcattaatgaaagaagccagcgcaaaattcgccattccgtcgcttacaaatgctgaggaccatatagtactggcacgcggagaggagatatacgtgcatgccaacaccgacagggggctgctttacggcgccgcttcacttctccatttgtcagaagggggctacgtaaaaaacttgtgcttctataattctcctatctgtcaggagcgggggataaagctatttattccatcaaagaggaatgtccctttttttaaaaagtttgtcaatatgcttgtcttttacaagtttaatacgattatgattgaagtagggggggcgatggaatacaaacggcatccggaaatcaataaagaatgggtggcgtattgcagggagatgtcggaatattccggaaaaacgacggttatacaggacaaaacctttccatggtataaaaacgccattcatatggaaaatggcgacggcggctatttgagccaggacgaattaagaggtttgattcagtactgtaaagagcgcgggtttgaagtgattcccgaagttccctctctgggacactgcgactatttgatgatgggaaatcccgatattgccgagcgggccgacgatccgtatccggacacctattgcccctcaaatcccaaatcttatcaaatattgttcgatgtcattgacgagatcattgatgtctttgagccttcgataatgaacattggccatgatgaatactataccataggagtttgcgagaagtgcagagggaagagtggagcggatcttttttcggctgacgtgaataaaattgcagactatttggcggctaaaaacgtccgaacgatgatttggggagataagctgctcaaaaatgcaatcgttcctgggtcgggcccttttggtggagcacagattaaaatgtatacccctgcctttcacatacaggacggaaaattcattgggatcatgccggcgacttatcaggcgatcgataaaatatataaggatattgaaatcctgcactggaattggggccttgcagaaaatcttgaggacgaactctttgaagcggatctacatatccgttatggaaattttgaaagctatcttttcccgaactggcggcgtcatatgtccaaggggagccggggggcgataatctccaattggagtacactgaatgaaacgattttgcagcgcaatgggattttctttaatatcgcgtattcttacgtcatgttttgggatccagattaccgggaagagaattttgaaaccattcgggacgctgtgatgaaaagcctttataatataaaaaacccggaattgcaggagtgtcgtgtctgccaggattcgccgcatccctcctttatagaaattacatataatacggattatcatccggcctatcaatggtttgtggacggggtgtttccggaggattctgtttatgaaatcggagaggtgcgtttcttatatgccgatggtatgacggcggatttcccggttaaatatggagaaaatattgggtttcgatatgcgtcttgggaacgcgttatggatgattcccaggccatgtacaagatggacaaccacctaatagaaacgacctacagcacctgtccggtacaggatggaaagcagacctattacaggcatctttttaaaaatccttatccggaaaaggaactgacgcagattttggtagaaccaaaagaagaaaaaggctgccgcatttttgtcaggcagatcgacaggatgataaatcgtccgtagtggaggcaaaacatggcggaaacggtcaaatggccgattagaatccatcaggatggcggctattttgaggatcagaatgggaaaccattcttctggcatggggatacctgttggagaattttctggatgatgtcttttgaagaagcgtgccgctatctggaagaccgcgcccaaaagggatttacggtcatccaggcgcatatgcttcctcatcggctatatcagaacaatgtatatggagtaaacccgtttaaaaagcctggaaacatcgaagctttgaatgaagcgtactttgtcaatgtggatcgtgttatcgcgtatgcggaaaatctgggactggcggtggcaattgcccctatgtggctcagcacatgggaagacgactggcatacgctgtatcatggagaaccactttatcgttatgccgaacaagttgccgaaagatgcagcaggcaccgcaatgtgatagcttttattcatggaggggatgacgatgcaattccgcttcatgatgagatccgaatatgcgtaccgctctttaaaaaatatggccggcatattctccatacgtttcatgcgggtattggccccagctatccgtttttcggcgatgagaactggtatgatttttgcatgaactatacctatgattatgatgcttgtattcagcagatgatgggagccaggacaaaataccccaacaagccagcgctccttggagagacccattatgacggaaacgacgggattacgccatcggttatacgcaaatttgcttatacatcggttatcttaggaggagcggggcaaacttacggcaacaaagacatatggatggccaacatgttcctgttcgacgccctctatacggctgcctctcaaaatatgatggttttaagagaactgttcgagcggattccctggcatcagcttgttccggattttcagggccagctgttttgtacgacgagagcgttaatgccacatgcatcctctcggctgattccggccgcgcggacaagggatgggacaagcattttggcgtatgtgacggatcgccgcttatttacactcctcccagaatacggattttccggggaatgggtggatccagtcagcgggcgttcatttgctctggtgggaaagccgggtgacgtcctgcaaatcccaggccacaacgcagacggctcagatgactggattctacacgtacacctgatggaataagcgaggaaaggagaaagcgccgcccggaggggaggcgtgtcgtaactatgaagcttctatttttaggcggaccgggcaatatttcggaatcggccatctcgtactttctggataatggcgatacggttgcggtgataaagcggacaaaaggcggccttatgggctttgaggggaaaatcgccgtctactatggtgatcgggatcggctggacgtactgcttcccgtattctcggaatttcaaccggatatcgtaatcgattgtacctgctttgagataaagcaggcggaaacggttgtccgcgccttatacacggtgccatgcagaaggctaattttcataagcacggcggatgtttacggatatccgctgacgaacctcccgatgcatgaggacgatccatggaataagccaaacggaaagtatgccgaggataaaaaggccatagaagcactgtaccagagagcgttttggaacaggcggcccgcacttacgattgtccgccccggatattctctgggtaagacctttgcccttacgtcctttgaaagaaaccgcggccaacatctcattacccgaatccggcagggaaagccggtgtattcacccggcgacgggacgaccttgatcgatgcgggggccgcctttaacaccggcagaatgcttgctagaatctgtgaaaatgagaataccattggacaggcctataactgtgccaacgatcatgcggttacttatgacgattacctgcaggcgtttgcgtcggcgctggggaaaaccgtgcatattgtgcacattccgacggattttatgttttcattgggccgtcaagaggtggcggacagtattctgggggatcttgccagattcaatctgtatttttccgttgacaaattccggaccgaatttccggattttaagtggacatactctctgacggacgctgtgcgggactttatggagtatcaggagtcggtgggcggttttgaaggagcagaagagcggatgtttgaagacaaggttgtcgatctgtggcttcaaagtatggcgggggtaaaagcttatataagtcaaaacatcaattgatccgatgtaggctcgacggcggtgtccgctggggaagggaggaaaccgggcatgaaggatatatatgcattaacgccggagaaaagagaggaattcagcaggcatttgatgccgtgcctcaaacgtccgggcgggctgtcccttcggggaggcgagggaatttacatagaagatctggatgggaaacgctatatggatttcacttcggaacagtttgtctgcctcttgggctttggtaatgccgaggttgcgcgggccatttatcagcaggcgctaaatatgccagttgtagcgccgctccatcagacagaccttcgatatcgtgtgtaccataagctggcctctatagcgccgcgccatttgaaccgagtggcgtttacgatgggcggcgggctggctatcgaatcggcgatgaagatagccttgaagaacgtagagggatcgcggaattttgtaaccctatacggaggataccacggaactaccttcggcacggcggacggcacctttcttgcaggaaagggagccgccgacgcggcggtaaacgaattcttttaccggtttgccactatggccgagcatcacgttgtccgcgcggagagaccctactgctatcggtgcccatatggaaagaagtctggagaatgcggtctggagtgcgccgaatctctgaaaaggacgattctgtatggtgttgcggggcccgccgccggcgtgatcctggaacctatccaatcgggagggggccagatcccttttcccaaagcgtatttgcagcgcgttcgtgaaatatgtgatgaagcggggacgctcctgatttttgatgaaatacaaacatttgcccgaagcgggaaattttttgcggcagactattatggagtcgagccggacattctcgcgtttgcaaagggcattgggggcgggataccggttggtggtattctagttcatgatcggctggacggctttgacgatctcatggaagatatgcagacctttcagaacaaccacttgagctatgcggccgtcctaaaaacgctcgaaatcattgaacgggatcgactgctttgcaacgccgccgaagtgggcggatacataacatctcggctaaaagagatgcaggataaattcgcttttgttggggatgtacgtggccctggtttggcgatcggagtggaattggttaaagatcccgttacaaaggagcctgtagatgacacaacgatggaacggctgctttggcgatgcgtgcagcatgggctgttttatcagaacgcgcataatgtgataaagctcaaaccgcctctaatcatcacgatggaacaggcggcagaggctatgaatattttggaacactgtttggaagaggctgtgtaaatgaaagcggttgtgaaatatggggaattgccggggcaggtggattacagagatattttggaacccatctgcaaagacgaggatgtcaaaattgagatccgcgcctgtgccatctgcatgacggatctacatattgttgcggcgacctatccttggaaagtggggacgccgttgggacatgagttttgcggcgtggtagtagaagcgggaaagaacgtctgcaaatttaaggtgggggatcgcgtggtagcctgcatgaatggaggctttgcgaaatacgtagtgaaaaacgaaaatgactgggtgtttcccctgcccgatacaatctcctttcaggaaggagcgcttttggaacctctggcagcggcggtcaacagcgtttttcatcattcgcatattctgccaatggattccgtgctgatagaaggccccggcgtgctggggctttgtgcgctgcaggcagcgaaacaactgggggcccgcgtgatggtttcgggaaccgttgtggatgccagtcggttgaagacggctgagcgactgggcgcagacagaaccctaaacgtcatggaggaggatctcctgcttgcagccgaagagttttccgacggccggggtatggacacggtcttggaatgttccggaagccaggcggcgcttgacgccggtctgcaggtgctccgctatggcgggcagctaacgcaggtggggattttcgcgaaaaatgccacggtggatttggggcaattggtttatcatgatcgcagcattgtgggaagcgtggcatatgaccgggaaacttggatgcggacaatacgattggttgaatcggcgcgcatagatgtcaaaagctttatttcggaaactcttcccctgtccgaatggaaacgcgggtttgaaaaggcagccaaaagagagggctttcgcatcctgcttcttccgtagagcacagaagaaacatagagaaaaaacaggcagggcaggcgcgctcaataaagaaacgcgtctgccctgcctgttttaacggcggcgttttaatcgtgtatctcgatccgcattccgtcatgaagccaatttgaggacagatgccatacaggtgtccgcagcagaggatcctcagtggaatcgactggcctgccgttcacatataggctacgcacaccgctgtgtgtattccggtaaaggagagttaacgcatgccccttgacgactatacgcagttccgcgtgatcgcaaggcatttcgcgcggcatctggattgtcagcccgtctaaatccggcacgattccgaagccatgctttataaggccttttatcagtactgtaccgctgcctgtataccagtcgcccatcgattcaccgtctattccgtacgccggattgtaacaataggaattcggcatcacaaagggcgtcatggtgcaattactgtgagaaattaccattgatttctccatctgtttccatgccagccccccttcgcccaatgcgaatagcgccatgacggcaaacaggctggcgtggacatacgccgtgccgttttcataggttccgggcgtcgtcgtacagatccgcccaaccagcggccgcatggaaggcggaaaaggcacgtcaaaggttcttaagccatattttgagtccagctgttcaaaggccttcaggatgctttcccgcatggtaacgtccgtatggatcataccggaaagcacccagaacgcatgggaggtggagctgattcgcgcacggttgtcgggatctctccaggaaccaatcttatatgaaagcttgtccccccagccatgcacgacgcgcctctcctgcgcggcgttcctatcgatggcgtactggaacagaccggcttctatttggcggcgatatcgcgaatagccggctgccttttctttatgtaggccgatctttttcaaaatggcagccatttccttacaattctgataaaaatgcagcgtggccatgaccgatacaccggatccgaacagcttgccgggatcacgggtgccgcccagctcgttaatggaatcgttccaatcgccgtatagggcgcgcagacagcctgtcccgccttcgctgtcgagattgcacgcgagaaaatccatgattttgagaagatgatccagcacggtgtcgacaatgcggctcttggcaacaatgcgtgtattttctttgtttggaatataatatccacacggctcgcttagtatggaataatcgtccgtgaacgccaggtatgtgtacagtgtagagacgatccagtttccctgatcgataaacatgcgtaaatccatttccggaagcgcgtccgcagaagcgggaagggaaaactgtctcggaggcctgccgtcctccaaaatgtactgcatggcggtcagaatcttttgacggctttgggcaggctcccagatcaggctgccttccaactgctgcatgacatcgcgtatgccgataaaagagcctgcgtagtttttaccaagagcgcagaagtttacctgcttctgtacgcttttgataaaccggttcaaaaccttaacagaaacgctgcctttccaatcaccgaaggtgatgtccaggcaagacaactgttccagttcgtgcttttcgcggttctccagtgccttatcgatctgccgcgtatcaataccggctcccagtgctttttctgcttggcttaagctgtggcagtacgaaagatcgtattctcgtcgtaccgattcaccgggggcaagctccacatggatcatgtctacggctgccgggacatccgtcgtgctgacggcaaggcgcatgccggcgagtctgccgctgcgcagggattccgcattactcagttttcgtccgcttccgcccagcatatccatacgccccgccgaatggtattcagctagccggcggccaccttgttcggccatattgatggccaggcagtcctcattgcattgaagaaggcaagtgtcttttccgcgtcttccagttttctctagtttctcccaaaaattttcgctttcagcaaaacgcaggatcgcctcgatctccgaagccatgtaaaattgaaacggtttatccgtcatgttaacagcaacaaaagaaaaatggatgtgtttgtgggcgtcaacatgaagccttacggcgaaaatatgtcccttttccttggctatgtaataggcgcagcacgtggagtataccacatatcgggagataggcagaggctcaaacagcggtttgtttatctcaaaaagagaaacaggaaagaaaccgccgttttccaacgggattcccgcgaaaaaattgacagatgggtcatccgaggcatagatcggtttgaaaatatgaaacgtggattcgtatgcttctatgtatccggacgagcgcgcccatacaacgagaccgtccgccgaaaggggatagcgggactcgccgtgtttcctttccagacacacgatgtcttgatcgttcagatagtacacattttgaggaagcttttgctcgggcatctccgtatccagcgtttcaatgtcaaaaatgagtttttggattttttcagcaagtgtcatatggcattcccctccgcacggtttcttttcatttttcggagagcgcagaatcgtatttttccgataaaaaaagcgcgcagcccagttctttaaattgctggattttattctcgattaaggttgtctcacattcaaatttctgggccaggcaggctacgcacaaaaactcagttgcgaagcgatttaccatttttttatatacgccgatcgcgtcgttcgttaaaagcttcccgcagcttttacagcttgccatcacatatcctcgacgacgcgggcgcgaagcatcaggcagtcatgcgcatctaccaaggcggtaaaacggctgtctatcgtctctaattgggttccgttccacaagtccttcataatcagctttctgccgcagctgttattaagccccagctctgcgaggcagaaatacatggggcgactgtcatccgcaagattgaacatgccgatggcaaaatccccgttttccaggagcttggcccagataaagcagtcatcatcgccgcccgctttgaaggtttggaagccgccgataataaatggctgccgacatgccctgtcctgattgatagccagaatctcccgattcattagaatcctgcgcgtttcttcatccatctgacgaatgtcgcacccgatcatcaggggcgatcccagcaacgcccacagtgaaaagtgtgtgcggtactgttcaaaagaacacccctggaatccgacgttacccttgccgtgcattccaacgaccagcatatccatatcgttgaaacagcccgcactgttatgggtttgaagctcacgctgctggtgggcaatcgttttgacggactcccaagtgtcatatatgtccattgtggaacgccaagtatgtgcgcctgtcgtttggatccaagcttttgtatcgtccgctccccaggagcacgcgctgtataaaatgtcccgaccactcaattccaacgccacgcccattcggcggtagagcagcgccccggattcatcagcaggcttaaagcaatagtcatatttcagaaaatctacaccccattccgcaaaggactgggcatctaaaaattcgtgttcatagctgcctgggaattggccgcaggtcatgcagccggcacaggagtaaatgccgagtttcaaacccatgccgtgcaaagagtccgcaaccgcgcgaatgccgttcgggaatttttccggatccgggacaagacgacgatcggcatcccggtgccgcagagaccaaccgtcatcaataaccagatacacatagcccagatccttcagcccgctgtaaacaagcatttcagccgattcataaatcagccgttcatttacctggataccgaatgtattccaggaattccaacctaagggtggcgtaggagccagcataagtcgttaatcctttctctgttcgccgggcaaccggctttgcgactttggcagccaaatggtgacaaagaggcttgtcttaagtataccgaatcgagaaaggaaaacacaatgaaatatgttgcccgatacttgcagaaagttacctgatgtatgcctttaggaacgagcgggatcgtcccgcgcgttctcatccgttttgatttccctggagtacctcgcgcggtattgccgcgcggacatgttgtattttaggcggaacagacggtagaaggaggaaaaggtgctgaagccggttgacatcgctatctgtgaaataggcatgtcgctttcgatcagaagatgtcttgcacgatcgatgcggtagttgttgagatattcgcttggggataaaccgatctcctctttgaagatgcggtaaagataactgcggttgatattgagagtttttgaaagttccatgatggtgatggggttggcataattaaaatgaatataacccaccgcccggcggacaaagtcccgcgtcagagcgtctggctggatgttgtcgctgtgagaatcggccagaattgcgaaaaaagaaaccagttgagacaaggcgtataaatccgcgttaggggagagtcggttcagggttctggcggtggcctcgatttgctccgccagtggaactgcgatctccggggggatggtgatcaccatattaccgccgcggaatccggtgcgttcaatcaattcccgcgcgtaatcgccgttgaaggcaaaaaaacagtaatcccagggagtctctgcatccgccgcgtacagggtggtttcgtttggatagataataaacgcctggttggcggaaagatgatatgtggtattgcgcgcaacgtaggagcctttccctgaaacgatcagatggatgagataaaagctgcgaactacggggccatagcaatagcgcggtttacagcggtcccttcccacatgacacatataaagataggaattttgagacagtaagctggagaacaaaataggatcctgataggccattataatcccatcctttcctttacagaattatttttgcagggtagccatactgattcgataccagatacattcttttgaatgcctgtaacatattctcggatttccggaatcatacaacatattagaagaaatgagtcacacactacaattgacattatccgaagagaaaagctatactttaaatcagagaaaatacaaaaacgatctaattagttcatacaaaaagagagtagttgtataaagtatacttctgttgctgtttgttgtcaagagagaatcgataacaatttagaatgatttttcagcatattccgagggccggatcacgtgctgccgaacaactgaaaggagcagggaaatatgaagagacggtggtggagaacgggagccttgttgtatctcttcgcatatgcatgcagcttcatgccgtctgtggaagcgtccggcacgactcctgccgctgcggtggatgcaggcgtttatgaaggggccgccgaatcaataacagcggccgtgccggaaaccagcggagaaatagatggggaaaaagcggtctatttggaagcgggtgagacactctcctttactgtacagatccccaaagacgccgcctacacgctgggcctgctttactgtccgggagacgataaacggcggccggtggaagccgccatcaccgtggatggtctctatccgtttgaggatatggaaaagctgacctttcccaagctctgggaaaatgcgggcgagccccgcgtggatgggcagggaaatgagtttgcaccggaacagattttggtaaaggcttatacgcagcaggtggccgtcgatattaccggccgtcgggcgcacccgttcacgatagacttgacggctggagaacatgtgattacggtaaaagctttggacgcgccttttgcactggcagccttgatcctgggagcgccggaggttgccttgccgtatgaagcggtgtataaggaacagcgccagagcggcaagtcggattatacaggagagcagatcgagctccagggcatacaggccagcctgaaatccacagaatcgttgattccgctgtccgatggaaatgaagcgtcgctctcgccgtctgagccgaataagagccggttgaactacataggcggtacaaactggaatggaccaggcgatacgctgacgtggaaattccatattgaaaaatcgggctggtacaccttggggatccagtaccggcagaattatgttttgaatggcagttcctaccgttggttaaagattgatgggcaaactccgtttgcggaggctgagattttagagtttccttatggggtgggctgggcctttttcacctttgggggagacgaaccttacagaatttatctggaagctggcgaccatgagctgagtcttgccgttaccttagcggaactatcggatgttgtgtccaaaatggaaactctgtgtgaaaaattgggcgatttgtatcttgatatggtgatgatcacgggaacggacgttgacgtgtaccgcgattacgatctttatcgccagataccgaattttattgaaagtctgaacgcctaccgccagtcaataagcgaattggaaaatgaggttgaggaaatttccggtaaaaaaggaggttccacggtttccttgctgcggaatatgcggatggtgctggacaatatgtgcgaccggccgtatgaggcccatcgctttatcaccaattattacaacgtgtattgtagcctgacagccggtttgtatgagatgagcagtatgccgctggacatcagccggattctgctggcttcccctcagcaggattttgtaaaaccgaccgccggcttttttcgccgcgtggccttttctgttcaaaagtttttcggctcctttgtcgaggattacagcgcggtgacgagcgccgacggcagggaaaaggctatcaccttatgggtgaactggggccgggatcaggcgcagattctcaattcactgattcaggagggctttacacccgacacggggattggcgttcaggtaaagctaaccaatgcgtctttagtgcaggccatattgtcggggaacggcccggactgcgtattgcagcagtcccgcacaacacccgtggatctggccatccgcggcggtctgctggatttaaaggggtttcccgattttacagacgttgcatcgcgctttcaagataaggccacgcttccctacgagtataatgggggctgttatgccctgccagatacacagaactttttcatgatgttttaccgaacagatattttccaggagctaggcctaaaagtgccgaacacatgggacgaattcctggaagtatcggcagttcttcagcggaacaatttggaatgttacctaccctatacgcagatagtcgatatgacgaccatcaacagcggtgtcggcggcctgacactgttcccgactctgctgctgcaaaacggaatcaacctgtatgccgacgatctgtcagccaccacctttcaagagccgccgtccatatcggttttcactttctggacggatttttataccaagcagaaatttcctgttgcgatggatttttacaaccgcttccgaaccggaaccgctccgctgggtatccagacgtattcgctctataccaccctggcggttgctgccccggaaatcgacggccgctgggcggtagttcccattccgggcgtggaaagtgctacgggggaaatcaaccgcgtgcaagcagggtcaggaacgggctgctccattctggctttgaccgacgtggcccaggagtcctggggattcttgaaatggtggacttcggaggaggtgcagctttcctattccaacagtctggaatcggttttgggaacggtcggacggcaccccaccgcaaccattgaagcgttcaggcagatgggctgggacaaggagacgcttcagcaatgcctggagcagtggcaggatgtggaagagctgccggaagtgccgggcggctactatgtggcaagagggatcgatcaggcgtattggaatattgtgaacatggacgccaacgccacggatatgctgttgaaatggggaaaagtggtcaacgaagaaatttcgcgcaaaagggggcagtatggccttggctaaagggatgcataatcagcttggacgggcgaaccgttcggagaatcgggcgttcctgctgttgcttatgccgtttatggggttgttctttatctttacgattttgccgattgtgtcatcgatcgtgctgagttttacggactatgacatgatcaataccccccgttttaccggcctttccaactatttgcgcatgtttacgacggatgaggtttttccggtggccgtcaaaaatacactgctgttttcggtgatcaccggaccggtcagctttttcctggcctttctgctggcctggcttatcaatgaattccggcccggtatgcgcagcttgctggcgttcctgttttacgcgcccgctcttatcggcaatgtgtattatatttggcaggtcgcgttcagctcggacagttatggatacgccaacagcctgctgctgtcatggggacttattactgagccgattttatggtttcgggatgtgcgtttcagcatgatcatcgtgatgatcgtacagctttggctgagcatcggcatctcattcctggcggatatagctggtctgcagaatgttaatcccgaattgtacgaagcgggtgcaattgacggcattcgtacccgctggcatgagctgtggtacatcacgctgccgtcgatgaaaagtatcctgttgttcggcgcggtcatgcagattcaggcaaccttttctatcagtgcggttccaatggcgctggcgggattccccagcgtcaacaactcggtggatacgttggtgacgcatctgatggacgtgggcacccagcggtatgaactgggatatgccgcagcggtttccgtgttcctgttcatgctcatggcgctgttccggattctagttggcaaggcgctggatctcatgggaaagtagttaacaaggggggaaaccaggggtggaaaagctgctcaaaatcaaaacccgccggtatgccgccggcgcgtcgcaatataagcggtatacgcgctctcgggtcggcaatgctttctattttgcttttttattggcggcaggcgccttctccattcttccgatgatctattgtatttgtacatctttcaagccgctggatgagctgttgatttttccgccgcgcttttttgttcagcgtccgacgtgggagaattatcttgctctgcccaatttattggccaagttgcgggttcccctttcccggtatctgttcaacagtctattcgtcagtggcgttgcgacggctctccacgtgatcgcggcatctatggcggcgtttgcgttttcaaaatccaagttgcgctgccggatgccgctttttctgctggttcagttcggactgttgtataacgcgtatacgctggcggttccccagtatctcatcttttccaagctgcatatgatcgacacctattgggtgtacatcattccggcgatcccttcggctatgggtgcctttttaatgaaacagtatatggacgatagcattcccgacgctctgttggaggcgggtaaaatagaaggcgccggtattttccgcatcttctggtcgatcgttatgccgattatcaaaccggcttggatgacgttgattcttttttcttttcgggatatgtgggccattattccctccggcacgattttcagcgaggagttaaaaaccctcccctatgtgatgagcaccatcacagcgggcgggctggcgcgggcgggaagcgctatggcagccacggtcattttgatgatcccgcccattctggtgtatatgctgtcccaaaggaatgtgatcgaaaccatgagcagcgcgggcatcaaagattgatggagggacgaaagtggtgaataagcggaagttgtcggcgggctttttcgccgttatcctgtcttgcagcctcttcggatccatccctgccttcgctcagggggaggttggcgttcccaacgacgtgtatacccattgggatacgcccggagacaagaaagtcgtgtacagccggcccatgtatcaagcgaaggcggcgataaactccgaaaccctggagcttgaaacacctatggaaaaactgacggatatttgctgtgaccaggaaggaaacgtctatgttctccttggcgacgagtcccgtctgcttgttctagaaccagacggtacctttcaagcggaattgacgatcattggttcggacggcgcggctctcgattttactggtgcgcggggaatttatgcggatgcgtcggggatatacctcgcggatacggaaaacggcagggtggtacagcttgacaaaagcgggcggatgcaaaagcaactgctgataccggaatcctcgcttattcctgagggctttctatatcggcccatgaaggtgacgcgggaccgggatggctatctttatgttttgagcgagggctcctattatggtgcgatactgtattcaccggaaggggcgtttagcggtttttttggtgccaatcgtgtgacggcaacgctgagcacgtttctagacgaatttttcgaccggcttttcactaccacggagcaaaaagagggagcggtcaaggtgctcccttatcaattcgtggatttatgcacgggcgcggacaattatgtgtatacggttaccggcgcgactgcgctgcaggaaaccggggttggacaaatcaaggaattggcacccaatggcgtcaacatcttaaaaaagaagacggccgccggcgcttcggtggattccaacgaatttaa

SEQ ID NO: 4232 - DNA, 2165 bp, Unknown
  16S sequences of unknown bacteria
tgccgcccacgatgccgaggcgcgggttgaacgtgcgctgcgcgagctcgacgccggcggggatggagatctcgacgtccatgccgcctgcgtagccatgcgcctgcgccgcctgctccacctgcgcggttatcatcgcccgcggcaccgagttgatggccgccgccccgatgggctggtccagccccgggcgcgtgacgcggcccacgcccacgccgccgtcgatgcgcacgccgggctgctcggacaggctgaccttggagaagacgagcgcgccgtccgtgacgtcggggtcgtcgccgccgtctttgcgcaccgcgcagcatgcccagcccccgtctttctcgggttgctcgatgtcgagcgcaacgtcgatgccagcgggggtctcgacgagcacgctcgcgggaaacgcccccgcgagcaacgcctcggcagccgcgcgcgaagcgcccgccgcgcaggtgcccgtcgtgtagccgcagcgcatctgcctggtgcccacgtttatgtagtgctcgagcttgtgcatggcggctcacctacatccgcgtctcggagatggagaccgcgcccgtcgccgggtcgtagcaccccgcgggcaagtcgtagagctcgtcgatgacctcggggacgaagatctcgtcgggcgtgccgctcgcgaacacgcgcggccccttgatgcagacgacctcgtcggacacgatacgcgcgagctgcagctcgtgaagcgacatcacgatggccacctgcttttcccgtgcgagcttgcgtaggatctgcagcaggtcgatctggtacctgatgtccaggtaggaggtcggctcgtccaagacgagcacggagggttcctggcagatggcgcgcgcgaggagcacgcgctggcgctgcccgtcgctcacgtgcatgaagtcgtgatctgcgaggtcctgaaccgccacgagtcgcatcgcctcgtccacggccgcccggtccgcatcgtcgagcacgcccaggcgccccgtatgggggtagcgccccgcctcaacgatgtccgcgcaggtcagaagctcggtgcttaggcgctcggtgagcatcaccgacatctcgagcgcgcgctcgtggctcgaaagctcccccaggggctttcccgacacgtacgcggcgcccgaaatcggctcgagataccccgcgagcgtcttcaggatcgtcgatttgcccgcgccgttggggccgatgagcgtgacgatgcgccccggcctcacctcgagctcgatctgcgcgatgagctctgagccgtcgtagccgacggaaagccccgcgcaggaaagtccgcgcgcctccatgcgctaccgccccctcttgcgcttgagcaggatggcgatgaccaccggcgctccgaagatagcggtgacggcgctgatcgagacctcggtcggcgcgaaggcgcagcgtgcgatgaggtcgcagaacaggcagaagatgccgccgcccaaaaacgccgcgggaatcacgatgagcggcttggaagtgccgaggaagcgcttcacgaggtgcggcaccgcgatgcccacgaagctgatcggcccggcaaacgccgtgacgaccgccgccagcaggctcgagagcacgacgagcacgatgcggaacgcgcggatgttcacgcccatggactgcgcgtagttctcccccagctgaaacgcgccgatgggcttggacagcaggaacgtcgccaccgaggcgacgatgacgaccggcgtcatgccgacgatgttcgcccagttcatgcccgagaagctgccgagcgaccaattgcgcaggttcacgatgttttggtcggaggcaaacgtgacgaggaagtccgtgcccgccgaggcgatgtagccgatcatgacgcccgcgacgatgagcatggccatcgagttgatgcggcgcgagacgagcagcacgaacaccatggcgatcgtcgagcccacgaacgctgacagcacgagcatccacgaggtcatctgcgccgacgaccccacgacgaagatcatgacgagcgcgacgacgaacttggctcccgacgagatgccgaggatgtaggggcccgcaatcgggttgttgaagaaggtctgcagcagaaagcccgccagcgcgagtgcgccgccgagcagcaccgccgcgatcaggcgcggcaggcg

SEQ ID NO: 4233 - DNA, 22889 bp, Unknown
  16S sequences of unknown bacteria
atgtacgtcgagatcgtgccttcgtcgtccttgaatatcccctcgcaaagggcgagatattcgcgcgcgcaggtcttttcggcgatctgcgcggacagcgacagatgcgcgcggtcgtttttggcgacaacgagaagccccgtcgtgtccttgtcgatgcggtgcacgatgccgggacgcacgacgccgttgatgccgctcaacgaatccagccgatacaagagcgcgttgacgagcgtgcccgaaagattgccactgcccgcgtgcaccgtgagcccctgctgcttattgacgacggcgatgtccgcgtcctcgtaaacgatgtcgaggggaatattttcgggcgtcagatcgagcgtctgcaaagcggggatctctacctcgatcgtttccccgacggcgagcgggcgggaggctttgacgggcctgccgtccacgacgacgcgtccctcgtcgatgagttttttcgccgaagaacgggtgatatccataagcgccgccagtcctacgtccgcacgttcggcggcggtttgtacgagaaaagtttttttatccatcctgctcggcagaatcggaaacgtcctttttcaaagaacccgcggcgtcgtccagatccctcttctccttatcctttttcccgaaacggaagatcgcgtcctcgtcgataaacagcagatcgagaatgagcatgaccgcgcccgcggtgatggcgatatccgcaacgttgcagttgaagttgagaaaagaaatattcccgacgctcagcgcgatgaaatcgcgcacgccttccagaacgacgcggtcgataaagttgcccagcgcgccgcagagaatgagcgccagcgccgtgcgcataaagcggcggctcggtttggtctttacgagcagtaccaaaaagacgaccatggcgacggacgtgaccgcgatgaatacggggatcgcccattccttgtcgcccagcatgccgaacgccatgcccgtattcatagttttatccagcgccagaaggccgggtatgatcgtaagtccttccacgttgaaggcaaagatgagcgctttgctcaactggtcggcgaaaagtaccgcaaagatgatgatcgcgtaagccatatatactccgttatttattcctcgtccatgagtcccagttcacggcacagtttttctaagtccagttcctgtttgggattgagaacgtcgtcgaggttgaaacccgtatcgctctcctcggctacgtatcgctcgatccgctttttgggatcgaacggcatctcctccgcggagggcggatcgtcgctgaaaaaggcggtgctttccctccctaaaagggcggcgagatggtctgcgaacgccgcgtatttctcgccttcgcccttgggcatgctgtccgccatctgcgcggcgagccgcttccatttttccgcaaacatttgcagcgtgcgaagttcgcattccgcgttcaggcggtacaattccttaatttccgaacccttttcctcggcgtccacgatggcctgtcccacccgtttttcacgcgactggtattccgcgcacgcggcgcgcaggttcttgttttccacgttcagcctgtccacccgctcttccaactggcggatacgctgctcgtatgccgttttcatgccttcggcgagtttttcgaaatcttttttggaataactctttttaaacatttttgttccttatttccgaaatcatctcgttcttgacgttatataatttttcagacaagtctactttataaatatgcggattatccagccgcttatactcgtcccagaaactttgcttttctctctccgcatacgcgcacacttcggcaaggctcggcgaaggcgcgacgggttttccgccttcgatgacctttcgggaaaggcggcgcaccgtataattcgtgaaggtcgtccgcttccaggtatccttgggatggaaaatcgtgagcggttcgcgctcgtcgatctcttctcctttcagacagatcagatccgcctccgccttcccgctctccttatcgtaaatgcggaacacttctttgaaggcggggttcgtgatcttatcggaattgtcggaaagtttgatcttgttgatctcgcccccctcggcgggatagagcgccgccagtttatagacgccgcccagcgcgggaaggtcggaacttgtgataagtttcgtgcccacgccccacagatcgatcttcgcgccctggcttttgagggaagcgatgagtttttcgtccagatcgcccgaggcgcagatgatcgcgtcgggatagcccgcttcgtcgagcatgcggcgcgcctttttggaaagataggcgagatcgccgctgtcgaggcggatgcccttgggctcgtgccccgccgcgcgcagttcgtcgaacacgcggatggcgttcggaacgccgctcttcaaagtgtcgtaggtgtccacgagcagcaggcaggcgtcgggataaatttcggcataggcgcggaacgcctcgtattcggagggaaaattcatcacccaactgtgcgcgtgcgtgcccgcgacgggaataccgaacagtttgcccgcaagcacgttggacgtggaactgcaaccgccgatgatcgcggcgcgcgcgccgtacagccccgcgtcgggcccctgcgcgcggcgcagaccgaattccatgaccgagtcttcccccgccgcatacgccactttggacgccttggtagcgatcagcgtggcgtggttgaccacgtttaaaagcgccgtttccagaaactgcgcctcgcagatgggcgcgcgcacggttatgataggctcttcgggaaaaacgagcgtgccttcgggcaccgcgtacacgtcgcccgtaaagcggaatttttcgagataccgtaaaaacgtttcgtcgaataaacgcagagagcgaaggtattcgatgtccgagggtgtaaagccgatgtgcgtgatatagtcgatcgcctgttccagccccgccgccaccgaataggtgatgacggcgtttttacggaagaacagatcgaacactgcgacgtccttttcccgcccgcaccgcagatacccgttcatcatggtaagttgataaagatcggtcagcatggtcagatctttcatgtcatttctccggatcgtcgtcggcaggcggcgcgtttggtttcggttcttccgttttttgttcggaaatctttttcgcctcttcttcctgtttcatctttttcagttgctctttggtatataagcgcggcatgatcgcgagcggctctcccgacgcggcgccgacgaacttgccgtgctttttgtaattccagatcaaaaggccgatggcgagaacgactccgcccaccgccatgatgatcgccatcacctgcgaaacgggtatattcgaaccgagaataaactctccgtcgcgcagcggttccatgacggaacgcgtcgtgccgtaggcgaacagatacccgcaaagcgccaggccgttgggttttttgaaaaatttccacatgaacgtgaacagcaacgcgaacacgatcagattgagcatactttcgtaaaagaaaaacgcatagtgccattcctgcaacttatcgatgaatactgcgaacggaaaccattgcagcgcctcgttggtgacgacgccgccgtacacttcctgattgacgaagttgccccagcgcccgatcccctgccctaaaatgagcgcgggaacgacgcagtcggcaatgcggagaaagttcactttatggaggatacagaaaatcgcgacgccgaccgctccgccgatcacgccgccgatgatggaaagccccccgtcgcggatacccgagatccattcgctgatcgggacctgatccgtgatacagtaaaagacgcgcgcgccgataatggcgagcgggagcacgcagatgaccagatcgagcacccagtccacgggcagattgcgccgtttgaaaaggaggcacgccacgccgatccccaagatcatgccgcacacgatgatgaccgcgtaataatatatcgcaacgccgaaaacggtgaaatgcgggttgtcgttcgctaatagcgtattcaggttcatatcgacctccttgccgtcttacttttattataacatatcgcccatgaaaattaaagttattttatgaaaaatttacaagtgaaaaccaaaacccctgcggaaaatttccgcaggggcgttttttcgggcgatcaagcctcttccgactcgaacatatccttgcctacgccgcataaggggcaggtaaaatcttcgggaacgtcttcccacttggtgccgggcgcgagaccgttatcgggatcgcccgttgcttcgtcgtattcgtaaccgcagatcgagcaaacgtatttcgccataaataaaatctccttttgaatttttattgaaaccattataacagaaattattgaaatttcaagccttttttccaaattttcccgtagaaccgaacccgccttcgccccgcgccgtatcggaaagcgtttcgcattcggtaaactccgccctgagatagggcgcgatgacgagttgcgcgatgcgctcgccgtccgcgatggtgcgcggctcgttcgattggttgtagagcgcgaccatgatctcgccgcggtaatcgctgtcgatgactcccaccttgttggcgggcgcgagcccctttttgcaggcgaggccgctgcgcgcgtacacgaggcctacgaggttttcggggatctccgcggcgatgcccgtatggacgaacgccgtttcccccgcgccgatcgtgatctctttgtccgcaagcgcgtacaggtctgcgcccgcggcacagtcgctgccgtacgtgggcgcgatcgccctttcgtccaactttttgaatctgactaaaattttgttcaaaataatttctccgtcggatgtattttcagtttgtgcaaatgttctatctatattcgccctggcggtagaaaaccagcccgcccgttttcaggcactccttcacgtctaaaatgcgctggttggaagaaccgcggaattgcagtttcagatcctttttctcttccacgaactctccgtctacgagaacgtcgatgaaagacagcatttcgtccgtcgcctcgcagtgcgccctgcctccctcgcacagatcagagtcgtacagataacccgtgtagcaccagacggtcttttgcggatattcgcggcgtacgcgccgtaaaagttttacgagcgcgcgctggttggcgggttcgaacggttcgccgcccaacagggacagtcccgcgatataagagggcgccaaagcctcgacgatctctcgttcggtttcttcggtaaattctttgccgaaagaaaaatcccacgcctcggcgttgaaacagcccttgcagcggtgcgtgcagccgctgacgaacagcgaaacgcgcacgcccacgccgttcgccacgtcgtgttttttaatggtcgcgtaattcatacgttctcctcgcgccgacggcgcaaaatcacagatgcaaaacgcgcgacttgatctccttggtcttgccgaggttccagaaattttcgccgagataaccgcacgtgcggcgcgtcacgttcatctttttgtgatctttgttgtggcagttgggacattcccactcattgtcgtcgttgatgatgatctccccgtcgtagccgcagacgtggcaataatcgctcttggtattgaattcggcatactggatgttgtcgtaaatatatctgacgacttcttccatggcttcgaggttgttctgcatattggggatctcgacgtaggaaatgcagccgcccgaagagatgggctggaattggctttcgaacgtgaatttggaaaaagcgtcgatatcctcgcgcacgtccacgtgataggaattggtataataccccttgtccgtcacgtcgggtatggtgccgaatttttccttgtcgatgcgcgcaaaacggtagcagagcgattccgcgggcgttccgtacagcgcaaatcccagtcccgtcgcctttttccatgcgtccgtcttgtcgcgcatatgctgcatgacgcggacggcgaaatcctgcccttcctctttcgtgtgcgtgacgcccttcatcagtttggtcagttcgtacagcccgatatagccgagcgacagcgtggaatagccgcccatcagaagtttgtcgatgggctcgcccttttccagccgcgcgatggcgccgtactgccagtggatggggctgacgtcggacttggtgcctttgagcgcgcggtggcggcacatgagcgcctcgtagcacagatcgagccgctcgtcgaacagttgccagaactttttctcgtcccctttcgccacgatgccgatctgcggcaggttgatgctcacgacgccctgattgaagcgtccctcgaatttatactgcccgttttcgtctttccagggggaaaggaaggagcggcagcccatgggagcgaacacgttgccctcgtagatctcgcgcatctttttggcggagatgtagtcgggatagagccgcttggaagagcatttgaccgcaaatttcgtgatgtaatcgtatttgccgcctttcaggcagttgaattcgtcgagcacgtacacgagtttggggaacgcgggcgtaacgtagacgcctttctcgttcttgatgccctcgtaacgctggcgcaaaatctccatgacgatcatggcgttctcttcgagatactcgtcgttttcatccagatgcagaaagagcgtgacgaaaggcgactgcccgttggtcgtcatcagcgtattgatctgatactgaatggtctgtacgccgcttttcagttcgtcctgcacgcggtcttccacgagttttccgatcgccgcatcggttaggtcggggcaggtctcgcggtaatgcttttcgaatttcacgcggctcttgcgcagatatttgccgagatgacgggtatccaccgactgaccgccgtactgagagcaggcgaccgccgcgatgatctgcgtgaccacggtgcaggcgacctggaaacttttcgggctttcgatcatcttcgcattcatcaccgtgccgttgtcgagcatatctccgatattgatgagacagcagttgaaaataggctgcacgaaatagtccgcatcgtggaaatgcagaataccgtcctcgtgtgccttggaaattttttcgggcagcagaatgcgcttggtgagatctttggaaacttcgcccgcgatcaggtcgcgctgcgtcgccgcggcgagcgcgtttttattggagttttcctccatcacgtccttattcgcattgcggatcaggcttaagatcgcctcgtccgtagtgttcgccttgcggacgagcgcgcgcgtatagcgataaatgatataagttttggcgagttcgaaatgcccctgttccatcatcttttcttcgatgatatcctggatgtcctcgacgagcattcttttctttttcttgctttcgatatagtcgagaatgtcttcgatctcctctttcgaaacgcgttcggatttttccacttcggcgtttgccttgccgatggctattgttattttcgccctgtcgtattcggcaatgctgccgtctctcttgatcacctgcatagttgtcccgtccttcttgtttttgcatcacatattataatacgaaacgtaaaaaaaaactgttgctaaaacaacaatttcaaaaaaatacaatatgtagtgttttgtgcgacatttttattctatatgtagaaaacgcgatcagtagcgtatgatgccgaaaggcttgatctcgttcgcctccgcctcgatggaaatgcggtaggaatcgcccttttcgatcttgatggaaacgggcccgagaagggaaaaatatccttcgagcacccgttccagatcggcgagcacgacggcttcgcattccgcagaaagaggcgactgctcgcgtttgagtatttcgcgcgcacgcgccgcgttgttgtttaaagccttcatacaccttccctacaaactctttttcaggctccttcggatactgccgaaaaaaccgtgatatttatacgtcacgttaaagatgcgccgctgcccgcgcgcaatgttgcccgccagaagtttgaacgctttctgtgcgtcgccgcccgccacgcgttcgcccagaaatacgccgtcgtcctgcggaacgatgccgataagggggattttcagaatgtcggagatctccttgggcgtcagtatttcgccgtcgatgatcatatccccgcgcaccatgttgatgaccagttccacactcttcaatttataacttttgagcacggagatcaccttatcggcgtcgcggagcgatgatatatgcggcgtggtgacgacgatcgcttcttccgcggacgcgaccgcgcggtgaaaaccgccctcgatgcccgcggggcagtcgatgaggatataatcgaaacgcggcgagagattgtcgagaatgagccgcaccgcctgcggcgaaacgtatttgtcgggttcgctcttgttcgacgccagaataaataggttggcgtactgcggatggcgcacgagcgcctgtttgggacggcaacgcccttcgatggcgtccacgagatcgtactggatcagcccttccacgccgcataccacgtcgatattgttgagcccgaaatcggtatcgcacacgatcacgcgttcgcccgcaagcgcgagccgtattccgaggttggcggcgagcgtggtcttgcccacgccgcctttccccgatgttatgacgatttttcttgccatatcctgtcctctgcgcactggtaaatcttaccgtacagtataacgcccgcgcgcggacaaaatttgaattttttcgtcgttttttaccgaaagcgggagtatttattctttccctttcttttttcgggagccccaggtcgtcttcatgacgatcttatcgcacagatacaacagcgaaggcagcgcaaagaagatcatgacgacggaagagatcgtacccacgcccaacaaaagtcccaccgttgcgatggaattctggctggatatgatgcggatgacgaaaccgcagcacatgagaacggaacccgaactgagaatagtcggcatggcggcggagactgcgcccgacagcgcgtcgaatttttccgatttcttgcggagcgccacgtaattggaagagagcagaatgccgtagtcgatggtcgcccccatcaaaatacagttggtcacgatataactcatgaaaaagatcggggacgaggcgagcgcgaacaccgacaagaatatccagaccgcgccctggatgacggcgacgagcaaaacgggtatggacagcgaacggaatatgatgagcacgatgaggaaaatcgaaacgatggtgaacacgccgatgaggatctgatcgctgccgaaggactgtttgagatcgcttgtggacatgatctcccccgccacgtgaccgttgccctcgaacacctccgcggcgagcgcgttggcatattcggcaaaggcgtacgtttccgcgccgtcgttcggcacgtctacgttgaagagtacgcgcgtataattgtcgccgaggaacaattccgtcgcgcggtcgatctctttttgcgatgcggcgactttcgcgcgcattccgtcgtccattttatagagaagaagggcgtttttatccatattttccgaaacgaatcccaaaagatcgcgcgcggcgacgggagacgcgggtatatttcccccgttcattaaaattttgaagtacacgcccgagatctggtctgcgcccactgcgggtatcccgctcatcgactgcatggaatcggcgagcgcggagagttcctccgccacctctacgaaggtgtactcgccttcctttaaaaacgtctgatagacagccgacatatcctgcacgctcgcaagtttactgcccagaaagatgcggatggtcggatcggagagcataaaatcaacgaggacgtttccctcgatcgccgaatcggcgggaatgccctgctgcttgccgtacaacgcgtatacaaattcgatctgctcctttgtaacgtccgcaaagccctccatcgcgccgctcgtcagcgtttcgtaaaactctgccgcggtattctcggagtgcatgagcgcgttgacggtatacagccgttgcacggtgagcgccatatccgcgggcagcatttcctgcgtttcgggatcgtttaggacgagtccgttcgccgccgataaaaattccgtcatcgtcattttcagaatttcgggcgcatcgtacagatgatagagcgcgaacaactgcgaaaccgtttcctcatctatttccagtttttccgcagccgtttccacgctgtactcttcgagaacggtattcgtataggcggagtagccgacgagcgcggggcggccgtcttcgaaacggtagttcgccaagccgtcgataaaccgctgctgtttttccacaccctcgtcgctcttatacacgagcacgacggtattgctgttgccgaacgtctgagcgatggcgtcgttggctgcgccgctgtcggtaaaggtatagacgttgcccgtctgcacgaacgccgcccccgcgacgagcgcgacgacgaggggcacgatcacgagattgcctttcttcgcgacgtttgccagaaaatgcgcgcgcacggcgatatgttctctctcgcccttggtttttttgtttttcgcgcggagtttggtctttattaaaattttatcgaaaagaaggatcacgcacggaaagagggtgacggaaacgagcgcggagatcacgatgcctttcatcagcaccatgccgatgtcgaaaccgatggaaaaggacatgaataacagcgccaagagtcccgcgatggtggtcaaagaacttgcggaaacgggtttgatacattccgcgatggaatcgctcatcgcccgcttcgggtcgggctgcgtttctctgttcttatgataggaatgcagaagcatgatgctgtaatccatcgccagagccaactgcaatatggcggcgatggaattggttatgtaggatatgctcccgaaaatgatattcgtgcctaaattgatcagcacggccatccccgccgtggcgagaaacaggagcggttcgagccaggaacgggtggtcacgaccaggatcccgtaagcgatacagatgcagatggcgaggatcatcgggatctgccttgtgatcgcctctttctggctctgtttctgcgcggcggtgccgccgaattccgcgtcgtaactcgcgaccgcctctttgatatcggagatgacctcggcagccgtttccgaatagtcgtcgccctggatcagtacgatatacagcgccttgccgtccttgaaatagttggtgctctccgcgtcgaactccacctgggatacgttttcgatgtccgagagcattgtcttgatctccttcgcggcgctctcgtttacgcccgaaagcatgacctgcacgttgcccgtcagcccgaactcgtcctccatgatatccagcgcgatgcgcgtttcggtatctttcgaaagatagtcggaaagattataattgactccgatcttcggcaaaaagatacaactgacgacgagcagcgccgcgcacacggcaaagacgacgtattttcctttgatgatccgatccgctatttttttcatggaaactccttattattgatacagttgaaagttaattgacatttgtaacggataatattataataaagataagaaaaaaagtcaatgaccaatctgggcgcaaatgtcaaataattgacgttttgccgacgaacgtttccgtacgagaggagaaacatggatcttcgcattcaaaaaacatacaaagcgctgaccgacacgtttttggaactactcgaagaaaagcatttcgaggacatcaccgtggaagagttgtgcagccgcgccatgatacggcgcgccaccttttacaagcactttgccgataaaaacgactttttcatatttctcgtacgggagatacagcaaaagtttatcgatgaaaatcttgtcaacgcctgcgcgccttattgcaacgaaggcgctctccgctcgtttatcgaatttatgtgcgaacacgaaaaactcgtaaaatcgatctcggagagcagtatgttcttacttttggcggatatgatctgcgaacagatcgcgttcaatatgcaactttctttcaaagaaatacagcgcgggagcgcatattttcccgtacaaccggaaatcgcggcgcattgtttcgcgggcgcgctcgttcagacggtaaaatggtgggtactgcaaaaaaataaaatatccaaagagcaactcgtggaacaactttcaaaactgttatttccgctgtttcccgcgcagtcttaaccgaaagagcggcgtcccccgtagacgccgctcttttattgtatgctttattccgcgtcgatgtcgataaacgaaaatttcgtaacgtcgaacaatccgcggtcggtcagtttgagttcgggtatgaccgcaagtcccaaaaaggaaaggctcatgaacgcttcgtaatcgcggctcacgcccatcgcgtaggcgcgttcgagcagcgcttccgacgccccgacgaattcttcggcggaggcgctgctcatcagccccgcaatatccagcggataagaatacgccttttttttgtcgatgaccgccatgccgccgccgatgcgctcgagttccgcgaccgccgccgccatatcctcgttatcgtcgccgagcacgacgatattgtggctgtcgtgcgaaatggtcagcgcgatcgcgccccctttcagcccgtacccttccaaaagcgccttgccgatattgcccgtcctgtgatgccgctccacgatggcgagtttcagaagatcggtgcccttcaaccgcacgtcgccgttcgcgctcttcacttcgcgcacgactttttccgtcaccacgccgcctttgacgatgcgcatgacgttcgcgcgcgcgcctttgagcgcgatcttgaaatcgtccgccgaaacaggcttgatcttgacggtgtttttcactgcgtcgggaatatattttttacaggtaaagagcggtttcccctctttcgcgacgactttgcccgccttgacgaccagtttcgcattgaaattttgtaaatcgtccactacgacgaggtcggcgtcgtaagcgggcgcgacggctcccttgtacggcaagccgtaacattccgccgcgttgagcgtggcgatggtgaccgcccgaacggggtcgagcccgcttctaaccgcgacgcgcaaggcgttgtccagatgcccgttggcgacgaggtccgccgcgtgcctgtcgtccgtacagaaaagaaagcggcgcatattgttcgcgtccaccgcctgactgttcaaagcggcgttgcgcgttgccgagccttcccgaaggtgcacgtacatgccctttgaaactttttcccgcgcctcttcgggcgtggcgcattcgtggtcggtacggatcgccgccgcgatatagccgttcagttccctgccgcccgtagagggcgcgtggccgtcaatcacttttcccgcgtcgatcgccgcctgcaattttttcagaacgtccgcgtcggtgttgacgacgcccggataattcatgaattcgccaagaccgaacacgaaatcttcgcggatatatttttcggtatcctcgcccgtgatgacggctccgctcgtttcaaagggcgttgccggcacgcaggaaggcagcatgacgtgcacttcgagcggggtgcccgccgaagcctcggcaatatacctcgcgccctctataccgcagacgttgatgatctcgtgcgggtcggcgatgacggtcgtggtgccgcgcggcagaacgagtttggaaaactcctcgggcgtgagttgcgaactttcgatgtgcacgtgcgcatcgatatacccgggaaggacgattttgcccgaaatgtctatttcctcttccccctcgtacgcgccgaacccgacgatcttgccgccgcagaccgcgatatccgccgcagtcacctctcccgtgaacacattgacgaaacgcccgtttttcaatacgaggtcggcctttcggcggcccgtaccctgctcgatctcatttttcagcatagcctttttacctctcgtgaattatgccgttattatatcatattttccgattttagcaaagcaaatcgcaaaaaaataaaagccccgcatttgcggggctttcggtcgatgatttagtgcgtgaacaggaaggtaaacaggaagatgagcgaaaggatcgccgtaacggggctgatatccttgtatttacccgtgcacagtttgatgatcgtgtaggaaatgaaaccagccgcgatgccgtacgaaatggaatacgtaaaggacatcatggtgatggtcaggaacgcggggacagccgccgcggggtctttccaatcgatatcgacgacgtttctcatcatcagaacgccgacgtacatcaaagcgcccgccgtagccgcgctggggatgagttgcgcgacgggactgaggaacattgcgactgcgaagaagagcgcgaccatcaaagaggtaaagcccgttctgccgccttcggacacgcccgaagaggattccacgaaggtcgtgacggtggaagtacccaaaatagcgcccgtgcaggttgcgatggagtcgcagagcagcgctttctggatatttttcacttcgccgttttcgtcgatgagcccgctctctttgccggcagcctggcaggtgcccatcagagtaccgatggtatcgaacatatcgaccatggcgaacgcgatgagcgccgcgacaaagtcgaagatctgattggcgccgatgcccttgaagccttccataaagacttgtccgaaagccatgttgccgaaatctttgaacgcgttcagaggattattgaactcgatctggttgaacatatcgatgcaaacctgcgaacccgccgccacgccgataccggcaaacacgtaatagagaacggcgctgccgacgatgccgatgaccatagccgctttgactttcaacttggaaagaatggcaatgagcaaaagcgagatgatcgaaacaaccgccgcgatcatggcaagaccgttcgacgtgaaatttaagacgttaaaggaaatgagcgctactttcgtggattcattcaaaaccaccaagcccgcattctgcatgccgacaaaggcgataaagaggccgatacccgcggggatcgcgatacggatcgactgcggcaccgctctgacgatggcgcggcgcgcaccgacgagagtgaggatcaaaaacagaacgcccgagcacagcacgataagcaagccgttggcatacgaatatcccatgcctacgcaaatcgtatagacaaagaaagcgttgagccccatgcccgaagcctgcgcgaacggcagtttcgcgaggaacgccatgagcaatgtacccacgatcgcggaaagcgccgtaacgatatacatcgcgccgaacgacacgcccaaaacgagttgtcccaattcgtgatttccggtgctgaacggatcgccgaacatattcgcgtttacgatgaggatataaaccatcgtcataaacgtggtcaagcccgctaatatctcggtcttgaagttggagcccatcttgctgatgccgaaaaagttatcgagtttgcccttaaatcccgtatatacgggagcggcgacggcgtcgccgacgggcgcgttctccgcaggctgtttctcttcgacttcatcggtctgttgattatcaaccatcttaaacctccgtgaaaataataaactataactattttatcacaagaccgtaacaaacgcaatcgaatgaacacattttttaaaaattttgtcatattgcgccgtgacaaaaagagagcgcgttttaatacgcgctctgtgtcaaatcattatttttactcttcgcgggaacgttcgcagcagccgccgcaggtacaggcggtctctttgcccttcccgtttgaaaagcccgtccgcgtgcggaaagaattgagcaccgcgagcatcatcacgcccacgtcagccagcaccgccacccacaaaggcacgatatccagaagccctaaaaccatgaggatcaatttgacggcgatggaaaatgcgatgttctgcacgaccaccgcgcgggtcttgcgcgcgatgcgcaccgcgagcggtacctttgaaagatcgtcggaaacgagcaccgcgtccgacgcctcgatggccgcgtcgctgcccacgccgcccatggaaacgcccgtatccgcctcgatgagcacgggcgcgtcgttgatgccgtcgccgacataggtgagcgcgccctcttttttgagtttcgacgcgatctccagtttttgatcgggcaaaagttcgctgtacgtttcgtccagccccactgcggccgccaccttttcggcgcggcggctgttatcgcccgtaagcatgaccgtacgggaaacgccgagttttttgagcgccgcgagcgactcccgcgcgttttctttgatcttgtcttcgatctccaaaaacccaagatacttattatcgtacgccgcgtacacgagcgtgccgtccgcctccgcaggctcgaacgcgacgccgttttccgcgagtagtttggcgttgccgacgagcgcggtcttgtcgtttatcctgcactttatcccgcgccccgaaatttcgaagacgtcctccgcctcgcccaagggagcgatccccgcaaaagcgcgcgccaaaggatgcgaggatttttgttcggcggccgcggcgacggcaagcagaaattcgcgttccccctcctttacgggatgcgcggcggagacgcagaagtcgcccagcgtcagcgtgcccgtcttgtcgaacgcggcgatcttcgtgcgggcgagcgtgtctaaggaggtggaacctttgaccagtatcccgtgtttcgccgcaaagccgatgccgctgaaataggagagcggcacggatatgaccaatgcgcaggggcaggaaatgactaaaaagacgagcgcgcggtagacccagtcgccgaaatcggcgtaatgattgcccgtaaacagggggacgagaaacgccaccacggcagccgccagacagacgacgggcgtatagatctttgcgaatttcgtaatgaatttttcgggtttcgccttctttgccgtggaattttccacaaggtctaaaattttggcgaccgtgctgtcgctgtacgccttttcggcgcgcacttcgatgacgccgcccgcgttgatgctgccgcccaaaacggcgtcgccctccgaaacgtccgcaaacgcagcctcgccgctgagcgatttgacgtccagcgccgtcctgcctttgacgactaccccgtccaccgcgatcttttcgcccgcttttacgagcatcacatccccgatctctatttgttcgggcgttacggtcttctgcccgttttcggttaaaacggtggcgctctcgctctttaagtccatcaggtcggcaatggacttgcgggaggcccccaccacgatgctctgcagcagttcgcccaagcggtacagcagcatgacctcgatcgcctcggcgtattgcgccagacagatcgcaccgatcgaagcgatggtcatgagaaaattttcatcgaaaatgcgcccgtgcgcaagatttttcacggtcgtccacacgatggacgcggcgaccgacgcgtaggaaagcgcatacagcacgtacagcgcgacggaatagcgttcgggaatgaaaaacgtcgccaacagaagcgccgccgaaaacgcgatacagaggatgtccgcccgataggtcttccagacgttcggttttgccgcacgcagcggctcttctatgactttcacctcttcgaaattcgacgccacccgtttgactttttccagcgtttcttcatcgtcgcattcgagcgacagccgctgtttcataaaatccacggaggcggagcgcacgccccgcacgcggcggatctcctcttccagttcgagcgcgcacgccgcgcagtccagtccggaaagttgtatgtgtttctgcataaaatactcctcgttcagcaagaaagatgctcgcggctcatttcaatgattttcgccacgtgttcgtccgcaagggaatataaaatattttttccgtcgcggcgggatttgatgatacggctgtcgcgcaatatccgcagttgatgcgataccgcgctctgctgcccctccaccgcctccgcgatgtgatacacgcacatttccccttccgccaaggcgagaaggatcttcatgcgcgaaggttcgcccaacgctttgaacgccgcgcacatcgtcgccacgtcctcctccgagggcatactgcaccgcaccttttgcacggacgcttcgtgttcgcagcggctcctttcgtcgtccgccatgctcttatcttgctcgatttcttttatttccataacgattttcctctcttatataaatttaacttcggtttacacatgaataactattcatataataatatattcataattatttgtcaagcgttccgaataaaaaatttattttttcataaaaaaaagcgttccgcaaaaacgaaacgcttatgatgcagtttattcagtcccaacgctccgattccacggcggcgcagagcagatgatacagaggcagatgcagttcctgcacgcggtaggtttccgcagcgggcacgtttaaaagcaggtcgcattcttctttgagcgcgccgccgctttgtcccgtcatcgcgacggtaaagacgccctttctttttgcgacgcgcacggcgcgcagaacgcccgccgaattgcccgaagtggaaagcccgatgagcacgtcgcccgcgcagcccagaccgtacacctgctgcgcgaagatccattcgccgccgatatcatttagaacggccgtcgcaagcggagaactttcccccaggcacagagcgggcacggcgccctccaattttccgtaaacggtttcatccccgtcggagagcgcaacggggcgttttttcaaaaacgatttcatcagttcgcccacgatatggccgctgtcggaaaaactgccgccgttgccgcaagtcatgatcttattcggcagatagacccccgccatcttttcgacggcaaggcacgcgcgatcgaaaagataggacatttcggggtgctctttgaaaaacgtttcgatgagacgatgcgtcgtttctttcatttaatcctcctgtccgtcggactcgccgaccagattcgccgaggcgagaatttccacgttcccgatcttcgacgtcacgattttgatttttttctttttgatggagccctcttccacgatcttttgcagccgcgcggcaaagatctcttcaaaccgatagacgatctcacccgcgaatacgaccgcgtccagcgcaaacgagttgaccgcgttgacgagcaggcggccgaggtacagcgtttcccgcccgacagcctccttgcagagcgcgtcgcctgcgaggtacccgtcggcgatcccctcccacgaacgatacgggcagccgaggctctgcgcatagcgcaggagcgctttcatcgaggcgtacaactccgcgcagccgaaattgccgcaactgcatttttcgccgtccgaacgaagggaggtgtggccgaattcgcagtcgaaccccacgacgcgcccgtcagcatagagcatgacgccgcttccgagccccgaatcgacgatcagttccataaaactgacgccgcgcacatcgggattgtagaaaggttccgcctgtgccgctgcgttggaattgttatcgagacataccggacaggaaaacgcgtcttcgaaatattttcggacggggaaatcattccacgcggagagattcgggactttcaaaagcgcgccgctctctctggaaagcggccccggcatggtgacgccgataccgaggaagacgccttccgccccctctttcatcgcccgtattatttcgcagatctctccgagcgcttccgtcggcgcaagatcggccgaaatttctttccgaaaggaacgtatgatcttgcccccgaaatcgaccaggcccagcgtgtacgcctcgcgcgagatattcagcccgatgcggtgcccgtagccgccgcgcgtacgcagccccacggatctgcgcccaaccgccgaaggatttttgtcgccctcttcgagcatgccgagacgcaggcactcgtccacgattagcgagaccgcggcgcgcgtgagccccgtccttttggcaagttccgcgcgggaacagcccgtctgccgtataagccgcaatatttccgcgcggttgcgctttttcatccgcgatgcgttcaacgtgttttccatttcctttattataccccgcgcggaaaaatttgtcaatcaaataaaattatttgttaattcgatttacaaatgaaaaaattagcgttatactatatttgtcaaatcatttaattatcgaggaaacaatgcagatatttcaaaaaggtttcaactattcgcaggacggtccgggcaatcggctggtgtatcatctgacgggctgcaatatgcgctgcccgtggtgttccaaccccgagtgcatggaaacgggcggcgaaaacttatcgcccgaagaaatttattcggaggcgctctcctgccgcgcgctgtttttcgacggcggcggcgtgacctttacgggcggggagccgactttgcagttcgaagaattgaaaacggcgctgattcttttaaaaaaagcggggatctccgccgccatcgagagcaacgcgacgcacccgcgccttgccgaactttttcccctgctcgacgctttgatcctcgatttcaagcactgggatgacggggcgcactttgcggcgaccggacagcataaccgcgcggtgaaagaaaatctttgcgccgcgttttccctgcacccgaatctgctcgtccgcacggtgctgatcaaaggtttcaacgacacgcaaaacgacgcggaggcgttcgccgcgttttatcggaaaaacggcggcgaacgggcgaaattcgagtttttgccctatcacgagtacggaaaggcaaagtggaaaaaatgcgggcgcgaatacgccgtgaccgacgcgttcgtgtccgaacagaccgtgcagacttacgccgaaatctatcggcaaaatcatttgaacgtcgtaaagacgtaaaggagtaagatatgcagaaggatagcgtttatacggacaaaatcctggacgaaaaggcgcgaaggctgttcgcgaacgagcgcaagatcaaaaggctggacggatggtttctgatccgcgagatcagcgaagaatacgaaagcgcgcacccttttatccccgcggcactgagaaaagcgcgcgcgcttttgcgggtatgcgaacgcattcccctctcgctcgacgaaaacgcggtgttcgcgggcacccagagggacgcgttcgccaagagttacgcgctcatcaatcccaacttcaaagtgagcactttcaacggctactgcgaccctgccgcggtatttcgcgacatcgagccgaacgaggaatttaccgaggagcgcatcgacaaggtacgccgcttatcagaacggagcgaatacgtccgacggctgaaaatagtgtacgaagaggcggaaaacgatacgcgcgaggcggcgtatttcgtcgaacaggtgacggggcatctcgtgcccgactttcgccccgccctgcggcgcggcacgcacgccctgcgcgaggaggcggaaaatgcggcaaacgagtgcgcggacgcggagaaaaagaccgtgttcgaggcgatggatatagcgctctcctgcgcggaagtacttgcaaagaggtacgcggaacttgccagacggctgcaaaaaaccgcggacggacagcgccgagaagaactcgccctcctcatacgcacgttggaaaaagtgcccgcgcgcggggcggagaatttatttgaggcgctgcaaagttttatcttattgtggcaggtcatgtgcatggagcaggcgcccaatccgttcgccttttccgtgggcaacgcggaccgcattttcgaacctttccgcgccattgaaaacacgccgcgcgaaacggcggcggggctgttcaaacatctgctcgtctttttcaacgtgggcgaccgaagttgggcgatctcgcagaatctgatcgtcggcggcaaaagcgccgacgggcgggatctgacgaatttaacctcttacgccctgctcgacgcttattacgaaatgaacctgccccagcccattctttccgtcaaagtgcacggcggcacgcccgacgaactgtatcgggaaatgggaaaattcttcttcacgcccggctgccttacaccgtccgtattcaacgacgattcgctctttcccgtcttaaaaagccgcggcgcggacgaagaagatctagaaaattacgcggtggcgggctgtcaggaaccgctgatttcgggaaaagacaacggaaacaccaccaacagttggctcaatctggcaaagatcctcgaactgacgctcacggacggcgtttcgctcatcagcggcgccgagatcggcgaaaaaagcggcaaaagcgcgaaagagatcctgcaaaacgtacgcgcgctgttttacgaaaacgtcgaaaagttcgtatcgcgcatggtgaaagccgcaaacggcgcgacggaggcggtcgccgccctgcccgtcccctttctctccgcctttctcggcggcatggaaagcggcgtcgacgcgcgcgacgtgcggcgtcagggcaccaaatacaacggcagcgggtgcctgatccacaggctcg

SEQ ID NO: 4234 - DNA, 19168 bp, Unknown
  16S sequences of unknown bacteria
gtgtaataaaaatatagagaaaggcgaaaacccgcataaataaagggttttcggaaaggtaaagataaaaatgaaattaggtatcgtgggtctcccaaacgtgggtaaaagtacgctgttcaatgcgattacgaaggccggtgcggaagcggcgaactatccgttctgcaccatcgagccgaacgtgggcgtggtgacggttccggataagagactgcaggtgctgcacgatatttataattcgaagaagaccatttacaccaccatcgaattctgcgacattgcaggcctggtgaaaggtgcgtccaaaggagaaggattgggaaacaagttcctgggtcatatccgggaggtttcggcaatcgtgcacgtggttcgctgctttgagaatgacaatatcgttcatgtgaacggtcatatcgatccgctggaggatatcgaaaccatcaatacggagctgatttttgcggacctggaggttctggagagagccatcgcccggacgcagaagaacatgaaggcggacaagaagctgggatccaagctggcgattctggagcgggccaaggaatggctggaaagcggaaagaatattcgtgccatggaaatggatgaagacgatcacgaggtgctggatgaaatcgatctgctgacctcgaaaccgatcatctacgtagccaacgtgtccgaggatgaagtggcagatacggacaatccgtatgtgaagcaggtttcggaactggcggcggcagaaggtgcacgctgcgtacagatttgtgcggaaattgaggctgaaatggcagagctggaggatgaggaacgggatgcgttcctggaggatcttggcatcgaagagtccggtctggacaagctgatcaaggcatcctactcgctgttggatctcatttcttacctgacggcaggcgaaccggaagttcgtgcgtggaccatcaagaggggcaccaaggcgccacaggcagccggaaagattcatacggatttcgagaagggctttattcgggcggaaaccatcacctacgaccagctggtggaatgcggcggcaatctgggaaaggccagagaaaagggcttgattcgctccgaaggaaaggattatgtggtacaggacggcgacgtcatccacttcctgtttaacgtgtaaacggacggcacacagaagattgctgaaaaatatttgcaaaactgcttgatttttgcaaaaggattggtataatgactgtagaggttatccttaataatctctttaatctctagtcccaataccctttttacgaaacagactgctcccctgcagtctgttttattttttgaaatttttgcgttccgtaatgtgaacttgaagtgaataataatttagcacaagttgataaaaaggaatgacagatatggtataatacaaggtaatttacgtatatagagaaaactgggaggtgaccggaaatgaacgatccaagggatatcaaactggcacagatgcttgtgaattattccgtccggattcagccgggagaaaaagtattaatcgattacaccggggaggagtgcgttcctctagtaaagagaattgtacgggaggtctatgctgcagagggagttccttttgtgaaatgcgatcatccgattgtcactcgtgaattcctgatgggatgcagtgaggagcaggtgaaaattcaggacgatgcggatttgtatctgatgaaacagatggatgcctatatcgggattcgggcggcggccaatgcggcggagttcagcgatgtgccggcggagaaataccacctgtatgaaaaatacacggcgccgagtctgaatgaacgggtggaccacacaaagtgggtgattctgagatacccgacaccggcgatggcgcagcgcatgaaccggagccaggaggcttttgaggaattctactacaacgtgtgcactctggattattccaaaatgaatcgcgccatggatgcgctgaagaagcggatggatgagacggattgtgtgagaatcgtggcaccgggaacggatgtgaccttctccgttaaaggtattccttcggtgaagtgtgccggggagtgcaatatcccggacggtgaggtgtataccgcaccggtaaaggattccatgaacggcgtgattacctacaatacgccgtcggaggaacagggattcacctttgaaaatatccgttttgagattagagatggcaagattgttcacgccacctgtaacgatgaggagcggatcaaccgaatcctagatacggatgcgggcgcacggtactttggagaatttgccatcggggtcaacccatacgtgttgcatcccatgaaggaaaccctgtttgacgaaaagatctgcggaagcatccacctgacgcccggaatgtgttacgaggatgcgcccaacggaaatgaatcggcggttcactgggatttggtgctgattcagcgagcggattacggcggcggtgagatctggttcgacggagagctgattcggaaggatggaatcttcctgccggaggacttacagtgcctgaatccggaaaatcttcaataactttaaaatacggaaggatggaaagaatacatgtggaatcgcgttgaagtgaaagcaaaaggaaaagccggattcaaaagaaattattggaactgcgtcgtggtatcgctgctttttacgctggtaagcggcggacttagcggcaacgaacagcgaattacccggcagattgaggagaattacatggacccggccacactcttgggattcatcaccacgccgaaggttatcggcggcgctgcggtgggactggctatcggtatcctggtgttcggcgcgttagaggtgggctgcagccggttcttcctgctcaatcagcttcagccggcatcggtttcggagatgggctacggctttagtcacaattacggaaacaatgtgggcaccattctgcttcggaatgtgttcgtgatacttggagtgattctctttatcattccgggcgtgattatgtcctatcagtaccgaatggttccgtatattctcagcgagaagccggagctgggaccgaaggaagcgttggattactccaagaaaatgatggagggccacaaactgaatgcgttcatctacgatttctcctttatcggctggattctgctgtcgatgtgcaccctgggcatcgtgggaattttctttgcgaacccgtacaagtatgcatcggatgcagagctgtacctggccatccgttccggcgaaatcaagacccgggacacttcggaggagccgaaagatgtccatgtgaatacgtttgaactgtagtaatcaatcaataatgtgtgcagataggtaaatgtgatgcgaacagagagaaatgaacaagagaatgtaaagaaggacgaaaaaaagaaccggcgaaaacagaagattgccggagtcattctggcagtcgttctggtaatcggcggctttgccgcataccgaatttcaatggtaaaagaatttccgaacaatgcgaaggtggacggggtatccgttggcggattgaccgttcgggaagcagaggagaaaatcaatcgggaagcaaatcaggttgaattaaaagaagatgatcgggatgcggtaaccgtaaaaactcaatttaagtacgaaatcaaggatacgctgaagaaccgtcaggcgctgtccgtggtggatccgagaaattatatgggcagcggtgcaaattataccgtgcccctgaaggtgatcggcggagagaaggaaacggcgaagcgaattcggaaggcgattccggatcacaagagaatcgtagaaacaaaggatgcctatatcgactacgagaccatgcggattgtacgggaagttcagggggatacgctggatgtggaaggcttgacgaaggatgtggcagagaatcgggaacagtcgccgaacgaaattgtttttacatttaaaagtaaagactacatcgcaacgccaaaggtgaaattcgacgatctccagaaagagctgaagtttgcgaaatactatctggccgatggattgactttgcgggcagattccggagatacggtgaaaataacaccgaaacagctgtcgaaggtgattctctacacggaggatggtccggaatacagtgaagaaggcgctcagaaggtggcaaaggaactggcgaagaattattcccaggacgtgtacacggtggagacggaagaagggacgaagagcctgatcaattacggaatcaagagcagcgtggatgagaagaaaacggcggaatcgattctgaaggctgcgaagtccaagaagaaaggaactttgtatctgaaagcgtccaatcaggatttaagtacccgggtggaggtgagcatctccggtcagaaggtgtattacgttcagaacggaaaggtgaagctgaagacgtcggtggtaacgggaggaccgaaccatgcgacccctcggggaattttccggctggcgtataaggagcgcaatgtaacgctgaagggatccaacggtgacggaacggattatgcgtctaaggtaagctactggatgccgttcaacggcggcatcggactgcacgatgcgccgtggcgaagcagcttcggcggcagcatttatcagagcggcggatctcatggctgtgtcaatatgcctccggcaaaggcaaagcagctgtttggatacatcgatgcgggaaccctggtatacgtgtatgactgataaaatccggtgacggtggtgacggaaaggagtgcggtatgaggtcggagtatcggcgcggaattctgaaattcggaattgcggcggccatgattgcggtggccatggtttgccgttatctgactaagacagaggatctcagcgatttggtgtggaatgtcctgtcgctgcttcgcacaggaatatacctttcgctaatctatatgtggatgctgtccattcgatttcggattcgtcagagccaggtccgaaactatctgatgatgaccggattcctgcttctgttctggtttggattgcggacctgcaagtacaattacgtgcacagcatgaacggcagctgcatctgctggtacgggttctatatcccgatggtactcattccttagatggcggttttcgttgcctgttgtctgggcaaaagggaggattatcggattccgtggggatatcgccttctgtacattccttccgccatcgcaattgctgtggttttgaccaattcctttcatcaaaaagtgtttttctttcctccgggagcggaaaatccgttagcggattacacctatggaccggcgtactactgcgtcatcggttggattctggcggaagtgacactgttttttgcaattttatttctaaggagacacagaagtaagctgagatggcgaaacagtattgtattcctgccgattttggtgatgattggatattccatcctctatattcggaaggcgcgcttcatctattggtttgcgggggatatgacggccgcattgacggtaatgatactggcgacttgggagctctgcattgcgctctccattatcccgtccaacagcaaccacgccatgctgttccgatattccacggtgggagccaagattacggattcgcagctgaatatcatctacaggtccgaaggggctcgtgtgttcaacaaaaaaacgctgttgcaggcactgattcgtcccattaactttgataaatttcgtttggcgggaacggaaattcgaggcggatacgtattctggaatgagaatatttcggatgttcggaaaacgatacaggaactgcagagcattcgggagcagttgcgggagaagaaccggctgttgcaaagcgaggtgaaactgcaggaagaaaaagcgcgaattaacgaacagattcgtttgtacgattccattcggagtgaaatccacccaaagctcagtcagttggagactctgctggaacagatggatgtggattccattgaggggtggatgcaaatctgtgtgctgggaacctatattaaacggaggagcaatctaattcttctgggagaggaatcgggtcaaattccggtacgagagctggaactgtccctgcaggaatccatggagaatttgaaattatgccgggttccggggaatatgatttgccaaggtgccggatatatcgataaagaaaatgcggtgcggttatacgatgcggcggaatggctgttggaacaagtttggaagaccattcgggcgtttatcattaccgtggcaattcaagataacaccgggtatgtggcgttcaacatagacggaacgccggacgtgctgggagatgcgaaaactgtttttatggaagaatttggtttgccttgcgatatccagattcaggagcgggatattcggattcgagtggaagtgggaacaggaggaacggaacaatgagtggtttcggggacttcggcacgattgttcagtcggtggatttgattttcatgttcctaaactggacgacgagccttttcgtcgtaatcggcgcattgatggtgcggggaaaacggatgctgcgggatttgctgattgcactgctgctcttcgccgtggattcctggtttctgctgctgtttaccggagacgtggacgtggattttcccatggcgtgggtactgatgccgattgtgctggtggtttttatgagcatgaaaatcgatctctacaccgcccaatcgaggaatcaggaaatcagccggttctccattcaggagagtaccaataaattcccaatcggcttgtgcttcagccgactggatggccatccctatttggtgaatgcccggatggatgagctgagttatcggattgccgatcaaccggtgaagaatgccaacgaattctttgctcaggtgcaggcgggaaaccgggagggtatttgccgaacggagagagacggaattcccttgctgcgattcccggatggccgcacctggagctttcaaaaggaactgttgaagaccgatggggaagagattctgcaaattgttgcaatcgataccacggaactggagctgctgctggagaagcggaggaatgagaaccggaaattagaggaaatcaatcaccgacttcaggaatacggaacgtcggtggaatctctggcgacggcgaaggaatggctggatacgaagatgcggattcatgacacaatcgggcagaatctgatggcaactaagtacttgttctacgataaaggggatgaggcccggcgcgaagcgattcgcgagaattggaagaggacggtgagaatgctgcagcacgacgaggatgtggtggaaccggatgacgggatgaagtacttcctggatgcggcccgaaaagtaggcgttgcggttcatctggatgggtcgataccgaaaacaccgtcggttcgggaattgattgccgccagcggaattcaaatgctgaccaatgcggtgcgccatgcggatgcccgggaactgtgggtgattgtcgaagatgaacccatgaattaccgaatgctcttctacaacgaggtgaaggaggaagcgaaagtcggttccggcaacgttgtcgagggcggcggcctttcggggcttcgaaagaaggtggaggaactgggcggaataatgtcggttacttccggagaatacttccaagttgaaattattatgccaaaaggaggtcgcgactatgtataatgtaatgattgtagaagacgatccgatggcgaggcgccttctggaaattatggtaacttccgatgagtcctatcatttggcggtatcggtggaaagcgcttctgttgcggaagtctattgcatgacggaagccatcgatttgattctgatggatgtgtgcaccgccctccatgccagcggactggatgcagccattaagattaagaagctgtttccgcagattcggattattatcatcaccagccttccggaatgcagtttcatagagcgagctcgagagggcggagtggacagcttctggtacaaagatccttatgaaaataaactgcgggatattatgaatcggactatgatgggagaatccatttacccggatcaaagtcctacttccaatatggggctagctactagctcggagtttacagaaagagaattggatgtacttcgggaactgatcagcggagatacggatgagatgattgcagagcggttgaacctgtcggtacataccataaaaaaacacgtaaaaagcatgtttcagaagacgggctgtaccacccgaactcagcttgcggtgatggcgctggagagcgggattgtggttcgcggaatttagacagaaaacgtcataaacattaattataagaataataaaaggcgagtacctcagctctttaaagctggaagcactcgcttttctcgtttcttgttatgaaattatttttcatcttcctgcaagagggattcttcgaatcgatgatccgattcctgttcctccaacacccggtggtattcttcaaaaattgcgtcgcaaattttttcgcgggtctttgcagtgagggggtgagcgatatcgcggaaatcgccatttcctaaccgcttattgggcatggcgataaattcgccattgcttccgttgatgatcttgatgtcatgaacgacgaattcgttgtcaatcgtaatggaaactacggccttcatcttctcatcatcggtaatctttcgtatgcgtacgtctgtaatcttcatcaatagccttcctaatatggattgttcctgcatgttttccaacaatattatataacgatagaacaaaaaaatcaatggaattctaatcagagtgttatatttctcagtttatttttttaaaaggggttttaaaatgacaattgaaaaaatgaccggattaagaggagccatattcttgtattacggtgaaaaatactctataataattctgtatgattcatcaggaggtgtgttgattggagagcatttcaaattacaaaagaatacattgtctcggaatcggcggaatcggactttctgcggttgccgagattctacagaataacggacatatcgtgtccggaacggatttaaatgaaaccgacgtgacccgacatttggagagcgtgggcattcgcgtggtgtatgagcatcgtgccgacaatgtggacggtgtggatgccgtcgtatattccgcagcggtttcggcggagaaaccggaaatggttcgcgcgaaagaacggggcattccgtgtttcagccgtgcagaggttctgggaatgattatggagcattacaagaacagcgtggcgatttgcggaacccacggaaagaccacggtaacatccatgacttccctgattctgcggaacgcgaagtacaagccgacgattctggttggcggaaatctggatgagattaacggaaacgtggaaatcggggagaacgagtactttgtcacagaggcctgtgaatacatggacagcttcctgcatctgcgtcctcgtatcggggtgctgctgaacatcgattccgatcatctggattatttcaagaacatcaataatatcaagaagtccttccgtcagttcgtggagcagattccgaaggacggcgtggtaattgcctttgacggaaacccatttgttcgtgacgtgcttcagggcatggaaaaccgaatcacctacggatatacggaaagcagtgattactgcgcggtgaacattcagttcgatgataacggattcccggaatacgacctgcactataagggcgagatgctgtgccacgtgcatctcagcgtgccgggcgaacacaacgtgctgaactccatggccgcttttgcgacggcacattaccttggcgtggatacggaggtcattacggacaccctgctttcctatcgaggaacgcatcgtcgttttgattttaccggctatactgaaatcggtgcaaaaataatcgatgattatgctcaccacccgacggaaatcaaggcgacactgagtgcggcaaagaacattcgccacaacgatttgtggtgcatcttccagcctcacacgtataccagaacaaaagcattgttcgatgatttcgtggattccttcggaatggtggatcatctgattattacggatatctacgctgcgagggagaaggatgtctacaacgtatcttctcagaagttggaggaggccatgcaggagaaacatccggataaggatattcgatacatgggcgattttgaaagcattgcagaatatgttggtaaaaaagccggaaaagatgatatcattattacgatgggtgccggtgatgtctacaagattggaaagatgctgcgcaccgatgagagcaaaggagaatagatgaattttgaagagtatcgttcccgggaaagcgagcgaattcaggcgaaccggaaacgtatggaagaagacggagtcatttttcaagatatttacaacgcgtatatcgacgactctgtggtaattgaagaaggagcttttatcgcctgtaatgttaccctgaagggaaataccgtaatccatcgggaggcgtttatcggacagtcctcttacctggaaaatgcggagatcggtgccggaacgaaggttcagacctcatacattctggacagtaaggtgggagagaacaccacggtgggaccttttgcctatattcgtccgggaagcgtaatcggcaatgaatgtaaggtgggtgacttcgtggaagtgaagaattccactttcggcgacggaagcaaatcctctcatttaacctatatcggtgatgcggatgtcggaaagaatgtaaatctgggctgcggcgtggtattcgtgaactacgacggcgcgaagaaatatcgctctacggtgggagatgacagctttatcggctgcaattcgaacctggttgcaccggtaaacgtgggcgacggtgtctatgtggcagcggcaaccaccataacggaagacgttccttccgatgcgctttgcattggacgcgttcgtgcggagaataaagaaggctgggtatccaagagaaagattctcaagaaggaccagtaggacaatcgttacttaattttttatttctaatatatgcttagggggtatatacacatggaaacaaaggctttttccaacatgaaacttttcgcatgcaactcgcatccggagttggcaaaggaaattgcagatctgatgggcgtagaactgggaaaggcaaccgttagcaagttcagcgacggtgagatttctgtcagcatctgggagtccgttcgtgacaaggatgtattcatcattcagtccaccggaaatccggtaaacgacaatctgatggaactcctgatcatggtggatgccatgaagagagcgtctgcaggcagcatcaatgcggtaattccgtattacggttatgctcgtcaggacagaaaagcaaaggccagagatccgattacggcaaagctggtggcagacctgctggtagcagccggtgtggaccgggtaatcaccatggatcttcacgcaaaccagattcagggatatttcgacattccggtagaccatatgatcggactgccgactctgacggaatacttcattaagaaagagatggaagacgttgttatcgtatctccggaccacggaagcgtaccgagagcaagaaacatggcagagcgcatgaactgcccgattgcaatcgtggacaagagaagaccggagccgaacaagagcgaaatcatgaacatcatcggagatatcaagggtaagaactgtatcattctcgatgatatgatcgataccgcaggaaccatcaccaatgcggcaaatgccatcaaggacatgggggcaaaagaagtatacgcatgtgctacccacggcgtactgtccggtccggctatcgagagattggaaaaaagtgcgattaaggaactggtaattctgaacacattgccgattccggaagagaagaaaattgacaagatgaccattctctccgctgcaccgattttcgctgaaacgatttccagagtatatacgcacggttctgtcagtgcaatgtttaactaatccatgtatatcattgcagggctaggcaatccgggctcaaagtatgagaacacaagacacaatatggggttcaaggccatcgatgccatggcatcggaattcggaatcgatgtgaatcgggccaaattcaagggcttaatcggagagggtcgcatcggaagcgaaaaggtaattttactgaagcctcagacctatatgaacctcagcgggcagtcggttcgggagattatgaatttctataaaatcccggaagagaatttaatcgtaatttacgatgatttcgatctgcccatcggatcaatccgtgttcgaaaaagcggcggtcccggaacacataatggaatgaagtccgtggttcaggaactgggatctcggaaattcccccgggttcgggtgggaatcggcagcagtgacggttccaccatccaatttgtcataggaaaagtggggaaagatgaacagcaaattctgaacgaagcggcagaggcagcagcatctgcggcagcggatattattcgcattggaattgaaaatgcgatgaacatccataatacaagaaagagcgaaaaaaaggatgatcattaactttacaggggtaagcggcagtcgtgtcgcttacctcgcttccaaagaaataaagaattacaactcaacattaatcgtggtatcttccggccttgttgcggacaggctcagggaagatatttctttttttgtacccgatatttcggttcaggcgcttccggaaaaagaagattttcattttctctacgaagcccgagataaggacgaattggtgcggcgaatccgcggcatggagtcattggcgggaacttcccacgatgtggttatcgtgccgatttccgccttgcttccgccggtggatgaaaaagcgcattttctgaagtatcggcgaatgatccggctgggggatgaggtggatccggatgagctgaagaactttctggttcaagccggatacgagtacaacagcgttacctccgcacccggagaattcagcggacgaggcgatatcattgatgtatattctccttccatggagaacccggtgcgaatcgaattcttcgatacggaaatcgactccctgcgaactttcgatcccgtttcccagcggtccgtagagtccatttcgcaattccaaatcgtcccggcggtggaattcatgccggaaccggaagcggtggagaaagccttagagcggattgaaaaagagtaccggaaacgaatcgacgagctgaaggagcagcgggaaaaagaaaatctgaaagacggccgaatcgaacggtatgaggaggagttgggccgcatccgggagatgttccggaaccgcaccaacctgccgattttttcggaatacatttcctattttgatgtgccggaaacccggatgtggaactatatggacaacggtttggtactggtgtacgacccggcccgaatcggagaggccatcccggaatatcaggacaaggattccttccttcggatgtaccgggagtgtaagaatattcggattaccactccttttccggagcgtatcgagggcgtggaccggctggatgaaattcaaaatattgaaagccgtccggtggcaccctttaacggacagctgcagatgctggcctcctctgtcaaggggtatctgaagaaggggtatgaagtgcacctggtgtcctccacggaagaacggggagctcggctgcgggaatacctggacgaagggggtgttcacggaaatcttttatacgataccggaaacctgagcgccggactaattctggaggaagaacgattatgctatatttcggaaaatgatatttttccgggacagaagaaagctcttcgccgaaagaaaaagaaatctccgtccatcgatttctcggatcttcagaagggcgattacgtggtacacgaggttcacggaatcggtcgattcgaaggaatcaagacgctggagacggacggagaagcgaaggattatctgaaaattcattatgccggatcggatgtgctgtacattccgacggagcagctggatatcattcagcggtatatcggaaatgaaggaaatgcaccgcgcctgtcgaagctttccggcggagagtggcgacgtacccgggatcgggttcgaaaatccgtcatggaaatcgcggaggatctggtgaaactctatgcggagcgggaagcggccggcggatatgccttttccaaagacacggtgtggcagcgggaattcgaggatgattttccgtacacggaaacggaagatcagctgcaggccattgctgaaatcaaggaagatatggagaaaccgctgccgatggaccgcctgctttgcggtgatgtgggatacggaaagacggaagtggcggctcgggcaattttcaagtgcatttccgaaggccgtcaggcggttctgctggcacccaccactttgttggcggatcagcattaccataccctaaaggcgcgttttgagaaattcccttttgaaattgaaatgctctcccgtttccgaacggatgcggaacagacgaagattatcgaaaagctgaaaaaaggaaccttggatctggtcatcggaacccaccgagtgctgtccgatgatgtgaagtacaaggatttgggattgctggtcatcgatgaagagcagcgcttcggcgtgaagcacaaggaaaaaatcaagatgctgcggaagaacatcgatgtactgaccctgtcggccacgccgattccgcggacactgaacatgtccttaaccggaattaagaatatcagcaccatcgaggaaccgccgcaggatcgtcttccggtgcagacttacgtgacgccggaagatgaaaccctgattcaggaagtcatcgaacgggaactgaatcgaaacggtcaggtgttcgtcatctacaatcggattaaaggcattcgaaaagtggcggagaccattcaggaattggtgcctcaggcacaggtcggcgtcggtcacggacggttggatgagcgaagcctggagaacgtgatggtggatttcgtggagcatcgtacggatgtgctggtatccaccacgattatcgaaacgggaatcgacattccaaatgccaacaccatcatcatcctggatgcggaccgaatgggtctgtctcagctgtatcagctccgaggccgcgtaggccgatccgataccctggcgtacgcatatctgacctataagccggagaaggtccttacggaaattgcccggaaacggttggcggccattcgggaattcacggaattcggtgcgggcttcaagttggccatgcgggatctggaacttcgcggtgccggaaacgtgctgggagaagcgcagcacggccacattgaaggcatcggatacgagctgtactgcaaggaaatcgagcgggcggtcagccgcttgaaaggagaggatgtgaccgaaagccgttcggagagcaccttggagttcaacgtaccggcacggattccgaagcagtatatcggggacgaaaccctcaagcttcaggcgtacaaaaagattgcccagattgagacggaagaagatgcggatgatgtaatggaagagatgatggatcggtatggagatatgccggaggtcatggtgaatctgattcggattgcggaaatccgaagtgcatcggaacgcctgggtattgaaatcctgaaacagctgggaaatcgggtgcagattacgttctacgaaacgaaccgcatgacggcctacgggcttgttatggccactcaggcgctggggaaaaaactgacgattcagagcggaaaaataccgtcgctgagcctgttcgtgggtacaaacgacgtgttaaagcaggtgttaacgcttcttcgaattctgcagaaaagagaaccggaagagcaaaaggaggaactcagatgatttttgaaaaaattggattaatcgattcgtcatttcagtatcagtcggatatgaccgttgtaaccaaaggcgaccggattgtctatatcggttccgaaaaaccttcggaggaaatcacccgtgaaggcggcccggtctatgacggaacgggaaaagtacttttaccgggattctacaacgcccacggccattcccccatgtgtttgatgcggggttatggagagaaccttccgctggatgagtggctgaacaaccggattttcccttttgaggcgaagttgtaccgcaagggcgtgtattggagcaccctcctgaccatggcagaatccatccgttacggcatcgtttccacctcggatatgtacatgttctgcgatgatatgattcgcagcatttcggaaagcggaatgaagagcaacatctgccattccgtaacgaatttcaccggagcggcgccggaagagaatccttccttcaagaacatgaaggatttgattctcatgtacgacgggtttgaaggtggccggattcacaccgatgcctgcctccatgcggaatacacgaacgatgaggggaccgttcgggcggtggcggatgttgcccgggagttcggcgttccgattcaggtacacgtgtcggaaacggagaaagagacgcgggaatgcatggagcgccacggcggacgcaccccggtaaaatacctgtcggacatgggattcttcgattctccggtgacggcggcccattgcgtgtggctgaacgacgaggatcggcagattctggcagaaggaaaagccacggttgcggtgaatgccaccagcaatctgaaactgggcagcggaatttgcgacacgccaaaactcctgaaggcgggggtgtcgcttgctctcggtaccgacagcgttgccagcaacaacaatctggacttcttcgaagagatgaagctcttcgcccttctggaaaaaataaaaggcggcgcggataccatcgtccggccggaagatgtgctgtatgcggccaccagagccggcgccctgtctcagggtcgggaggattgcggcctgattcaggaaggattcaaggcagacctgattgtggtggatgcggatgtgccgaatatgcagccggtgcacagcatgctgaacaaccttgtgtactccgcatccggcaaagatgtgcggctcaccatggtggatggaaaggtgttgtatcaggatggagaatataccaccatcgacttggaaaaggtgatggcggaaaccgataacgctcgggaaaagatactggacagcctgaatcggtagactgagccaaacgaatctttttttaccgggaaaagaataggagaaaaaatgcgactggataaatttttgaagatttctagaattataaaaagaagaacggtagcgaaggaagcctgcgagcagggccgcgttcaggtgaacggaaaagtggccaagccgggggtggaagtgaaggtgaacgaccttatcacggtaacctttggaaccagcgaattgacggtacaggtcaaaaaactaaccgagtcctgcaagaaacaggactcggaagggatgtacgaaataatcagctaaatgccctttaagctgccggtcggtaaattcgccgggttgctttgctcagcacgagaatcagtgcggtgtcgattggcacgcaaaggagctctttgacgaatctggccggcagcattgccatgtagcctttgcccaggataatggtgagccagaaggtattcaccagaagattgatgcccaataccactgcgatgacggctgcaagacttgttcccactgtcaccttgcgtttgtgcaggaagaggccgtagatgatgcctgtgaggcaggcggaaaccgtgaagcccgggaagtaggcgccggttggaaaaatgaggcttcccagaacgtcggccagcgcgtaggcgccgccgccccaaattggaccgtagtacattgcgacgactaccatcggcagaaagccgaaactgattcgaagcatcggcgtgctgatgcccacgaagcgggtcaagatgacttccagcgcaatgagaatggcggtaataacgagcttttcagtgtttgttctttttctttccattaaaaaatctccttaagattataataaaagaagtaacgtaaactgctggtattataatcaggagattctatatttcctctataatatttgcagtagtggatgcaatatcaaaccgcaacatgtcgttttcggtcacagacaacatcccattctgtgaaacttaacgcttgatatttactctaccgtcctcgaatataccacaaaaggtacaatagaacaaccgcaaaattgcattttcgaaaatctcgatttttctcgattttttagggatatgattttatcttctttcgtattagaatgaaaatacttcatgaagcaggaaaaaagagtgtagagtgatgatattccaggggggagaaatatggaaaaagacggtaatggaagcaaggacgtaatcccgattataacgaaagagcgatactgcaagataaaggtggatgaaattgaattcatcgaacagattgagagcatgctccatatcatgactattgagcatcaggagtacatcttccggggaaaaatagaggacattgtgccgattatttccgggaaaagcttctatcgggtgatgaagaagctggtggtgaactttgataatgtacagaacatgggtaaaagcactatgaatttcgtctccggcattacgtacggaatcggacggaacatttttctgaaggctcggcgggcatataaaaactacctgtacgggtatccgccgtttctgggaagggaagaacgtcacgggagcaatgtagcggaaacctttgaatatcaaggcggagaggaggatatggaggaggaataaaataaaattaaaaaagtgcttgctttttggttgcagcagcagtataataaaaaaactctcaggaaaaatattcatgagagaagcgctgaaaggctgaaacaaaactttttaaaaaaaagttttaaaaagcgcttgacaaagccttgaaagtgcgatatactaaataagctgtttcacttgagacagcaagaaccttgaaaacttcatagtgcagaaccggtcaaagacggaac

SEQ ID NO: 4235 - DNA, 3625 bp, Unknown
  16S sequences of unknown bacteria
agagtcaaaatctttgattttgccactcgagcttacacagcgtgctgattttgccactcgagcttatacagcggagtctcgtttgaagcgtgtcaaaaattcatttttgacacgccagcagcagctccagggcggcgtggcacgtcgcctgccggatggccgcccggtcccccgccagatgcagctcctgcacccggcagccccgcggtcctgcgcaggcgatatagaccaggccgacgggcttgcccgtctcatcgctgttcggcccggcgatgcccgtcgtgctcagggcgtagtccgccgccagccgctgccgggccccctgcgccatctgctccgccaccggcgcgctgacagcccccagcgtatccagatcctcctgcgagacccccaaggcccccgccttgacggcgttgcaatagctgatgacaccgccccggtagacggcagagctgccgctgacactggtgatcctctcccccagcatcccgccagtcagggactccgccgtcgccagcgtcgcccccgccgcggccagggccgccacggcctgccgcgccagcgcctcaaccatggtagcgcaccttgaccagctccgtattggccagcgcccgttcgatgagcgccgggcggtcgagcttggcctcggccttctccacctgcgcccgggtcggcttcgtccgcggatgccgcggggtgaagacggtgcagcagtcctcatacggcaagatcgacgtctccagcgtcccgatgcgccgggcgatggtgacaatttcctccttgtccatcccgatgagcgggcagaacaccggcagatcgacgaccgccgacgtcacccccatggcctccatggtctgggacgccacctgccccaagttctcccctgtcaccaggcactggcagccgtgatcccgcccgatgcgctcggcgatctccatcataaaccgccgcatgatcagggtaaagtactcctccgggcagttgtcccggatggcctcctgaatttccgtaaagccgacgatgttaaccgtcatccgcccgcagtagcgggtcatgagccgggccaggtccagcaccttctgcttggccagctcactggtatagggataggagaagaaatggacgcactccagctccaccccccgcttggcaatcatataccccgccaccggcgagtcaatccccccggagagcaggaccatcgcccggccgccgacgcccgtcggcaagccgcccgctcccggctccgccgggccgtggacatacgcggcatgatcccgcacctcgacattgacggtgtaccccggatgatgcacatcgacccgcacgtcggggtatgcctcctgcagccgcccgccgatctcctgggagatctggatggacgtcatcgggaaccgcttgtccgaccgcttcgactcgaccttaaagctgctggccgccgccagatcgtcgccgagatacgtcacgacagcgtcaaagatcgcatccagcgtcttctcgcacgggcggcagcggcacaggctgatgacgccgaagatcgcgtggcacgcctcccaggccccctccatatcgcactcgtcattctccggctccacatagacggtggactggagaatgtttaccttaaattccccaaagggccgcatccgtcttgcgacgttcgtcttgagcttattttcaaactggcggcgatttgcccccttgaggatgatctcccccagcttcaataagaatatttcattcatggccttgtgttcctcttttccaaattattgcttgcccagctggtacgaccggtactggatggcctcggcgatatgcttcgggccgatctccgcgctgccgtccaggtccgcgatggtccgggcgacctttaggatgcggtcatagctgcgggctgtcagggccaggcggtcaaacgccgtcttcaaaagcttggcgccctcatcccccagggcgcagtaccggcgcagctgccccggctgcattcttgcattgcaggcaacgccgctgccctccagccgcgcctgctgcacggcccgggccgccatgacccgctttttgatctccgccgagctctccgccggggccatctggcgcagctccgcaaaatccagtgccgggacgctgacgatcatgtcgattcggtcaagcatcggcccggagatttttcccatataggcatcgacggcctgctggctgcaatggcagcgcccgctggggtcgccgtaccagccgcagcggcaggggttcatagcgcacaccagcatgatatcgctggggtacgtcaccgatccgctggcccgggagatcgtcactgccccgtcctccaggggctggcgcatcgcctccatcgtgtccttcttaaattccggcagctcatccaggaatagaacgcccttgttggcaagggaaatctcccccggccggggcgtgctcccgccgccggtcagcccggcgatggagatcgtatgatgcgggctccggaagggccggacagtcaccagcggcgaatcccggtcaagcagccccataatggagtggatctgcgtgacctccagcgcctcctgccgcgtcatatccggcaggatcgacggcagccgcttcgagagcatactcttgcccgagcccggcggcccgatgagcagaatattatgcccgcctgccgccgcgacctccagcgcccgcttggcctggacctgacccttgacatcccggtagtccagcgcggccgccggcggcgccgccggttcccaccggggctggggtgcgatgggcgcctcccccgtcagatgcgccgccagctgggggacggacgtcaccgggatgacccgcacctccgggcagagcgtcgcctccggggcattcgccgccgggacatacagcgtctcaaacccggcctgggccgcagccaccgccatggagagaacgccgttcacgctccgcagcttcccctgcagactcagctcccccaaaaaggcgcttttcttatccggcgccgggataagctccgtcgccgccaggatgccgacgaggattggcagatcgtagatcgtgccggattttttcgtgtccgccggggccagattcagcgtaatgcggctgacgggaaagcggaacccgctgtttttgaccgccgcccgcacccgctcccgggcctccttgaccgccgcatccggcaggccgacgacgtcaaaccccggcagtccgcttgaaatatggcactccaccgtcaccggaaacccgctgatcccgtgcagccccagactgttgacctccgctatcatgccgcttctccccttccgcgccgcgcattttgcgccaaccgcttgtttttgggtatttttctatagtataccatatcccccacccaaaacacaagtcaaaccctaccgcacgcctcacggccccaaaaatacgccccggaccgcattcacgcaaaaaaagcctcgcagagtttgcgccgtgcacggcgcaaataaagtctaaatcattttctccggcggcgtgtacgtcggggaaaatacttctcgccctgcaagttgggtgagactccaattgtgcaagctctgcgcagcacaattggtcaagtcgaacccatgcagcgctgtggaatttctgcgct

SEQ ID NO: 4236 - DNA, 15738 bp, Unknown
  16S sequences of unknown bacteria
gccggatctgcaggtgcttgcggagcaggtgccgtcggttccgaaccgggtgctcattctggtcattgcctgcggcgtcggaatgtttcttgtggcggcggtgctgcgtatgctgtttggtattccgctttcgaaaatgctggttgtgtgttatctggcagtgtttgcggtggcctgcttcgtgccaaaggattttctggcggtggcatttgatgcgggcggtgtgacgaccggaccgatgacggttccgtttatcatggcgttcggtatcggtatctcggccacacgaagcgataagcatgcagcagatgacagctttggtctgatcgcactgtgctcgatcggtccgattctttctgtgctcatactcggactgctctatgcgccggagggagtatatgaggcagagccgattgtggcatctgtggattctgtggagctgtggcggacatttctgcatgcgtttccggactatatgcgggagattgcggtagcgatgtttccgatcgttctgttttttggcatgtttcagatcatttcactgaagatgaaccgaaacagcctggtaagaatttttattggtctgatctacacctacatcggacttgtcctgttccttaccggagtaaatgtcggctttatgccggtcggaacagagcttggacggacgttggcttctttgccgtaccgctggtgtattgtaccaatcggtatggtgatcggctattttatcgttatggcagagccggcagtgcatgtcctgacccatcaggtcgaggagatgacatcgggtgcgattccggcaaaggcaatgagcataagcctttccgccggtgtggcgatctcacttgggctggcgatggtgcgtgttctcaccgggcactcgattctgtggttcctcgtgccgggttatgcagcggcgatcgcgatgtcctttttcgtgccgaaaatgttcacggcgatcgcatttgactccggtggtgtggcatccgggccgatgacggcgaccttcctgcttccgtttgcgatcggagcatgtcaggcagtcggcggcgatatcgtgcgggatgcatttgggatcgttgcgatggttgcgatgacgccactgattacgatacaggtgctgggactcctttatcgctttggcggtcagaaaacggcgccgacgcagatgacatgggatatccgcggagattatgagatcattgagctctgatctgcaggcaggttgattttgaagggatgagtggaagaggtagtttgtaaaataagtggcaggaagggaagtgcttatgggacgtttatcactgcttatgacggtggtcagtcggaaccttggcgaaaagtatctgaaattttatctggagcagcaggtcgatgtgcagctggtcacactcggacgtgggactgcaaacgatgcaatgctcgactattttgggctggagagccatgagaaggcggtgttgttttccgtcgttgacgatcagaaatgggaggagctaagtgtcggactgcaccggagcatgcgcattgatgtaccgggaacaggagtcgcatttctgatcccgcttgcgagcatcggcggaagaggcatatttacatatctgacccgtacgctggagaccgggatgccggagacggggaatacaccggcaaatgagaagactgacagaaaacgcttccgtgaaaaacggaggacaggaaaaagggaagcagatgaagcagctgccggacaaaacgggcagtatggagcagcagaagggagtgagacgatgccggaatccgcatatgaaatgattattgcagtcgcaaaccagggctatatcgagccgattatggaggctgcccgcagcgccggtgcaggcggtggtaccgtcattcacgcaaaaggcaccggaatggaaggaatggggaaatttttcggtgtgtcgcttgcagcggaaaaagaaatgatcttcattgtgacagaacgcggacagaagcaggctattatgcgtgcaatcatggaaaaagcagggatggagtcgaaggcacggacatttttattttccgtaccggtcgacgaagtagcagggctggatacgtcatccagataaagttttaacgtgagagcgtaaaaaagaattgccaaatggttttcactagtgtataatacgttcgaatgtgtgatactaatttacatttttaatctttagcaagggggctaaaatcatgtcttacacagaagagatctacaaccgcgttgtagcacagaacccgggagagccggagtttcatcaggcagtaaaggaagtactggattcgctgaagcttgtcatcgatgcaaacgaggagaaatatcgtgcagtcagcctgctcgagcgtctcgttgagccggagcgtattatttccttcaaggttccgtgggtagatgataatggtaaggttcaggtaaataaaggctaccgtgtacagttcaacagcgcaatcggaccgtacaagggaggtttgagattccatccgtcagttaatcagggcattctgaagtttcttggctttgagcagactttcaaaaactctctgaccggactgccgatcggcggcggcaagggcggttccaactttgatccgaagggtaaatcagaccgtgaggtaatggcattttgtcagagctttatgacagagctttccaagtatatcggcgctgaccaggatgtaccggcaggtgatatcggagtaggcggaagagagatcggctacctgtatggacagtataagagagtgaccggactgtatgagggcgtgctcaccggtaagggacttacctggggcggatctcttgttcgtacacaggcgaccggttatggccttatttatattctggatgcaatgctcaaggatcacagcatggagctggcaggaaagaccgttgttgtatccggttccggaaacgttgcgatttatgcagttgagaaggcacagcagctcggcgcaaaggttgtagcaatgagcgattccaatggatacatttatgatgcagagggtatccggctcgatgtcgtaaaggagatcaaggaagtacgccgcggcagaatcaaagagtatgctgcagctgttccgggatctgtatataccgagggcaagggtatctggagtgtgaagtgcgacatcgctcttccgtgcgctacccagaatgaactgaatctggatgatgcgaagaccttaaaggcaaacggctgtgcagtcatcgcagagggcgcaaatatgccgacgacccgtgaggcaacggatttcatccttgacagcgatatgctcttcctgccgggcaaggcatctaacgcaggcggcgtaggtacgtccgcactggagatgtgccagaacagcatgcgtatgagctggaccttcgaggaagtggacgagaagctgaagcatatgatgaacgacatctatgcaaagatttctgacgctgcaaagcgttacggcgtagagggcaactacgtaacaggcgcgaatatcgcaggctttgagaaggttgcggatgctatgatcgcacaggggactgctctgtaagtaaaataatcggacttttacgtgtgaatttttgaagccggggtgacatggtctgccaccctggcttcggtgtgttataaggataccggtagctgcctgtgactggcggcctgagtggaaagagagaggaaaatgggggaacggagcaaatggcgcgtgggatttcttttatgtgcgatgcttttgctgcttggcgttgtgccggtgcaggcggccgcaaagaagaatcttgcgaaagcaaacattaagctgggaacgaccagctatacttataatggaaaaaaacggacaccaaaggtgacggtaaaatatggaaaaaagactttaaaaaagaaccgtgattatacagtgagctaccgtaataatcagtataccggaaaagcgacggtgcagattaaagggaaaggcagttatcagggcacaagaaaactgagctttacgattcgggccgggaaaatgatcactgtgaagctgaacagctgcggcggggaggcgctgcagtcattggaacggccacatggtggaacgtatggtgctttgccggaaccggtgaaggaggggtattcttttcagggctggtatacggcaaaaagcggcggaaagcaggtcaattccggcacaagggtcattggaaagaagaaccgtactctttatgcacactggttgaagggcagcaacacggaaattgtatggaaggcattgcgcagggcaggctattcggagcaggcgacggctggcatcatcggaaacctgatgtttgagtccggaggctatccggatgatattaaaacaaatgcgattgagtataaaagcggcgagggcatcgggatggtacagtggtcgtacgtgcgcaaaacgcgtttccggcagtatctcagatcgcatggtgagagctggccgagccacaatatcagtctgcagatttcttatatgctctatgagctggagcacggagaatgggcgtggatcggaatcagccagaaatatggtgcgaagtacgatgtgaccttgcaggaatttaaacaatgcagggacgtcgcatttgccacgcgcgcgttttgtgcaaaatttgagcgatgccattataaggatgcgcatttaaaggagcgcacagccggagcaaaatgggcatatcagaagtatcatagtcagtgaaatatcggaaagatttatcccgggcgctttcagaagttctgaaagcgctcatttttgcataaatatagaatatctgcagtgttttgtgtgccatacaggcagaggcgggcatacatcatggcggaaaaatcagaaaatgcaggagagaggatggatcagatatgccggaatacagacgttttattgcttatttttatgagtacatagatgggaaaaaacagaaaaatgccgggtttgcaaaggtcgagctgagaaacggaatgtggcgcattctgtttcggctgaatacggagacagaaccattgcggccggtgcgggcttatggatttgtgcgtgagcagggatggcagctgggactgtatatgggcagcatgcgacccggaatggtgcggatggaggaatgggcctatcgtgccgatatccctgtctggcagggaaaatatggctttgcgtcgcttgcagggatctggattcagagtgaggatggaagaaggtatgtgacagtgtgggatgatgagccggtttttacggatcggtttgtgcttacgctgccaaaggaggccgtgaatacagaaaataaagaggaaaaatcagagcagatcacagagtggaaaacggaaagcatacacgaaaagcagacggaagaaaacagcgatgagaagaatgaaacagaacgacaaatacacgcagcagagatatctgaagcgtgggagaaggaaaaggattcagtcgcggatgaagaccaggtagaaatggttgatgcggaggatacagacaatttaggagagcatgcagaagcaatgccggaagagcatataagtgaggaggaggctgcagccgaagtctgtgaggcgtttgaggatgagatgacatcagaagaagtgccggtgcaggaggagccgcatgcatgccggtcatccgggcaggaacaggtgcttgcgatgctttttgccagccgcccggtgctggagcctttctcggatacagaatttttggagtgtgtgcagcttcgtccatgcgatttggtgcgcttacagcaggcaaattgtcgggtgggcagaaataccttcctgcagcatggactttaccagtaccatcatctgctgctcgcaaaagatcaggaaggacattacatcctcggtgttccgggtgtcgtcaatgcacaggagcggtacatggccggaatgtttgcatttgaccgcttcaagcccgtaaatggatatgaccggggatggcagttcggatactggtgcagggaaatctgatcaggtctgttatgagtgcagtcgcctgacacacccgctaagacacggcatccgtacgggtacttgacgccggttcgatgacgacccggtttggcaggcagacaatcatgccgccgtctgcaccgaatgccccctgtttgatgcagagctgatccggacagtccgcttcaatcatccgcacctgaccatcccggatttcgcagacgtttgtttcgccgatccggatgatctggtcgcaggagaggtcatagatgccctgttccatgccgcaaacggtaatttttatgctgttttttgaagaggcagtaaagtgccgtatggcaaacagtgcgccacagaggagaaatagaagaaacaggagcaacagctccttcgttttcttttttttcatatagcatcgaatcctttcgtgaaagtaaagcaagttcaaaagccttatcatgcaagcatgaacggctttttgaccttttgaccctggcatcatcattatatggaatatacggcagaaatgcaaatcatcttgacaaaccgaaatccctcttttaaaataaggggcagttgatgcagtgaagaagaacagtagtccgaaggcgcttttcagagagagatcggcaggtgtgagatctcaggtggcgcgggtgaaccggctttggagcatccgtatgaaaatgcggcgtattccggcgttatcggatggaaagaagagaacagcaaagctgttaagaagggtggtaccgccggagtctccggtcccttttggggatcagagtgcaggttgccacctttttgcatttctgaaacctgaacaaaagctttacattattataatgaatgatggaggaaatgaaaatggcaaaagacaagaagcttgtagaatcgattacctcgatggatgaggatttcgcacagtggtatacggatgtggtaaagaaagcagagctgtgctcctatacgagcgtaaaaggctgcatggcgatcaaaccggccggctatgcgatctgggagaatattcagcatgagctggatcggcgctttaaagaaaccggtgtggaaaatgtatatatgccgatgctgattcctgagagcctgctgcaaaaggagaaggatcatgtagagggctttgcaccggaggtcgcatgggtgacccatggcggactcgaggagctgcaggagcgcatgtgtgtccgtccgacctctgagacactgttctgtgatttctatgcaaatgatattcactcctatcgtgatctgccgcgtgtgtacaaccagtggtgctccgttatgcgctgggagaagacgacccgtccgttcctgcgctccagagagtttttgtggcaggagggccataccgcacatgcaacggcagaagaggcagaggcacgcaccatccagatgctgaatgtgtacgctgatttttgcgaggaagtactggcaatcccggttgtccgcggacagaagacagacaaggaaaaatttgccggtgcagaggcaacctatacgatcgagtctctaatgcatgacggaaaagcgttgcagtccggtacgagccacaacttcggtgacggctttgcaaaggcttatggcgtacagtttgcagataaggacaatacactgaagtatgtacatcagacttcctggggtatgacgacccgtatgattggtgcgatcattatggtacacggtgacaacagcggtcttgtacttccgccgcggatcgctccgacacagatcatgattatcccgatccgtcagcagcaggagggcgtacttgagaaggcaaatgagatcaaagcgacgcttgcaaaagcaggattgcgcgtgaagctggatgattcggaaaagagtccgggatggaaattctccgagcaggaaatgcgcggtattccggttcgtatcgagctcggaccgaaggatatcgaggcaggtgtggccgtgatcgtccgcagggatacaagagagaagatcaccgcaaacatcgatgagctggcagaaaaggtggcagaggtactggagacggagcagcatgatatgctggagcgtgcaagaacacacagagagaaccacacctatgacgcagtcacaaaggaagaattcaaacagatcgcagatgagaagccgggctttatccgcgcgatgtggtgcggctgtcaggagtgcgaggacgcgatcaaggaagatttcggagtgacctcccgttgcatcccgtttaagcaggtgaagctgtcagatacgtgcgtatactgcggcaagccggcaacgaagatggtatactggggcaaggcatattaatcgaattaagctgcgaagtagctattagcgaagcggattacgaatatccgttttgacttgcaggcaggaaaaaatcgaataaagtgagagcaggctccgtcggaattgctggaaggatcagcggccgacggggcctttttttctgcggactgcacagaaaacaaacggagatgtatacgcaggctgaaaaaataacgaaacagcggtcatttctgtccttgtaaaacggacaaatgtagccttgagataatataaattttcggaaaaatcttgacaaacacaggcaaagtgagtatgatttcgttaagaaaacggagggaaccgcttttagggcggttctttccattatcggaaaacattcaaggaggagattattatgaaaaaaatggtgaaagttgtaagtcttgcctgcgcatcagcgatgctggtttccacaactgcatttgcagatggcgatgcatttaaggtgggcggtatcggaccggtgaccggcggagctgctgtttacggacaggcagtaaagaatgcgacagagctggcagtcaatgagatcaatgcacttggcggcgttcagttcgagttccagtttgaggatgacgagcatgatgcagagaagtctgtaaacgcatacaatacccttaaagactggggtatgcagatgctgctcggaaccgttacctctgctccgtgtatcgcagttgcagccgagacggcaaatgacaatatgttccagctgactccgtccggatctgcagtggagtgtgtggcaaatccgaatgcattccgtgtatgcttctcagacccgaaccagggtgctgcatctgcgcagtacataggtgagaacaagctggctaccaagatcggagttatctatgacagctctgatgtatattccagtggtatctatgagaaattcgcagcggaagctgcaaaccagggtctggagatcgtatcagcagaggcgtttactgctgataacaagacagacttcagcgtacagctgcagaaggcgaaggatgcaggcgcggagctcgtattccttccgatctactatacagaggcttctctgatcctgactcaggcaaacagcatgggctttgcaccgatgttcttcggatgcgatggtctggacggactgcttacggtagatggatttgatacctcactggcagagggcgttatgcttctgacaccgtttgcagcagatgcagacgatgagcagacgaagaatttcgtagctgcttatgaggaagcttacggcgggacaccgattcagttcgcagcagatgcttatgatggcatgtatgcgatcaaggcagcagtcgagaagtccggtgtgactcctgatatgagcgtttctgatatctgcgacgctatggagactgcaatgactgagatcacagttgatggactgaccagtaagggaatgacctggaatgcagacggcgagccgaacaaggagccgaaggcagtcaagatcgagaatggcagttacgtatccatggataaataagtatcacgaatagagattgcaatggtgcagccgctgcagaatattctgcagcggctttttaccaatgagacaactattccggcgttcggtcagagcgtgtttgaaaatgtctgttccggaagctgcttccggaaaaatattttcaaacatgcgctggatagcctgaaaactgatatggctgcagagggcacaatgcttcaccggggccaaagcagcaactacgaatgtgaggtgcaatatgagctttctttcttatttaataaatggtgtcagcctcggaagtatctatgcaatcatagcactcggctatacgatggtatatggtattgcgaagatgctgaactttgcgcacggtgatgtcatcatgatcggcgcatttgtaatgctgagcgcgctcaatacgatgagccttccgctgatcccggcggtgcttgtggcggttgtggcgtgtaccgtgctcggtgttgtgatcgaacgggttgcataccgcccgcttcgaaatgcggcgtctccgctggcagtactgatcactgcaatcggtgtcagctatctgctacagaatgttgcgctgctgatttttggcgcgaataccgtttctttcccgaataagattacgcttccggcgctgagcctggcaggcggaagcctagtgatttcttctgttacaatcgtaacgattgtggcgtgcgtagtgattatgatcgcactgctgttgtttatcaacaggacaaaggcaggacaggcaatgctggctgtctccgaggataagggggcagcgcagttgatgggtatcaatgtggatggaacgattgccctgacctttgcgatcggatctgcgctggcagcgatcgcaggttttctgctgtttaccgcttatccgtctctggatccgtacaaaggagctatgcctggtatcaaggcctttgtcgcagcagtattcggcggcatcggttctgtaccgggagcaatgatcggaggtattctgcttggtattatcgagattcttgccaaggcctatatttcttcccagctgtcggatgcaattgtatttgcagtgctgattatcgtactgatcgtaaagccgacaggactgctcggaaagaaaattcaggagaaagtgtaggtggatgagatgggaaaaaagtttgataaaacggtaaaaaacaatgcagttacctatattatggtaattgtggcatggcttgtaatgatggcactgcagcaggctgggatgctgaacagctccacgaccggtctgctggttccggtctgcatctattccattatggcagtttccctgaatctgaccgtaggtattttaggcgacctgagccttggacaggcagggttcatgtgtgtcggagcctttgcaagcgcattctttacgaatctggtgcaggattccatcacctttactccgttacgctttaccctggcgattctgatcggtgctctggtggcgggcgtgtttggtctgctgatcggtattccggttctccgcttaagcggtgactatcttgcaattgtgacactagcattcggagagatcatcaagaatttcctgaacattttgtatgtgggaaaggatagtcatggactgcatgtctctatcaaggatacgatgtctcttggcatggagccggatggagttgtgattattaaaggtgcgcagggaattaccggcacctcgcgggatgcgacctttacgattggcatcatcctgttgctgatttctctgtttatcgtcctgcgtctggttcagtccagagacggtcgtgcgatccgttccatccgcgataaccggattgcggcagagtcgatcggcattaatatcacaaaatataagctgctggcgctgaccgtttccgctgcgatcgcaggtatggcgggtgcgctttatgcacacaactataattccctggcagcgacgagtgccaagtttggctacaatatgtccatcatgattctggtatacgtcgtactcggcggtatcggaaatatccgcggatcagtcattgcagcaactttgctgtatgtgcttccagagaagctgcgtttcctgcagtcttaccgtatgctgatctatgcagttgtactgattgtggttatgctctttagctggagcccgaaggcacgtgatttccgggagcgttattccctgaaacgtcttatccacaaaaatacggcaaaggaggcggaataaaatggcaatgttggaagtaaaaaatctgggcatttcctttggcggactccgcgcggtaaacggatttaatattacaattcaggaaggtgagctgtacggactgatcggaccgaacggagccggtaaaacgacggtattcaatctgctgaccggtgtatacaagccggataccggaagtatcctgctcgacgggaaggacattacgacgctgcatgcgattgatatcaacaaggccggtattgcaagaacatttcagaatatccgtctgtttaaaaatatgacggtgctggataatgtaaagaccggtctgcacaataagcatgaatattcatttctggctggaatttttcatacaccggcgtatcataaggtagagaaacagatgaatgagcaggctatggagcttctgaaggtatttgaactggatcagcatgcggatacactggcggcaaatctgccgtatggtgagcagcgaaagctggagattgcacgtgcgatggcgacggagccaaagcttctgctgctcgatgaaccggcagccggtatgaacccaaatgagacgcaggcgctgatggatatgattcgttttgttcagtcacattttcatatgacgattctgctgattgagcatgatatgcggctggtttccggaatctgcgaagagctgactgtgctgaatttcggcgaagtactggcgcagggaaagaccgcggatgtgctgcatgacccacaggtcatcacagcatatctgggagagtaaggaggaaatcgcaatggcaatgcttgaagtaaaagatctgcacgtatattatggaatgattcaggcgatcaaggggatttcctttgaggtcaatcagggagagacgatcgcgctgatcggtgcgaacggagccggaaagacgacgacactgcataccgtcaccggactgcttgcgccgaagaagggcaatgtaatttttgaaggccaggatattacaaagattccggcacataagattgtcggccttggtatggcgcatgtaccggagggacgccgtgtgtttgcacagctttctgtctatcagaacctgaaaatgggtgcttatacgagaagcaataaaacggagattgaagaaacgctggaaatggtttatcggcgttttccgagactggaagaacggaaaaatcagatggccggtacattgagcggcggtgagcagcagatgctcgcgatgggccgtgcactgatgtcaaagccgaagattatcttgctggatgagccgtctatgggcctttccccgattcttgttaatgagatttttgacattatccaagcactgaatgaagccggtacgacggtactgctcgtagagcagaatgcgaaaaaggcactggcgatcgcagacagagcttacgtgctggagaccggacggatcgtacagtccggtgatgcggatgcgctcatgcatgacgaatcgatccagaaggcatatcttggagaataataaaaggctgcatgtggagcctgaaaagggggattactatgaaaaatgtggtaattacaattgcacgtcattttggcagcggtggaaagacgatcggaaaaatgctgtcggaggatctcggtatttcctattatgagcatgagatcatcgagatggcgtcggaagagagcggaattgctgaggagctgttcaatcaggctgatgaaaagctgaagcgtactccgctgtttttcggaaaatctcattccggagagtacaaagggaagctgattgcaccggacagcgatgagtttgtcagtgaccacaatcttttcaattatcaggcaaagatcatccgggagctggcagataaggaatcctgtgtcatcattggtcgcgcggcagattatgtgctgaaggattatgataatgtggtgagcgtgtttgtgcatgcctcaaaggattactgtgttcggcaggcgattgagcgcagtgcgtacaccggaaaggatgtagagaagtttgtcgagcggacagacaagtaccgcagtgatttttaccgctattataccggacaggaatggacggatgcgcggaactatgatctctgcctgaacagtgaacgtcttggctttgaggggactatggaagcgattgaggagtatatcaaggtgcgcttcggagcgctcccggggacaaagaaaaatcagtagtgaaggaagcggattcccgctgcgatctgaaaaggtcgtagtgggaattttgtagtatttatacaaaaaacagatgcatagaggaaaaaagaatgttataatgaatagacgacaaaaactgtgatttttgcagagcgaataagtaggaggatctgaaaatgggtttggatgtaagcagaataagagagacgattgcagctggaaaggccgtgctcggtatagagcttggttccacaagaatcaaggcggtgcttgtagatgagacgaatgcaccgatcgcttccggcgcgcatgactgggaaaatcagctggtagacggtatctggacgtacagcctggatgcgatctggacaggactgcaggacagctacgcaaagctggcagaggatgtaaagaaaacgtatgatgtggagctgacgaatctggcagcgatcggattcagcgccatgatgcatggctacatgccatttgataaggacggaaagcttctcgtaccgttccgtacctggagaaacaccatcacggaagaggcttccgatgtgctgtctgagaagttcaatttccatatcccgcagagatggacgatcgcacatctgtaccaggcgatcttaaatggtgaggagcatgtgaaggatatcgtattcgtatctacacttgcagagtatctgcactggcagctgaccggcgagaaggtagccggtgtcggcgaggcatccggtatgtttccgatcgatacggcgacgaaggattacaatgagcagatggtacagaagtttgatgagctcgtagctccgaagggctttggctggaagctgcgcgagatattcccgaaggtactcgtggcaggcgatgatgcaggacgtctgactgcagagggcgcaaagctgctcgatgtatccggaaagcttcaggccggcattccgctttgcccgccggaaggtgatgcaggtaccggaatggcagcgacgaacagcgtagcagtccgcactggtaacgtatccgccggtacatctgtatttggtatgattgttctggaaaaggatctgtccaagccgtatgaggcgattgatatcgtgacgactccggccggacaccaggttgcaatggtacactgcaacaactgtacctctgatctgaacgcatgggttagcattttcagggagttctccgaggcatttggcatcgaagtcgatatgaacaagctctttggtaccctgtacaataaggctctggaaggggatgcagactgcggcggactgttggcatacaactacttctccggtgagcacatcacaggcttcaatgagggccgtccgctcttcgtgcgcaagccggacagcaagttcaatctggcaaacttcatgcgggtaaatctgttcacctctctaggagcgctcaaggttggttttgatatcctgctgaagaatgaggacgtgaagattgacaagatctatggccatggcggactcttcaagacaaaaggcgtaggacagggtattcttgctgcagcactgaattctccggtatctgtcatggagacggcaggagaaggcggcgcatgggggatcggactgctggcttcctacat

SEQ ID NO: 4237 - DNA, 5889 bp, Unknown
  16S sequences of unknown bacteria
gccgggccgccgccgacaatcagcagccgcttagtcatggcaaagcaggtacccaaggacctggctgcacttaaattccgcctcttcggcaacgcagcatgactccaacacgcctgccgacggggccgggacttcaaaaatcttcttctcgatctccgcctcgcagaggcactcccctgctgcgacggcatcgccgggctgcttgcaccagtgcagcacgccctttttatacttgagcaggtactcgcgattcatgcaatcacagtccttgccctctttgttctggggatattcccgctctgggacacggatttctacgcgcgtttccgccatggtttatgcctcctctggatagaacgggcatgcgttcttcttgcactccgcgttctcctcatgatatttacagacgatcttgcctgggtccgccagctggatacccagggacttttcaatggacgcgatggcgctctgcagggcgataaagctgttgcgcttgcagcagcggggcccgtcgacctcggcaatctgcagcagggcctggccggtggcgcggttgcaatcggcccagtagtcctggacgtgggggtctgcatttgtaaagacgctcataaaaatgccgatgccgacggcggcgccgcagtcgccgtaccagccgcagaacccggccaggacgttcagcgcccggtccttacattcagccagctgctcccggaaaaggtcctccggctcgccggtcttacgggcggcgacggtcaggagcgtggcgggcatgatatagtggtgcgggggacagtgcatgggcagacccggcaggtccatcagctccagcagcagcccgtagggcgtcggctccgcttcggcgcggaaggcggccaggcaggccgcctcgatcttgtcgtaaaacggcagcagcttcgtcaaatcaaatttctgcatctttctatacctccaacacaagcagcatatttcctgcgccgcgccgaagccgcaagcttgcagcgagcaaaatgcaggaatggactaggtccagtataggacctggcgcggtctttgtcaagccgcgcgccgcttccgagggggcataacattacaggccaatgatagcatatccgtcccggcaaaatcaaccgtcctgggcggatttcttccctgcgcgggcggtttacgagaatacgacgcagcctgcgttggctgcgtcgctgtcttgtactattttattccggtttattccggcgccgctgggagctcgatccagaagacaacgccgccgggggcgttgtagacgccatagggctgccccagcagctccatattgccccggacgatggcaaggcccaggcccagctgcccgcctgcccggcgacgcgactgctcgccgcggtagaaccggtcaaacagatgggccatctgctccgggccgatgggctcgcttgaattgtagacctcgatgcggatgacccggggcgtggccggggcggcggctgcgtccggcccggcggcatctgccggagcgtccgctgcctcctgctggccgcggctgcgcaggtaggtccaggccgcgccgaccaggcgggcaggataggacttcttcgcctccggcgcgagagcctccgccgcctgcacctgcggctcctgctcctgcgctggggcggcgcggtagaatgcccgcactcgcatcttgcagggcggcgtcgtgtgaaagacggcgttctggatcaggttcgtcaggacctgatcgcaggcgatataatccgtcaccgtccatagctgggacgggacctcccgctccagggcgacgcctgccttttccatctccatggaaaactggttgagggtattttccagcagccgggcaatgtcgaagcgctccagctccagctgcacctgcccgctctccagctgggaaagctgcagcatccgcgtgataatctggcgcatccgctcggtctcatccaaaataatgccgcagtactcctgctgctggtccggcgtcttggccattccggcggagaggccctcggcgtagccggagatcagggccaggggcgtcttgagatcgtgggagaggttgccgatgaggtgcttcatggcgctctcgctgcgctcgatggcgcggatatcatcctgcagctgggcattggcctggcgcagctgggacagggcgctttgcagctgatcggacatctcattcaagctttccgccagcgcccgggattggcgagcaatgccgccggtcccgcatttctggctgaaatcctgccgggcgatgcgctttgcgacctgcaccgcctcgccgatgggctggaacagctgccgctcgatggcgacgaccagcagcagcgtcgcaaaccagacgatgacgccagtggcgatgctgtaacgggtgaaggtcatggcgacggagaagatcgggtccagctgggtgctgacttcgatataatatcccccgctgcggcccagcagggagagctccccttctgtatcgctgcccgtcgtctggaacaccggctggacgacggcccggtcgacagtccggcgcaggttctccaggtcctcctggcggggctcgacgttggccgtgaccagctggccattttcccgcaggaccaggacatggaaattctcccgcagcagcgccgtctggctccccgtcgggtccgccgcgacttggctgaaggcctcccgcatccgggcctggaggtttttgctgtaggacggcgaaatataatgccggtaaatgaccgccgccagcacgatatccagcagcagcaccagcgtcgcgaccatcaggaggatcgcccggtagctcaaggtccgttttccgcgccgcatacgccgcctccttccgcaatggcaagataaagatcgtatgataatcgtatcaagggataaaaacacagcgccggaacggcaagcgctccggcgcggctttttctatgcttccagcaagtacccgctgccgcggatggtcttgagctgcgcaccgcactggcccagcttcatccgcagatttttgatgtgcgtgtccaccgttcgggcttcgccgagattgacgctcttccagacgtcctgcaaaatctgctgccttgtccgggcgctgcccaggtgctgggccaggtacagcagcagctcatactcccggggcgtcaggctgacggcggcggcgcctgccttgacggtgtgggccgctgtgttgatcgtgatgcccccggcggccagctccgtgacggtgcttgtgcgcttgagcagcgccttgacccgggcgatgaacaccgggaaccgcagaggcttggcgataaaatcatccgccccgcagtgaaagccgaccagctcgtcggcctcggcatcccgcgcggtgacgatcatcaccgggacggcggacattttgcggatcaggcggcaggtctccagcccgtcgaggacgggcatcatgatatccaggaccaccaggtcgattttctcctcgctgcgcatcagctccatcacctgctgcccgtcggcggcctccaggacccggtagccctcgttgcgcaggaagtccccgacgatccggcgccagcgctcttcatcgtcggcaattaagatcgtaacgctcatgcttcctcctgctgcggggtatagaccttcgtctcagctgtcttgcaggcttcacagcggcagatcggcgtccccaaggcgtggaatttttcttcgtagccggtcatcacaccgatgacgccgtccttgtgcagatcgtgggtcacgttcttcagctgccagccgcaggcggcaaactgctccagcgaccagtcaaacagcggggcattgtccgtcttgaaggcgatgacgccgcctaggggcagcgcgtaggcgtattggtccagaaaggacgggaatgtcaggcggcgcttggcgtgcttgcttctgggccaggggtcgcagaagttgatatagatgaggtcgacctccccgggggcaaagcactggcccagcttagcaacgtccatatccaggaagaatacgttcttcaggcccatctcctgtgcccgctccatggccaggaccatggcctcgcgcaccttctcgatggcgatgaagagcacgtccggctcggcctgggccgtctcgacggtgaattttcctttgccgcagccgacctcgacccgcacctgacgggcctccggcatcaggctgcgccaacggcctgccatctcctgcggcgccgggatcatgatctgctggcagcgggccatccgcggctctaagttgttgcgtctgcgcattctcatagggtgaagtcctctttctgtgtttctcgataacagggatcttttgcgtttccctgttagtataccaagtttccgaaagcctgtcaacgccgcaggggcgcaaatggggcgggaagttcggtgttgtattagcgggggaaatctgctataatggtcaaaaataggggtcatttaccctggagcagcaaaggagcggcagccgtggcagagtatagcagcaagcgagaagagagaaaagacgagatcacccagcgggaggacattctggtgggccggaacgccgtcagcgaagcgctgcgcagcggccgcaccatcgacaaggtcttcgccgcctccggtgatacggatcacgggctgcgccgcctttgcagccaggccaagcaggccggggccgtcatcagcatgacggaccggcgcaagctcgaccaaatggccgccgggggcgcgcaccagggcatcatcgcctacgccgcagcccatacctacgccacggtggacgaaattctgcagcgggccgccgaccagggccgcacgccgctgctcgtcatctgtgacgagatcgtcgacccccataacctgggggcgatcctgcggacggcggagtgcgccggggcctgtggggtcatcatccccaagcgccgcagcgtcgggctgacggcggtggtcgccaagacgtccgccggggccatcgagtatctgcccgtcgcccgggtgacgaacatcgccgcgacggtcgacaagctcaagcagcagggcgtttgggtctgcggcacggcggcagacggcgcgacggccctctacgacgccgacctcaccggaccgacggccattgtcatcggcaacgagggccacggcatcagccgcctggtggcagagcggtgcgattatctgctcagcatccccatgctggggcagatctcctcgctcaacgcctccgccgcggcggcgatcttactctatgaagccgtgcgccagcgcagcagcggcgcagcgaaccaataaggagggcgcactatgacggcaccgaaagacgaacaggcagaggcctttacgttagaggatatcatcaaagaatttggctccgccgcgcaagacccggcagagcctgacgcagcagcccagcccgcagacgaggcggcagcagagcccagcgccccggcgcagccggaatcggcggaatcggcggaaccggcggaaccggtcgaaggaccggccccggtcgatacaccggcagaagaaacaccggacgcaccggcagacgccaccccggaagtggtattggaacctaccccggcccccgccccggaagcgccggcgaaaaagccagccaagcccgaggcccccgcgccccggccaacgcgccgtcaggccgccgccatgagcgcagcagagatgggcctgatcgacgacgccgagctggacgccatcattgaagaattcggcagcaaaagcggcccgcgctacagcgagcaggagcggctggcggcgctggagcagaatctgcgcagcgaccttggcaacgccccgtccatggatttctttgagcagcaattcggcgggtatacggacccgacggcccagcccatcgcgccggaggctgccccggcggcgcaggattcgt

SEQ ID NO: 4238 - DNA, 3036 bp, Unknown
  16S sequences of unknown bacteria
aaaaacgcatggcagggttccgacaggttcaaaagaagctagacggaagatttgaaggttttttaacatggcggaataaattaaccgaatcaagccctccctgcttcagttgcgcaaagtaataagcagtggggtggttataaaacagcagaaaggagatagaaggaatcatatgaaacaggaggtcagagaaaaggtatgttgggttgttggcgcagggagctttgacgggctgatggggcgtccgcagaagggtgatcttgtcattgcggcagacggcggctatatctacttaaaggagcttgggatagaaccggatgtgctgctgggtgactttgactctttaaagagagtgccggagcatgagcatctgctgcgacactctccgatcaaagatgacacagatatggcattggcggtggcttatgcacaggaacagggctatcataccttctatctttacggagggcttggcggacggctggaccatacaatgggcaattttcagctcctgacaggtatttctaaggcgggtgaccaggcgtatctgattggggaaggacagatcattactgcgatcacgggtgaacgaatccggttttccaaaggggccgacggtatgatctctgtattcagtatggataccgttgcgagtggaatatgggagcacaatctcagctgcgggatgcacagatgacgaatgataagacacttggcgtcagcaatgaattcattggccgggaaagcagtatcgaggtacatcagggaactttattgattttgtgggatgcgaagaacgggctgccgatggagcgggcacgtttatgagcaggcagcgaaagccgccctaccgttttgccgacgtgattgtttgcgaatatctgctttaagaaggagcgtgagtgcacgagtgaagaaagaatcatatcgtatattgacaggctggtttttcataatggctatggtcatctgtcagcagtctttgtatcggccgccggtatttcattttagcccgaccaaggattttgcactgcttttgatgggaatgctgaatttgctttattttctgatcgccctttttggcacggtatactggctgccggggatctcttattcggaggcaagagatgcaggaatgggtgcttgtcggcgctatggcggattccggcttctttgcggatgcctggcgatgatggcttattttcttttttgtctggcagatcgcagcttcctgcatttgaattctgatatctggagctgcacagctgccgggacggcactgattctgggcgaaaaaatgcattctttttacgattgtgcttgcatatttagaaaaaacagctataatgaataaaagttggtttcattttataattatgcatgacatcatacagaaggaggaaaaggtatgaaaagaaaaatcgtagcacttatgctgatcggctgcatgacagcttctatgacagcttttgcagaggagagtacagagggggcaacagaaggagcaacggaggcaggcacagaggcagccgctgatttctctgatgtagagaccgtagcggagggcaaactgactgtggcgacgagcccggatttcgcaccgtacgagttctatgcgattgatgaggacggtacaccgtctctggcaggctttgatattgcgcttgcccagtatatcgcagattacatgggactggagctggaagtcgttaccgttgatttcgacggcgtactgaccgagctgcagaccaagtccgtagatcttggtatggcaggactttccccggatccggcacgtgaagcgatcatggatttctctgatatttactatgagggcggacagtctctcgttactgtaaaggataatgcagataagtacaacagctttgatgcagtcaacaattcagacgtatcggttggtgctcagacgggttccattcagttagatctggcaaatgagaacactccggatgcagacatcatctctcttccgaaggtaacggatatcattgcagagcttcttgcaggcaagctggatgcggcttatattgagacagcagtagcagagagttaccagaagaattatccggatctggagatcgtgatggatgttccttatgatgtaaagggctcttccattggcgtatgcaaggataatgagggtctgatgaaagcagtcaatgcggcaatcgcagctgccaaggaagacggttctcttgaagatttcatcgctgaggcgaatgcacttgcagctggcgagaagtatgaaggtcttctcgatgacaatggcgaggtagcggaagcttccacagaggcagttaccgaataattatcatgttgcatgattttctaaataaagagctgttgcattgttttgtgaggtgcagcagcttttaaaatgctgatactgtttgtagaattgcggagctgctttgcagcggagcaattcgtaggcatcagttagaacatctttttagaatgaaagggacagaagatggacagttttattcaaatcagtaattttcctaaaattgcaccgtatgcgcagctgtttcggcagggacttcttgtcacagttctcctgtcggcatttacggtcgcaatcggatttgtaatcgcgcttttgctggcgctgatgcgtctttcaaatgttcgcccgtttcggttcctcggactggataaggatggccatcagaaggaggaaggcgtacttgcggcgatcagccggtttaatccactcagctttctggcaacggcatatgtcgaaattcttcgttcgacgccggttattgtacaaatctttattatttattatggtgtgttttctgtgataaagctgccgtccttccagatgtttggctttatcaaatttgaccgtttcttcccgggtgtcgttgcacttggcatgaactccggcgcatacctgtgtgaaatcatccgttccggtatccagtcaatcgacggcggacagaccgaggcagcacgttcactgggactttctcaggtgcagaatctgcgctatgtcattttcccgca

SEQ ID NO: 4239 - DNA, 3855 bp, Unknown
  16S sequences of unknown bacteria
ctgtggcacgctgcgatgcaaaacacgatttgtacggcaccatcggcccgttccccgccgtgatccgtcgaagcgaagccatcagcgccgccgtcagcggcgctgaaaaagaaatcgccgtattgtccctggtcggcaaaaccgtatgctgcacgatccgggacatatgcagcaatgacgaaggccagacgctgctggaactgtcccgcagggggatacaggacaaagcgctctcctatctgctcgacacagtacaggaaggcgacgttattcccgcctcggtatcctcgatggctcccatcggggtctttgccgacgtgggctgcggcatcatcgcactgctgcccattcgccagatctccgtatcccgcatccagcacccagccgaacgtttttctccccatcagcctatttgcgccgccgttcgaaaaatcgaccgcgcagcaggacggctgctgttaacgcataaggagctattgggtacctgggcagaaaacgccgcacagttccaggcaggcgaaacgatcaccggggtggtgcgtggcattaaaagctatggagttttcattgaactgacgcccaatctcactggcctcgccgaaacggacgacactcttcaggaaggcgaacgggtatcggttcttatcaaagcgctgctgcctgacaagcacaagatcaaacttcatgtgatcggtcagctgcccgcctgccccgccgccgcgccgctgcaatataaaattacagagggaaatatatccggctggtcctattactgaaaaaagcgtcaacgctgcgccttgatgttctcccagtatttccgcgccgcctgttcggttttgttttcgccgtattcataatattgaacgccggccatatcgtcgggcaggtattgctgggctacatagtggttcgggaaatcatggggatagcggtagccagggccgcgttctgcgccagcagaatcggcatgcacatttttcagatggcgcgggatatcaccagtgcggccgcggcgtacatcctccatggcggcaatgatggcattatgggcagaattggatttgggtgccgtggccatcagcaccgccgcttcggccagcggcagccgcgcctccggcagccccaactgcagcgccgcgtccacacatgctttgacaatggaaatcgcctgcggataagccagccccacgtcctccgcggcgatcaccagcaagcggcggcagggagacaaaaggtctcctgcctccaaaagccgggccagataatacaccgcagcatccggatcggaaccgcgaatggacttctgcagcgcagagagaagatcatagtgattgtctccatcccggtcataacgcatggcgctacgctgagcggcctgagccgcgtcctccgccgtaagcaggatcacaccattttgcggcacgccggcgcggcagagcagctcgatggcggaaacgcccttgcgcacatccccgccgcaggcgcgagcaatgtccagcagcaccgcatcactgcactgcaccgcaaggcccaagcgctcttccattttcgcaagggcccggcgcagcgcatccgtcagttcttccgcgcaaaccggcttgaattcaaagaccgtactgcggctcagcagcgccgaatacacataaaaatacgggttttctgtggtggaggcaattaatgtgacagatccgttttccataaattccagcagcgtttgctgctgttttttattgaaatactgaatttcgtccagatacagcaaaatgccgccaggcgtcagcagcgtccccacatcggcaaggatttccttaatatcagaaatcgacgccgtagtggcgttaagtttatagagacgtttctttgttttggcggcgatcaggttggccagggtggttttccccgtgcccggtggaccgtaaaaaatcatattggccgctgttccgctttcaataatgcggcgcagcaggccgctttctcccagaagatgcttttgccctaccacttcatccagactctgcggccggatttcatcggccaaaggacgttccatgccacgcgcctcccttcctcacactcttgcagcgtgccgcttatttctccaggaaactgcaaaatgagcagcccctgccgctgcgctttcgcggacggcgtttttttcgggaacgtactgctaccgtccctccaaccgctccattgtttttggaatgtattatagcacactttttttcgctttgcatctgcttttcctctcgcattttgccgaaatttgtagtatgctgacacaaagaacacagaggaaaggataccgacgccatgaaacgaaaaagcacagtcctgcgtattatcgagaatttgaaggtactttacccagacgccgtctgctcgctgacctaccaaaaagactacgaactgctgtttgccacgcgtctgtccgcccaatgtaccgacgcccgggtaaaccaggtaacaccggaactgttttccacctatcccacgctggaagcgctggccgaagcgtctgtggaggacgtgggcaggatcatccactcctgcggcctctatcagaccaaggcccgggatctggtggcctgcgcccggatgctgctggaacagcacggcggcaaagtgcccgacacgatggaagcgctcaccgccctgcccggcgtgggccgtaaaaccgccaatttggttctgggcgacatcttccacaagcctgccgtagtggccgacactcactgcatccgcatcaccggccggctgggcctgaccgacggcagcaaagaccccgttcaggtggaaaagcaactgcgcgccgtgctccctccggaggagagcagcgatttctgtcaccgtatggtgctgcacggccgggcggtctgtatggcccgcggccccgtctgcgacaggtgtcttttgaaaaaagactgcgattttgccaaagcgaataagatcaaatgaacgaagacgaaaccatggacaggctgcagcggcagttccctcccctctttttctgcagtcctgcgaccgccgccggacgctccccctaccgtccggcggccgttttttgcacaattggaaaagactgctgcaaaatcagggaacttttcctctcctggttcatatactgcattagactatctcgaaaaggagccgatgaatttggagcttcaggaacagatcaaaaaaatacagcagaacaagaccctggtacagcagctgatgacttcgccggatggacagcgcctgctggccatgctaaccaaagacggcggcggccagctgaatcaggcagccgcagccgcagctaaaggcaatactgccgatatcgtacatatgctcgcgaaagtgatgcagtccgaggagggcgccaagctcgtccataaaatcaacgaccagatcaactgacccattccgcgcggaagcggcgccgcaacagctgcgccgctttcacaaaatttcagcaaaggaggcggcgccgtgtggcagactttgaggaaaaactaaatgcgatcctctcttctccggagagtatgcagcaggtggcccagctggcccagatgctctccgcgcaaaacgcggctgaagttcccaccgacgaagaagcacaggcgccgcctccgccaccctcacagcagtccgcgccgccgggcggcggaggtgcgataccggatctctcttcgctgctgggcgggctggatatgaataccatcgcccgttttcttccgttgctgcaggagatgaaccgcagcagtaatgacgaaagcacccagctgctgtatgccctcaaaccctttttgaagccggaacgacagagcaaggtagacagcgcactgcgcctggcccgtttgttccgcg

SEQ ID NO: 4240 - DNA, 8661 bp, Unknown
  16S sequences of unknown bacteria
tgtcataaaaatcctctgtaaaagccatactcgtcagaatgccgtttataagtttaagcatccgccccaaataagggagcagggctcctgtctccgccgttatttttttgtatttttgactgtgcaattttgcttcatgctgctttgcatcaatccaatcttttttcttttctataaacgcttctatttccctaatcggcatataaagcggagctcttgcaataagagctccatcgcttctgattaaaagtgagagggtttttctttggctgcggattagtgtataagctgttttttccatatttcttactgatatatttttaatggcaatgaccgccgtttcccgcgcatccgtgcttgtcttcgccgcagtgtccgccgtcattatggctgtggcagctgtgcccgctatttccgcattcgtgaccgtgcgcgtggtcgtgatggtcacagtgtacatcaggattgtaatcaagagaatcagacatcagcgcttttacagcagcatccgcattgccggaaacacctccgtagagctttatacccgcttccgcaattgcactcttggcaccgcttccgatgcctccgcagataatgacatctgcacctatctctgcgagcagtcccgcaagcgctccgtggccgctgccgtttgtatttattatctgctcgtctgtgatttttccatccgttatatcgtaaatcttaaactgttcagtgtgcccaaagtgctgaaatatctctccgttttcataagttaccgcaattctcatagtatttgctcctttcgtccttacaggcgtctttgcacctgtactctttatttttctgcaaaatttttgacaataatcggcagccgatccgtcgcaaagtctgtaatttccaccggaaatcacaagcttttttccattgacaatactgtccgctatcttctcacgcgccgcttcataaatttcagttacagtggttcgcgagatgtccatctgctttgcacactgctcatgcgtaagcttatgaagatcgattaaacgaatcacctcgtattcgtccacagtaagaatggttttgtctccgcagcatatcccgccgggagcaaagctatcgtaagccggctctgaacatattcttctgcacttgctcggtcttgccattattacacatcctccgtattttaaaattacgtttccgtcatatgtcgaaaatagtataccctaaatttatgaaaaaatcaatataaaataaaaattaatctatcacgttatgcaaaaagttgtccgtctttcaaaaccggacgtcttctttgcgtagatagacagaaagaatgcaaaaataattacataaaattgaaacaatttttgtataaaacaactaaagactaaccttcgagacattttatccagaagaaagtatatcaatgatctagcgatatatccaccttcgccgtttgtagattagcattgctgggcgttatttgccaatagtacatttacaccgccgcttttgcgtttttatacgcttacgattgatgggacagttataattatcgcagatatacatatttccgttgaagttaccaccgttttcgtctttcccgtgaaactcaccggcgactctttttgtcccgtctgtgcaagaaacacattctcttgaaatatatgccatagtaattccttctttttttagatttaatttgatatcagttttaatagtttctttaatgcagtatttgtattctggctacgataaaaaatcccgaaggataactggttatgtttttccaatggaatggttgaaaaaattggaacctttaggcaaagaaccttcgggagaatggatacacccattccagatgccaccatgcaatgagcgatttcgatactatcgcaatacagtacattttgaggtgtatactgctctaaaagattttgctgaagatatgccgtagcgagtggggcatttaatggattacagataattaacggcaaagttttcaaatcactcatagacactatctcctttttctcaaaaggatgtccctttggtacaaggcatacaaaggtatctttttgtatttccttaaactttgcatccatcttcttgggtgcattttctttatagaaaaacaatgcatccaacttattttccataaataagctaagaaccattttatggttcagtacttgaatatttgggcgcagagtaggaatttcacaatgaagctgcgacaacaactctgatagacaaaaaagtgccgttggattactcagaccaatactgattgtgtttccaccaaactcctgtcgcttggcgcgttccactgccagatatgtactttgaacgatttcctttgcatccttataaaaagacatacccgccggtgtcagttcaacatgacgggtcgagcgcgaaaacaatgtaacgccaagttcttcttccagcgcatggatctgcttggttacagcaggctgtgatttatacatggcttctgcagttctggcaaaactcgagttttccgcaagcagaataaagcatttcaaactttcaatattcattcatccccaactccgataacttttttatattattataagctattattacagaaaaatcaattacgcaaatatcattatatgccttaatttaataattaaaagttattgataataaaaaatattcaattctgcaaacgccgtgtttgtgcgataatgtttaagtatttctaatatgaacaaggagatgaaaataggccgaacatgcactcggccagatgtattatggaaaagatatggaacaaaaaatttattttgctatttatcacaaatctgctgatgatggcgaccttttatggttcagtccctatcctgccaatctactgtcaggaaatcggtattacaggttcaaaaatcggtatagttctgacggcaatgtccgtcaccaccgtattattccgaccatttgcgggttatcttctggataactttaaccgttatcatgtatttataatatgcctcgccttattttcactgccgtttttaggatttattatatttcctgtttttggaatgctggtgtttattcggctgtatatgggcgtagtctactctgtctgcgggtctgcaacaaccacattggccggagatgtcctgccgctggataaagttactcaaggtgtcaatcgctttgcgctgacaatctctctgggtatggcatttggcccgtttatcggtattcagctccaaaatcatctgagtagcaaaacttcttttcttgttctgtttgttttggtattggcagcgctgttctgtgtatcacgttgccaaatcgaatatcccaaaactgaaccaaagaagttttctttatcagcagctttctataaacctgcactgccgtttatgctgaatatgatcttcattatgatcccgtttggagcagtcattgcctactcgtccattttcgcgcaggaaaagggattctcttccgttatcccttatttttatatttttctggttgcgggaatgctgatgtcaaaattctcaacacaaaagttagtagacgctggcaagcacagagtacttgtcggagtgagcttgcttgttctgttgtttactatggctggctattattttatgcggacagccttctatttgctgcttgctggtctcctgttaggagtcggatacgggattcttcaacctcttttccagtcttttgtaactggcacaacacctgctcccaagcgtggcgctgcaaatgcaacatatcttttgtcctatgatattggcattggtattggctctttcgttatgggtatgtttcatgaagggatcggtttgtcggccggtttctccattacggcaatagcctatttattcggtgcagtgatttatttattgtatacggataaatactataaaaaactgcggttttgaaaaatttggagtcgtcgttttgttttccagacttcgatacaaggattcaactcaaagtctcaattagctacgcttggtcgcctctctggaatagccaaattttcaaaattttacagcaggaatgccccagttgccgcaaactgccgttcaccgcttgggcatagctcaggatgccgacaagtttctctgtaaaacatttcttatatgccttagtcatctgctcaagtgacagcaaaactgcccgattgcgcttaatcgcaatcgttaaactattaaaaccatcaattaagcttgcagttattgcataaagaaaaccacgcgttaaatgcgtggcattcttttgatatgataaagttgttgaagtttattattttatgcctcctgcttttggcttgcaacccactttcttcttacatagaatgcggatatgagtcctattgtgcagaatactgtaatgatggcaaatatgtatttatatcctgcatttcccatcgtatcgaggaagcttcctgttacggcatagagccaaaggtcggacgaatacccgattgtacttacgatgcctgttgccgtacccataagcaccataggtataccgcattccttgcttatagacatctgcataccgtaaatcataagtgtaaagaatcccggaagcagactaaaaagtgacacgaaatttgcatttgccgtatctggtataaacaggaaacttatgcagattacttcgagtatagcaaatagtattgaaaaccatttgcttaccgatttaaataccttgtcggcgatgatgccgctcacaggtgccattacatagaagatatactgtcttataatctggagaattttggcatttgacgaatccacattgaacacgtcaacaagatactgactgtaatagcttgtcgatgtaaacaggcagtatgctccgagaacaacgcccgtaaatgcccaaagtgcaggttttctcaaaagctctcccacctgagaaaacttaaagtcgtttgcctgaagcttgttcagatcaacgccgttcatctcagccattttcttttcgtttataaacaaagctataagaattgtcgctataaccatacatatcgcaatcgtcatagtgagtataaaaaatttgttttcatcgctcgttccgaatgccgtgcccgctttcataccgataaatccgaggagcgcgcccgtaaaaccgttgcacatataataccagccgaacaaaaatgcctgatcgccctcgccggctattgcgcgctgctccttgaacagcggtccccaaaagagacagcccggtatggaaagaagaatccagaggaacatcgaaaatccgaatccatggtcaaaagtgaacgctgtcaggaaaagaaccgctgtttcccatacacagccgagaatcaggagctttttcggtgagaacttatccgcaagtatccccgaaggaatgaagaacagcacctcgcacacgccgaacgccgatataagaagtccgttctgagcgtttgtcagattcatggcagcattctgccagtcaaaaaagacgtacctgataaacggaaaataataaattactccgcccgtaaatccaagtatcgtaagcataaacaatttttttacagtattgttacttcccatcttttatatcctcctttattgcttaatttgcaatatcaaaaccgagatcgagagccgtttcgttaagcgggataagctttgcctttttccccggaaaaatttcgggaagctccgctttaagctcatcaagcgtgagtatgtcctgaaatttcataatagagccgagcgctatcatatttgcgcattttgcatttcctgcatttaccgccatatcgttgaacggaaccctgtaaacatctatatcatttctttctatattctttgttattatgctgctgttaacaataagtacacccttcggctttatcattccaagataatcgttaagagatttttcgtccattaccatcaaaagatcgacgtacgatgaaacgggagcgcacatttcatcggaaacgacaatctgacacatcgtcttgccgcctctcttttccgcgccgtatgttgggcaaaacgtaacaattttatctttttttgcaactgaaccgcagtagagctcgcctattgacataacgccctgtccgccaacaccagaaaatatcatttccaatttcatttacagcacctccttatcgttatccttgaatacgccgagaggatactgttttaccatctcattttcgatccattcaaggcattgcacgggtttcattccccagttagtaggacatggcgagagtatttcgaggaacgaaagccctttcccctcctgctgtagttttaaaaccctttcgattgacttcttcgttttctttatatttgccggagtgtttacagcggctctttcagcgtaataacagcccttaaggtttgaaataagctccgacatgtttatcggatatcccgcaacatcgggattgcgaccaaacggagatgttgaggttaccatattttcgagcgacgtagctgccatctgaccgccggtcataccgaatatcgcgttatttacaaagatgacgcttatcttttcactgcgcgccgcagctgacataatttccgcaaggccctccgataccatatcgccgtcgccctgatatacgattacgattttgtcatctgttgctcttttaagacctgtggcaacagctggcgcgcgtccgtgaagcgcgtttatgccgtcaagtgatatgcccttgtagccgaacgatgagcaacctatcggccagacgataatcgacttttcttcccagccgttttcttctataacctcagctataagcttgaaaacgataccgtgaccgcagccgccgcatgttgtaaaaacctcatttgtgagcacatttgacggtctttcataaactgttttcattacctgtacctccaaatttaaaatccgtactgcttacgtaagctttcgtatatttcttcaggtgaagcgagatctcctcccactttcccgaaaaatgaaacatcgtccttattctttacggaaagctttacatcctctaccatcatgccggcattgagctcgcatacgaagaattttttgccgtcgagagatgagaacgccttttccgggaatggccaaagagtaatcggccttatcattcccaccttgtgtccgtctgcgcgcgccgcttttacaacgtcgcgcgcggaccttgccataattccgaacgcaactattatgatatctgcgtcgtctgtcataatgctttcccaacgctgctcgtttgctttgattttatcgaatttatcgagaagtacgtgtactttttccgcccagtcctttgtgccgtcaccgcacgtggaaagaaagtgaaccttatcgccacgtcttcccgtaatcggttgatcaaccgtaacaggcagcttttctaaggcctccggcatatctacactttccatcatcttggcgatttttccgtcgctcagaagcacaacagggcttttgtatttttctgcgagctcaaacgaaagccttgtgagctctacctcttcctgaattgaccatggcgaaagaactatattgtaatagtctccgtgtccgcctccgcgcgtcgcctgaaaatagtcgccttgcgatacagtaatttctccgtccgcaggtcccggtctcatgatgtttacaacaacaacgggcaaatgagccgccgtcatataagacattgcttcctgaccgagactaaatcccggacccgatgtcgccgtcattactcttttcccagcggcagccgtgcccgcgagcatattaaatgccgccacttccgattccgcctgtacatatgtaattcctctgttcttctgtgaggcaaaatattcgggaatttcgcttgaaggagtaatcggatatccgtaaaaatagagacaaccggatcttatcgccgcttccgcaagcgctttgtttccctgcataaataatttttccgccatttattatcacattcctttcgtttcgtttacatgtgcgaattcttctttgatttcagcgaggaattcgggctccgtcattagatcgattccgacagcgataagcacctttacgtagtcaagcgcgatatccatagcctcatccgtaccagcacgctcttcaagatagcgcgtatgaagtccaaactccgtcccgtcgggcgatgttcctataccgcacataagctgtatgctcgggcatacgtacgatacatttcccagatcggatgctccctgtgcgtgcgctccgttaaaccatttgagcttgtagccctgctcctctgcatagcctgctgcacgcttcgagagcgtctgattgctgacggtgtccttatatccttcctcggaaggataatattttaccttgcagcccgtcgcaagcgcagctccatctgccgcagctttgattctatcaagcagatcgtacacatcgcttacacgatacgctcttgccataacctctgcccttgtgtattcgggaattattcccggagccgtgccgccgtttcttataaccccgtgaattctcgcatcttcctttgtctgctgtctcatgagcgctattgaattaaagaggaggatcatcgcatcaagcgcgttcaggccgccctccggagatgccgccgcgtggtctttaatgaaaataaaaatatatagcgtcagtggtattctgcctgcatat

SEQ ID NO: 4241 - DNA, 32759 bp, Unknown
  16S sequences of unknown bacteria
tgacgccgccgataaacgcttgttctcaggtctttttcagatagtcgatgatgaagccttgaatgtcgccgtccatgaccgcctgaatgtcccctttttcgtaacccgtccgatggtcttttgccatcgtgtacggacagaacacataggagcggatctgcgatccccattctattttcttcacgtcgcccttcatggcgtccgcctcggcctgacgttcctctatcttcttttcgaggagtttggaacggagcattttaaagcacatttccttgttttggagctgggaacgctcgttctggcactgcaccacgatccccgtcggaaaatgggtgatgcgcaccgccgaagccactttgttgacgttctgaccgcccgcgccccccgaatgataaatatcgatgcggatatcgtcgtccttgatctctatctcgttgtcgtcctcgacctcgggcatgacttcgagcgaacaaaaggaggtgtggcggcgcttgttggcgtcgaacggggagatgcgaaccaaacggtgcacccccatctccgctttcagatagccgtaggcgttttcgccctcgatgcggaaatcgacgctcttgatccccgcttcgtcgcccgcttcccgatcgagttcaaagaccttgaatcccattttttcgcagtatctcgaatacatcctatacagcatggagcaccagtcgcaggcctccgtgccgcccgcgcccgcgtgcagggcaagaagcgcgttgtgcgtatcgtacggtcccttcaaaatggcgcggatacgcatatcctcgatatctttatccgccgtctgcaacattccgtcaagctccccgatcaggctttcgtcgcccgtttcctcgatgaggtcgatgatctcctccgcgtcggagagcgccgtttcgctcttcgcataggcgccgatcttattttcgatgtgcgagatttccctgccgattttggtggacttttcgagatcctgccatacgtccggctgttcctgttcccttttgagttcgctaaggcgagcgcgctgattttcgaggtccagcgcatagcccgcttcctttaaaatggaacgcatcccttgaatttttaatctgtaatcgtctgctttaaacataaatttccttaaatgcccgactctttctgtcccgaacccgcttttcttctttcggacgaaagaggttctttgcgtgcttctttgaaaaaaatgccgccttgctgccgcagaaaaaaacgggtgttttgcaagaggcgaaaagtcccgaaagacttttcgccgaccgccgcaaagatattcccgatcaggcgttctttccgccgtcgttttccgctgccgcttcctgaggctttacaggctccgctgcgtttgcggccttcaaaagctccgcctgcttggacgccgcctctttgaacgaactcatattcgtcaaaggctcgggcatctggcgcttgaacggctttctcggcgcgggcgcggacgccgcgctctgatccggcatctgacggcgcagcggctggggaggcgcctgacggaattccaccttcaccttcaagagcaccgcgatcgtcgtgcgctgaatgcgctccaccatctcgtcgaacatctcgtagccttcctttttataggaaatgacgggatccacctgtccgtaggcccgaagcccgatgccctttctgagctgatccatcgcgtcgatatgatcgatccagttcctgtccacgttcatgaggagcacgcggcgctccacgtcgtaaaagtcgatgcccgccgccttgatgtcctcgatcttcttttcgtattccttgatcgtcttattcgtgatctttttgatcgccagttcgtaatcccacttggtcagcttttcgcgggtgacgtaattcgtgccctcgggcaggagtttggtttcgagcgcggcgttgagttccgtttcgttccaaagttcgggcatatcgtcgacgttgaccgccgcacgcaccgtttcctccacgtaatcggggatatatttgagcacctgctcgtgtacgttttcgccctttaacactttgaggcgctccgcatacatgacctcgcgctgcttgttcatgacgtcgtcgtattgaaggacgtttttacgaatgccgaagtttctgccttcgatgttcttctgcgcgttttcgatgccgtgagagagcattctcgattgcaggcaggtgtcttcgtcgatcttgaacatattatagagcgacttcattctctcgccgccgaaacgcttgacgagatcgtcctccaaagagaggaagaacaccgacataccgatatcgccctgacgtcccgcacggccgcgcagctggttgtcgatacgccgcgattcgtggcgctccgtgccgacgatgcaaaggccgcccgccgcgatgacctgctccttttccttatccgtttccgccttataatgctcgtacaatttcttatatctctcgcggatctctttcgtcttgtcgtccacgtcctggatatacatactcgtcgcgagctcgatgacggcgtgctcgattccctcttcgcgcagacgctttttggcgaggtactcggggttgccgccgagcaaaatgtccgtgccgcgccccgccatattggtggcgatggtgacggcgccgaatctgcccgcctgcgccacgatctccgcctcgcgttcgtggttcttcgcgttcagaatattgtgcttgatgccgtttttcttcaacagacgggaaatttcctccgacttatcgacggacgccgtaccgaccagcatgggctgtccgctttcgtggcgctccacgatctcgttgacaatggcgcgcttcttgccgtcgatggtggaatagaccatatcgggcaaatccacgcgcttgatgggcttattggtgggaatctcgatgacgtcgagcgaatagatggtgcggaactccgcttcttccgtcttcgccgtgcccgtcatgcccgaaagcttggtgtaaagcctgaaataattttggaaagtgatggtggcgtacgtcttgttttcgctcctgacctccactccttctttcgcttcgatcgcctggtgcagaccgtccgaatagcggcgcccgatcataagacgacccgtaaattcgtcgacgatgatgacttcgccgtcgttgacgatataatcctcgtcgagtttgaagagcttatgcgctttgagcgcctgctgaatgtggtggttcaaatcggcgtgcgcgatttccgcgatattgtcgatgcggaagaatttttccgccttctgcgcgcccgagtcggtgagttccaccgtcttgtccttgcggttgatgatataatcccaatccttggacgcggcgagcgctttcttgccttcgggaggcgcggaagccgctgcggcagcgcgcttttcctcctgctccgcctcgtaattcgcctgctcggcaagggacattttcgtgacgtctattgtttcttcctcgtcctcttcttcctcggctttcagatcgatcttcttctttttattctttctctcttcgcgcttgcgctggaactccgcgtcctcttcctctttcagctcgtcgtcgaagccgcccgaaagcgtgcgcacgaacctgtccacctgcacgtaaagatcggaggatttttcgcccttgcccgaaataatcagcggcgttctcgcttcgtcgatcaagatggagtccacttcgtcgacgatggcataggtcagatctctctgcaccatctttttgaggtcggtctttaagttatctctcagataatcgaagccgaattcattattcgtgccgtagacgatatcgcatttgtacgcttcgcgcttctcgtcgtcgtccatgcccggcgcgatgacgcccacggtaagccccatgaacttatgcactttgcccatccattccgcgtcgcgcttggcgagatagtcgttgacggtgacgatatgcacgctctttcccgaaagcgcgttgaggtaagcgggaagagtggcgacgagcgtcttgccttcgcccgtgcgcatctccgcgattctgccctgatgcagacagatgccgccgatgacctgcacgtgaaagtgcttcatgcccaaaacgcgccacgccgcttccctgagcgccgcaaacgcgtcgggaagaatttcgtccagcgtttcgcccgccgtcagtctgtctttcaaaatcgccgtctgccctttgagcgcgtcgtcgtccatagccgcgtacttactttcgagcacttccaccttatcggcgatcttgttcaactttttcaggctctttctgctgtcgctgcccatcaaaaaactgattaatcccattataaactccgattacgttatttttgttcttttgtccgccgacttcgcacgggcgttttctccgccaaaaaagcgcggaagcgtccgtccgacttcgacccatttttactcacttcctattttacaatatttcctcggaaattcaaagcgttttcggggcgtttttcggaaaatttctgtctttttaattcctttcttgacattttcccttttttgttttataatgacagggcaaagttctcgccgcgtcgtgcgccaaaaatgccgggcagtgctttgcggctccgccgtttcgcttttagggacggcagcgaaaacgcgtccgcgccaatattttcgtgcgctgtttccacatagcgtcggataaaatttaagagataggaaaatacgtaagggagaaacaatcgtctgtattttcgcgccgtattccgccatagcgcggctatgccgtcatccatcatcatgagtttaaaaacggatattttaagacaattgaaggaacgcgaaggagagcgggtttcaggtcagattctcgccgcacgtttctccgtcagccgcgccgccgtatggaaggcggtgagcgcgctcaaaagagaggggtatgccatcgagggcgccccgaaagcgggatatcgccttctcccctccgacgttttgagcgccgacgaaataaaagccgcgcttatggacgcggggttttcggacgtaaaaatttacgtattctcaaccctgccctcgacaaacggatatgcggaaaggcttttgggagagggtctttcctcccccgccgtcgtcgccgcggacgaacagacggaaggcagagcgcggcggggcggcaatttttcctctaagcgcggcggactttatatgtccctgctgtttttccccgacgctcttcccgaaacgtcggcaaaactcgcccgcgcggtctatgagggcgtcaacgccgtactgtgcggcgaaaggcgggagaacgaaattttcagaggcgaaaaaaagctgtgcggcattctcactcagttcgtcaccgatcccgaccgcgtaaaaagctgccttgcgggaatcggcgtatacgtccaattgctctccgacgacgtaaagaccaaatatccgacgagaaacgagctctgcgcggcgattgcgcaagccgtttttgaaactgtcaaagaggcactgggataaatttgtaaaattcccctttatattggtcggcaaagcgcctgttttctttatggattctctttgccgccttctccgtcaagaggcgtgcaggcaaggattcggaaacttcccccttcggcatcttcgcgggcgcccctgaacaaacgacagaaactcctcttttttcacaccttgaaggcaaagacaaaaatttttttattttttgtctttttttgttgacaatccgcaattattatgatatgattttaatatcaaaaacatataaggagaattgaaaaatgcaggaaattgtattgaagaacaaaaagcggggtatgtttgcgctgatcgtcatcatcgctttgttcgtcgcgtcttttgcactgatcatcggcggcgcgataagcgactcgccccttgtgctcgtgggcgtcatacttatgttcgtgcccatgatcctcattcccgggcttaaagtcctcaaaccgcaggaggcgctcgtgttgacgctgttcgggaaatacgtggggacgctgaaaggagaaggattttattttgtaaaccccttctgtaccgccgtcaatcccgcctcgaaaacgaaactcaatcagagcggggacgtgaacacccgcgccttactgcccgctgccaaagcgaacagcgcggaagccgcggaattggcgaacaagaaaatttcgctcaaaatcatgactttgaacaacaatcgtcagaaaatcaacgattgcctcggcaatcccgtagagatcggcattgcagtgatgtggaaggtcgtggatacggcgaaagcggtgttcaacgtggacaattacaaggagtacctgtccctgcaatgcgacagcgcgctgagaaatatcgtgcgcatttatccttacgatattgcgccgggcgtggatacgacgggcgacggcgtggcggacgaaggcagtctgcgcggttccagcgaggtggtggcgggaaggattcgcgacgagatacagcaaagagtcaacgaggcgggcatcgaaattatcgaggcgcgcatcacctatctcgcttacgcgcccgaaattgccgccgttatgttacagcgccagcaggcttccgctatcatcgacgcgcgaaagatgatcgtggacggcgccgtgggaatggtggaaatggcactcgaaagactgaatgaaaacaacgtggtgactctggacgaggaacggaaagcggcgatggtatccaatcttctggtggtcctgtgcggcaatcacgacgcgcagccgatcgtcaattccggaagcttatattgagatgaccgaaaatcaaaaaaagcaggtcccccttcgcctctcccccaggctgtacgacgccatcgccgcttgggcggaggacgatttccgctccgtcaacgggcagatagaataccttttgtccgaatgtgtgcgccaaaggaaaaagaacggaaaatacgtttccgacgaaatagacgccacgcccgacttgaacatcgagtgataaaaccgcgcttacaagcaacccctctccgagcattttcggagaggggaagtttttattgcgtcaatagctttttcggtcgtcataaagcggcaaaacatttcaaggcgaagccccgcaatccctcatgaagcgggcatattctcaaaatggacgatttgaccggcataacttataatcgcatacctttgtaaagtcgggcgccataaaacaaaaaatcagcacgcccttattcggcctgctgatagttgaattatcgatttaaaattggtttctcattgaaacttcgttatttattattatcttctataccgtattttgccttttgccgaatcacatagttactgattttttcatcatacggtggatacgggcaatccaaccggcgcgccacctctgccgaaacattccgaaataatgacatacactcttctaaggattcccacatatgtgtataagaatccattttataagtgctcataagtcgttgccaaaatttttccgggagataccgccttaaaaatttaaaattttttcctaagctgaaatgaaagcccttttctaagccaacccgccatgatatcatgcggagcaattcttttcgtactatatcattcatatggtcgatagcaaaaagaatttctttgcggcataagccttttactacatatggcacagtattccaaaactcattacagcagtcatcaaacattcgttttgttggcggccgcaaatggtaatctatgtctgttgacaccggcggctgttcaatacggttatctttatccagcagtaattttaccaacttatcccatacgaaatattcgtcgatcaagtctagcggaagcaaagttaaatctattttaatatcatcggtaaacagcattaaataagagaatcctttttcttccgccggaaataattccatatcttcaggtttctgtaagattaacctctccccgaacacatccaaccatttatcgtcgtttgtgaagctatgcatatctgtaacaaaaaaagtaacatcaaaatcctgaaaatcatccggtgaaatatttatatttgttctggatccctctaaagtaaccatgcgaatacgttcatctgcttttgcaaaattcaaaatagtatcataaatttgtttatctgaccgcattttcatctctcccgtaattgtttgcttctctacaaattccgatttgtcgaaaacgcttttcttcgttttatattttcatgtattttttcaatttcgccacgagcgccgccgcaaaaataactttcacgagatcgggcaggagatacggcaccacgcagagagaaagcgctcccgccaaggtgatgcttttttccgcccgcgcgtacagggccataaaccacgccgttccgaacgcgtaacacaccgctatccccaccgccatcgccgccgccagcaccgccatgcgcgccaaaacgttcttaatctttatataatcagaggcggcgcctacgatcagcgccgtgaacaaaaagcccacgatatagccgcccgtcggcaaaacgagcttggcgaccccgcccgtaaatcccgtaaatacgggaacgccgcaaagccccagcaatatgtagaccgccgtcgcgatcgcgccccgcttccaacccaaaagagccgccgccaggcatacgcccatcgtttgcagcgtgatcggaatttctccgatcggtatcgatatccacgcgcataccgttataatcgctacgaacatcgccgtataacagatttcccttgcggcgcttttcgccattctcttccctcgggccgccttttccttcgtctgctctttttcttccattttttctttttcccttaattaatgtaaacctaattttatatcaatggtttacatttgtcaagcgaaacggggcaaagaatcaaaaaatcccgcaggatgcgaggattttttcgcggcagcgatgctcgaaactatgcagaaaagcgcgtttttgtccttgaaacgcgcgcaatcggaaaaggcgcgccgtttggcacgccttttttgcataaaaatttccgattatcccgaacttttcgcgtccgtcccttgccgcttagagaagctccatacaagaagggcgccgtttccgtcgcaatcacgcgagatattttttcaaatcctccgcgcgatcggtgcgctcccaaggaaagccgtcccgtccgaaatgaccgtaagaggaggtcttcgagtaaatgggatttctcaatcccagcgagcggataatggcgtaagggcgcaggtcgaattcctttttgacgatgtctgcgagttgatcgtccgcgagcctgcccgtgccgaaactgtccacgaacacggaaacgggattcgccacgccgatcgcgtaggcgacctgtatctcgatttcgtccgcaagtccggccgccaccatattcttggcaatataacggataaaataagccgcgcttctgtccactttggtgcagtccttgcccgagaatgcgccgccgccgtgcgcgcatctgccgccgtaagtatcgacgatgatcttgcgtcccgtcaagcccgaatcgccctgcggtccgccgatttcgaatctgcccgtcggattgatgtaaaatttcgtattttcgtccagaaattccgcgggaatcacctcgtctatcacatatttcttgacgtccgcacgaagctgctcctgcgagatcattttatcgtgctgggaagaaaccaccaccgcgtccacgcgcaccgcgcgcttatcgtcgtattccaccgtcacctgtgtctttccgtccggccgcagatagggcaaaagaccgctctttctcacccgcgtgaggcgcatcgcgagtttatgagagagcaaaatgggcagaggcatcaattcctccgtttcgcggcaggcatacccgaacatcattccctgatctcccgcgcccagcgcgtcctcttcgctgcccgctccctttgtcttcttttcgatagaggcgttgacgcccatcgcaatatcgggcgactgctcgtggatcgctacgacgatcttgcatctgtcgtacgcaaaagagccgaaatcatagccgatgcgcttgatgattgcccttgccgtttcttcgtaatccactttcgccgtcgtggtcacttcgcccatgatgaggagctgatcgtacgccgcgcagcattctatcgccgtacgcgccatcgggtcctccgccaaaatcgcgtcgagaatcccgtccgaaatctgatcgcagaccttatcgggatgcccctccgtgacgctttcgctggtaaaaaactttttcatgtaaaaaatcctctttttaacatagttagtttgcgggcggctgggatttgcccgcaaattttctccgcggaaacgaacttgtcccttcggagattttatatattatactctcttcccgctcttttgtcaacttattcgtatgcggctttgcgctttatgccgcattgcgcttgcaaattttcggcgcccgtgttataatgaatgatatggacaaacggattgccgaaagagaaaatttattgaaaagctgtcgtttatgccccgtggaatgcggcgcggataggctgtcgggcaaagcgggcgcctgcggcgtttccgcgttaaagatcgccaaatattacctgcaccctttcgaggaaccttgtatttcctttcgcaaaggaagcggaacgatttttttctgcggctgcaatctccgctgcgtcttttgccaaaactacgaagtttcccgcgcccggcgcggacaaaccgtcactcccgcgcggctcgcggacattttcaaagaattggaagaccgcggcgcggagaatatttccctcgtgacgccctctcacgtcgtcccttacctgctgcctgcctttgaactttataagccgaaaatccccgtcgtttacaattcgagcggctacgaaaaagtcgatactttaaagcttatcgacgattttgtggatatttatctgcccgatatgaaattcgtatcctctattttgtccaaacgatatacggggcgggaagattatttcgagcgggcaagcgaagcgatctcttttatggcaaaaaagcctctccgcatggacggagagggaaaaatgctgtcggggatcatcgtgcggcatctccttatgccgctgggcgttgccgattctttcgaagttttgaaatggtttaaacgggaaatgcccgctacggcgtatttgagcttaatgagccaatacacccccttcggggaaacggagaaatttcccgaactccgccgccccgtgaccgcgcgggaatacgagagcgttttgaacgaagcgtttgcgctgggcatagaaaacctgtttctccaaaagcgttcctcgtcgggagaaaaatatatcccgaaatgggatttttaagttttctcctttgaaacggtttcattcgagcctgtttcaaagggaacaaaacgcgcccttacgggaaacctacggcgcggcggggagaaagaacggaagatacgccttgtccgccgagaaaatgcgaagcgtcacgcatcgtcgtcgcggtgaaacgccgcggcttttagacggacgatctcacgggtgagttttgcggcgcggtcgggatcggcggcggcaagctccgtttccaaaaggcggattttttccaattgaggattatatttcatatttctattttgcgcaaaaaagcgcgctttttacctgacgggaggataaaatcatgttagtttctgccgaaaatctatccttcggctttgcgggggcgtcccttctcgaaaatatttcgttcacactgtccgagggggacagggtaggacttatcggcgcgaacggcgagggaaaaaccaccctcatccgcctgatattgtccgaattggagcctgaaagcggctatattttcaaaaagaacggcattcggatcggatacctcgcacaaaacggcggttacgattcggacaataccgttttcgaggagatgaaagacattttcgccgcggacatacgcgccatcgagtcgcttcgggaggtggaaaaaagcatttcgctcgtcaaggaaggctcgcaggaataccgcgccctggcgggaaaatacgaaactttaaacaggcagatcgccgcgcgcgacagctaccattacgagatccgcatccgcaccgttttgaacggcatgggattcggggaattttacggacagcgcatttccaccatgtccggcggagaaaagacgcgcctgaaactctgtcggctgcttctcgaagagcccgaactgctcattctcgacgaaccgaccaaccatctcgacatcaaaacgctgttctggctggaagactatctcaccgcgtacaagggcgccattctgaccgtttcccacgacaggtattttctcgacaaaatcgttcgcgagatatacgagctggaaaacaaacggctttgcgccttcaagggaaattatacgaaatacaagcttttaaaagccgaaaagaacgcgcggattttaaaggaatacgaaaagcagcaggaagaaatcgcgcacttacaggaatacgtggataagaacctcgtgcgcgccaccacggcgaaatccgctctgagccgcgtgaaaaagctggaaaagatggaactcatcgaaaagccgaaactgccgccttcgccgcctcgttttttcttttcctatgccgaaaaaccgtatgaaaaagtgctggacgtcgccgcgctcgaccttttcgcaggtgaaaaacagcttttaaaaggcgcttccttcaccgtgatgcggggagaaaaatgcgccgtcgtcggcgacaacggcacaggcaaatccaccctcgtcaaagagatcgtccgcggaaaaaatcccgccgtaaaactgggcagattcgtaaaagtcgcctgttacgatcaggaaaacgccaatctgaatcccgaaaacaccgttctcagcgaactttgggagcggcacgtgttatgggatcagactcgggtgagaaatattctggcgcaggcaaaactcgatgcggaggacatggataaaagagtgcggatgctgtcgggcggagagagggcaaagcttgccctcgccgttttcgagtgcgaaaacggaaattttctcattctcgacgagccgaccaaccatctcgacctgcccgcgagagaaagtctggaagaagccttaaaacagttcgacggcagcgttttgttcgtatcgcacgaccgatatttcattcaggcgctggccggaaaaatcgtggagctttctaacggatccgtcaccgaattcaaaggcggctatgaggaatataatgcctataaaaccgccttgaaagaagccgcggaaaaggcggaaagcgcaagccgctcccctgcccccgccaagcagaaggaagcgggttaccgcaccaaggaggaacgcgccgccgaaacaaaaaaacggctgcggatcaaagagatcgaagaaacgatttccgctctggaatccgaggaaaacgatatcaacgagcagttgacctctcccgaagtcacggggaattacacccttttgagcgagaaatgcaagaggctggaagaggtaaaaaacgccttggacgaactatattccgaatacgaaaccttaatctgaaccaaaagactcccgcgagcttattccccgcgggagttctttacccttttttaagtccgcgccgctttaaagagattgcaagacttctttttatactcgcaccttattgaacacgtgtaagggaacggcaattcaaagaaaggttatatgcaggacgagtccgacggcgacggaagcggcgatcatcacccaatagcgccaattgaagagaattttacgggtgtagacgatcgtcataataacggcgcctatggcgataacgcagatataaagtggcagcatatccaaagaataggaaatacaggtaaaaaacgcaacgatgtataagggaatcattacgcgataaccgaaccaggaatcggaattttgctccgcattctccgccttttcccgcctcaataataggaacatgagcgcataactcgccgcagcgagcaaaatcggatagagaaatatagtcggctcccagatgacatcggaagtcggcatccagctggcactcggggccccgacgttcgttttgattgtcccttcctgtatcagagtcgctatattcgtttcgaacgccatcaatccgccgaacgagaagaagtgagagagggcaagatcgctcctgtgaccgctgagagaatagtatatttcccctcctcccgccacaataaggaatccgatgaaggtgtacgccagcatgaacacgacgccgtctacgacgcgattggcacgggtgaatgcaaacgcataaagtccgtacaggcacacgccgaagagaagtccgccgaagtatccggggatataatatatcaagtgaaaataattctcccgcaaagcgatcgtcaaaaatcccagccaataggcgatcgtatagggtatcagaacgagaagcagccccatcagggttttgacgagatacatcttttccttttttatcggcagggaatagaaagcgtctacgctgcgcttattcatcttaaaggagtacatgagcacgggaacaaccgcgcagaaaattccgagaatcgtatagataagactgatctgaggatcttgattgaaaatcccgtatgttcccgtagaaaacagtttcgaggtggaaacggtcacgacataaacaatcacggcgatcgccgtcaggacgacgagcgtccagaaattctttttcagttcatatttcagatagcgaatcatttaaggtaccccctgctttccacttcacacgcaaacaattcctcgaagtcgacggggatctcttcgacgaacaacggtcggagagcgttcagacagcggagaatctccccggcgtcccccttcgccacgatcttgacaacccgacccgttttgctgaacgacatgggcttgaagcccagcatactttcgtcgatctcaccctcgaacgcagcctggaatttatggactttttcgaggtcgctttcgagatcgcccgaacaggtgatcgtcttatgatccaaaagtccgtagctgtcagagatgtcctccaattctcgcagagaatggctggaaatgatgacggcgctcttcttctcctccaccagctcgataagtccgcgcttgaacaccatgcgcgcgagcgggtcaagcccgtcgaacgcttcgtccaaaagcagatatttgggtctgaccgccagagccaaagacacgaatacctgacgcttcatgccctttgaaaaattgcggatgggcgctttttcgctgagtttaaatttgtcgagatactgcgcgtatgtttcctcgttaaaatcgtaaaaggtcttatagagttccgccaggcccttgctgttgatattgggcgtataatagggatcgtcgggcaaaaagaacatcttgcctttcgctttctcgttttcgtatacaagttctccgtctacgaaaatttccccttcgttcggcttcaatacgcccgagatcagtcttaacagcgtcgattttcccgcgccgttgatgcctaccaatccgaatacagagccttcggatacggtcagattcactttttccaacaccgacgttttcccgtaacttttgctgagattcttaatttctatcattgcgattttctatcctcccctcttgcggcgccgcgttttttgccgctatccttgaaagttttaaaattctgacgacgattcggcatacacctcgtccgccgccctctctatttccgcgcgcgtcacgcccgaagtcttgaaaagaataagctgtttttttacctcttccagtcgctttttctcgtcggcatccgcgtaatcggcataggcgccctttttgggcaggatacggatatacccctctttttccagcgccgaatacgctttttccaccgtgttgggattgatcccacgctccaaagcgagcgcccggcaggaaggcagtttttctccgtatacgatcgcgccgagttccatcagctttttatactcggcaacgatgctttgatatacgttcaatttccccttcgagcgcgtttccatagccttttcctttcttcgttttttaataataccgtcacaatctgtattatctgtattaaatatagcacaacaatatgcgtttgtcaagagattttcgaaatttttttcgttttgcgcgcacaggcaaaaagcgaaccttgtccttgccttgcggcgtttcgtaggcgcggaaacttttacgttttttcgccgggtaggaaggcggcgcgcttaaaaaatatgttttcagagaaaaagaataccgccgtggttgtatataaaaagccccgagaatgcggggctttcggaaaacgattttcattgaggaagagtaggcgcgattttctttttccgtttccatttttcgggcggagggaaatattcgaaaaagcgcatcgtctgccagatgaccgcggcgaacgtaaacagcggggaaaggcaccacgcgacgggatgcgtccttaaaagaaaacgcacatacatcatccagacgcccgtttccaaagcgatgtaagccgtaagggaatttttgtcttccctgattgcaaaatagacaaacgaaaaaatttccgcgagatagaaaaatctatccagcattttcggcatgaaaaatacggaaacgagcggcaaaaacacgcagagaaacactattttttcccgggaaagaacaaaacgggaagatttcagcgcgtgcacgacgacaaaggtatccacggctgcggtgacgaggagaaaaaacgccagaatgacgtagtacaccgcccagtctttgggaacgccgatgaacgggagcaaaagattcggacaatgtccgttgaggtccttcgcgccgtttcccgccgtcatctgagtgaaaaagacctcgatgctcttaaaaaagcttccgccgaagaatacggggatgccgctgacgacaaaaaagacgagcggggcgatccaaatgtcccgccagcgcagatattttcccccgtcttcgtctttcacgagaagcaggatcagacagacgggatagaggaggatcacctgcatcttaaacgcaagccccagccccatgagggcgcagcacaaaagggacttgcggcaaagcgcaaaataaattcccgcgactgcgcacatgacgtacagcgtgtcgcactgcccccattggctggaattggtcatatacacgggcagcagcaagaggattcccagccacagccaatggaagggctcccttttcacggcggcgacgatctttacggcaaacaccgcggtgacgacttccccgtagaaagacagcgtcttgatgagatagagatcgctgacgggcaggcgggaaaagagaatgagaaaataattataaaggggcggataattgcccacctgctttgtaaaacattcccccagcggcatttggcggtactcttccacccatttcgagagaaattccgtatagtctatgctcttaaaatcggcaaaaccgatcctgacgacgtaagacaaggcgaacatgagcaagacgggcgcggcttttcgcagagattttttcgccgctaacacggaaaacaacagaaacggaagcgccgtggcaatatagataaacgccgcgcttgccgcgtccgaagttttcgccgcaggaaagcgcagccgcgtcagattgtaaacgccgagtatccccatggcggacaggcataccgcgcagaggatcagccgtatgacgttgagtttcttctctttttccgttaatactctcattcggattcctttccgtttcagactttttaagaccgctaaaaatttttccgaccctctttatttttcgttctcttccgatttcagagataacatctcgatggaatccagcaccgtcctttccgaaaaagtgttatagggataatttttttcgcccgcagtcgttttgtttaaaaaggcatgatattcgtataacttacgaatatcctctttcgttccgagtttccctaaaagataggcggcatatacgcccgaatccatccatgcgggatccaaaatcagatttttgcgcgcaattgccaataaattttcgtatttcttttcgtagagtaccgtcatggcgataaaacgatcaaaatcttctccgctttcggcttgcgcaaggtatttttcaaagtttgccgtcctgtgaaaataattttcctcgccctcccctatgcgtattttggactcttttgaggaaaaataatggctgtccatgggaatagaggcggttgtgccgatttcttcgcggcggcgataattgatcctgccgattttctttctgatcttaaagcttttaaatacgacgtcgcaaaatccgtccgcaaactgcatacgcagatgatacaggggcgcggacgtccaggtctgcataattctaaggcacgcgctgtctttaaaacgcccgttgatatattccgtccaatccaccgcgctttgcagagaaaaatgaaaaacgttttcgaaatataaataatagacgaatttatcttcattctttattaaatattctctcttttccgcctctgtgccctttatccttgcataagcctcctcttgatccagacacgaaaccaaagtaatgcgcaacacgcctttttcctgaaaagcgatcgatcggacagcgctgtcatgaaaatagtcgtcccataaaaacttacgcatcgctttgtccttaggcatctctatttcgtggtcataattatacatattcgttttcccccaaaattcctttcttttcttccgctcaaagttttgtaccttaggagtattttaccatatcccgcgctctaaaagcaagtaaaaaattcctatccgtttaaagatttcgccaagcggctcttaaacagaaaaaggcggcgcgcggacggataaaaagcagccgaacgttatgccccgagcggcgcgagagattttttgccttttcttaccgcgagagtcttcatttcgctctctttcggtttatagccgcaaacagcaaaaacggacagccgcaaaagaccgcccgtttttcgttatgttaaattttcgggagttgtcggaaatttcctgcccgcggcgcctgtcatctttccgcgaaaattcaagcccgcgaaaaccacgttgtatttttccgataaaacggcgctttttaaaccgcgcaaaagacttttctatctttccttgcgctctttggaactttcggtcaaaagcgtctgaatggaatgcgcgggaagcgtaagccgcgcgggatttccgtttacgacgaggttgatctcctgctcaccctcctcgttttgaattgcgcagacgagagtcccgttcggatttttataggcgacggcgtacagtttcttgtccgtatccgtttcacagaaaatccgcttcgcgcccttttctataaatctcgaaaagtgaccgatatagtaatagctcggttgatagagaacttcgccctttttccgatgatacatcacgggggcttcgcagtagttgcccacatgattcggcccgccctgctcgtcgagagcaagattccaatcgatccagccttcgctgccgtgattgaaatcgcgtatgatctggcgcccgtatctctccgcgtgggtccagtcgccgatctcttccccgcccagctccaccgagcactcgctgagaaaaatatgcttttcgggatacaaggcgtgcaggagggaaagattttcgctgcgctccgaacaataccaatgataggcgatcccccaaaccgcggaccgcacctcttcgtcggcaaattctttcaggcacctgtttaccacgatgtcgcggttatggtccaccaccgcgattttcgcggctattcccgctctttcgaacgctttatggagcactttgacgaacgccgcctcttcctccgccgtatacacgcacgattcccatacctgtacggcttccgtttcgttctgtacgctcacgacgtctattttcaggccgcgctttttcatttccaaaatatattttacgaagtagtccgcccaaatggaataacaatccctcttcaattttccgccgtgcagcatactgccgttttccttcatccaggcgggcggactccacggggacgccatcaaaaataactccccgcattctttcttgcaatcctttatgagcggaacgaggagcgcgtcgtcgtgcgagagatcgaaagacgcaagttccctgtcgttttcccgcgcatacgtccaaagtcccgtgctgaaatcgcagctatgaataggcacgcgcccgaggcgatagcgcagtccctcttttccgaaacaggcgcggatcacctcctcccgctttgcgcccgcctcccgaagcgtcagcgccgccgcttccgtaaacgccgcgccgaatcccatgtgcgtctgataggtcttcgtttcgtccactatgaccagcggaatgccgctctttatgcctcccgcaaagacaaactccctttcctgccattttccgccctctcgggaagtcgtgatcaatttcatatctttttctcctcttaataaaagctcttattttgcaaggaatcgagtaaaccctttttatataactcttatgaccatgtattgtcggcggtcgagtccacttttcccaagaaatttttaaataaaaaaggcttgccgaaagaaattccggcaagttttcttccgttcgattttccgttgcgatatggaatttatttaaacggaagtcatctgattttttctgtttttccgtaaaataaagcagccgtcccgcaccgaatattttttgcgcccgatttttaactccacgcttacgccttccgcgcgggcgggcaaaaggacgcaaacgcgggagagcgcgccgtcggcaaattcctcttccacttctatttcctgtccgaaaaggcgcacctttccgcggcagctttgaacgcccgcataacgggggcagatcaacacccgcttttccgcgggaatcggatggattcccaaaaaggaaacaaagaggtgcttgacaggagcggaaaacatcggatgattgtgagaaaccgcgtcatctccccgccaagtttcccaaaacgtcgtggcgccccgttcgcgcatatagccataagaagggtactccctatccgtaaacagcttgaaaataacgtcttcccgcttcctttccgccaaaaaatcgaataagagctctgtgccgaaaatgcccgtatcgacgggatgcgtccgatagtatctctcggcgcggcgctttgccttctcgctgcccagccccgcggcgaacgcaaacaaatccgcgccctgttttccgccgccgaagcagtccttagccgcgtcgtaatagcgggtcaggattccctcccgacaagcgcggcgggcgtcggaaaagagaaattcgcgttttaaaagcatacagagcgcctcgaaaaaatcgagtatgcgcacgaaaaggcaggtgttgacaaagggttcctccaagcagagcttcgcgggcgcgcaccattctcccaggcaccaacctccctctcgttcgctgcaaatcaacccgttttcgagtgcggagagagtgaagcggcaccagctttccatcgcggaaaaagcctcctgcgccgcggaaagattccccgtcatcaaatagagcttatagggcaacagcacgaccgctccgccccagcccgcaggtccgccgcccccgccctcgaaaggggcggtatgctgaatatgtccgtccgcttcctgaccgtcgagaatatccccgagccattttaagtatactttttcggcgtcgaagagccagagcgccgtttccgcggcgagctgaccgtccgccgtatagcccaatctttcgcggtgaggacaatcggacgggacacccccgtgaacgttcgaacgaatggtacgcgacgccgtttcgtacagccagttcagcatgggctcgctgctctcgaaacgcccgatcaacgggagcctcgtggcgatatattccgctctgacgtccttcgcctgcgccccgccttctatctgcgcgtagcggaagccgtgccaggtgaaggaggtggtgagagtctgtcccctcgccacgtttaaaaattcgtccttttggatcagggaagtgcccaaagccgccgtcgaaaaatccaaagttccgtcgggatacaactcctcggcgtagcggacgaagaccctttcacagtcgcggtcggcaacgaattgcaagcgtcctgcgccgtttagacccgcgtcgtaaatcccgttccccatcggcttacacgggcgcgtatcgtaaatttcatcgggcggacacgtctgcaacagcaggcgtgcggagggcgcgggaatctcctccgcccgttcctctttctccgtccgaaagcgcatatcccggatttcgcccgcatagagattgttttccctgataaaactgtcccgatagacgagcgtgccgtcggaaaacactttttcgccattcgaaagcgtcaattcgaaaaggagcttcaaagaatcggaataggaggtatccccctcgcagcggcggacgcgctggcgataccacccgttgccgagaaggattttcagttcattttcgccgtcgcggacgtattctcccacttcgaaaacgttgtagtagatgcgatgcgaaaaagtgcccgtcacgggatagaggagagtctttaaattccgttcgtgatagtcggactgcgcgggttgaaaaaactccccttcgttgacgcggacgccgttgagatagacctcgtaccagcccagaccgcagacggcaagagtcgcgcttcccgcttttcccgtaaattttttgataatcagcggcgcttcgaaaaagggatacgccgtccatttggctttttcaaacatgatgacttgatccgcagatttttaatttaccgcttccctgcccctttattttttctttttcaatacaaagaacgcgagcgccgccgcgggaagaatcgccgcgcccgccaccgaaccgcagcccgaacagcccgcgtttccgccttgggaattttccgaagtctgcgtttcggacgaggaattcccgccggaggaatcgtcgggaggaagcggctccgcctgcgcctgatatgccgcatagatctccatttcccccgaaacggattttgcccagggcgtgacggaaaagtacacggcggaagtatcggtgaggtgctcgcttccgtaaacggcggaggaaggaatagagaacgctgcttcttcaaagccgtaaacggcaatccgcaattcgaattcctcccctttcttcaccgtcttcaattggaagggacgcctcaccgcgttgtcgtatttcaagcagtttgcagagcctaagagagagctttgctttccgttcgccaaatagagcttgccttcctcgaaatcgatatatacgagcagattctcgttttccgtgtatttatctttgggagcggaagagaacataaagccgagtatcttggaatccccttcgaattccagtccgccgaaacagagcgtgagtccgtccatatcgaaagtgcggtcgacgccgaccgcgttattcatcgtggcgcccgtccagctcacccgcacgccgcaaaagtcggaatcttcgagctttcccctcgtcgaagaagggatgagagtataatacgaatcctttttcaaggcgttgtttttgatctcgtccgaaacgcaccaagtccgataatatttgttctccgccgcttgcaggacggaatatttggaaacgcgcgccctgcgggaatagctcatcgcgttgtattcctttctcagcgcgaaaatctgctcgtacgaatcctgcgtgacctcgcccagcgcttccagcttctcatcgaactccgccgccgcggcgatgtccttttccgtaggatcctcgaaagttttggaaaacgcggggctctccgcgccccagcaatctttggcgacgatttccaccgtgcacggatacgtaagcgtaagacccgtgaaggtataggaaagagtgtcgggaatctcacgaagatcgggatagtctatccagggcgaaagggtggatacagagcttaaagcggtgccgcccgcatttttcagcgtgatcgtatagctgtataccatgtcgtcgtcgaacgctttggaatagtctatcctcgccttatccgtgcccgaggggacaagttccatggaggcggcagagccgaagaaaggggcgtggtttttatccgcgcgcgccgccgtataataagcgaggtgggatttatccgctttgggagcggggactatccacacgtcctttatctgttttctcttgacgaaatcgatgcgggtgatgcgcacgttgtcgttttcgtccacttcgacgattgtgccctgggaacgcgagcgggcgtcgggcatattgccgctcgccgtttccaccgtatctttattcgccgcaacgtcggacgagccgccgggcgtaaagctcgtatagcccgtctgcatgatcgacaattcgttgttattggcgtaatgggtgtggccgctgattaaaaacgcctgcggatagttgttgagaatggcgtcgaaatccttggacgcgccccagatacccgtttcgtcgctttcatagctgccgtatatcgtattcatctgcggggaatggcaggagatgaaaatgggcttttccggcgcttctttgtcgattttggcgagagtcgtcctcagccaggcgctcgtttccgacgaaagattgttataattgggcataaacgtctgaatctgcaccgtcaggaaatgatagccgttaaagacgatgtgacggtttccctttttggcgctctctttatccacatcgaaagtatacatatcctccccgaaagcgtcgtaaaattcctccgttgtcatgcagcccgaccaatacgtatcgtgattgccgtgcgcgacgacggcgggaacctgcgtcaaatcgtaatgtttgcgcaacacgcccatgaacgtatctacctgcgcttttttcccgtcttgcgtgttgtcgcccgcggagagaaatacgtcgatgccctggggcgcaaactcgctcagtacttcgagcgtattgtcgaaaatttcctcattccttccatacccgatatgcgggtcggtaatcgcggctagggtgagggcaatatgtttctcatcgaatacctgccccgtgctttcttccgcaaaagtcactgcggtctgcccttttatttccgtattcccgagttgaagccccgccgcaagcagagccgcggcggaaaggcagccgacgagagtccttagtctttttcccctcatgaatagttcctccttcgacctatctttattgtttgttctgcgggggcagcgtttgcgccttttcccgccacacgatcccgagattgccgattttcgcggcaatattgtatgtccccgtcacttcgaagccgaggtttgtggagccgatatagagatcctcaaagcgggtggagccgagaaagtttctctccacggcgagttcatacgccgaccgcgcctcttccacgatatcaaaacggacctctttttcctctcccgccgacggcacgcggccgtcatctgcccaaacggccgaggagggctgataaataaacgcgcccgtgttctgctccttgccgccgtcctgcgccgcgaagccgtcgctgacgctgcccgccatgcggttgtcaaacaagttcaagccaaaccacacgtatttgccgaaatccgcgctgtccgcgttcctgttctgcaaggtgacgtaccagacgaactgggcgcagtgcagggcggggttgggcgcggagtaggatttgtcctctatcttcgtcacttcgtaatccatgcgcaaaacgagcgactgcatatccgcaatacgcaagagttcctctcccgcccaatcctgcccgatgagcagatgcggccactgttcgccgttcaaacggtccctttcgtattccgtttccgcattgagttccagcgagatgtttcccgtgcgggtgttgacgtccacccgcttggcgggaggagaggtttcgccgcatacaaaactcacttctccgaacgccgccgtgcgctgcgcgccgataatgtcgtatttgctcgcccactgcgccaaggtccaatcgggctgcacgttcgaaagagaagtttcgaggggaagggcgtgaaagtcccccacgccttccgtcgtcttatagacgcgaaagcctttttcaaaagaagtgtctttcaaatagttgttttcttcgggaagttcggcttctccggcggaagaccccgaagcgacgctttccgaagaagaggcgtttgcggcgcccgaatcgtccgagccgcccgcgaaacagccgcagagcaaaaccgccgccaaagccgcggacaacagcagcgaagccttttttatccgcgcgctcatgactccaccaaagcggaaaggagattcatcgcgtagacgcgcgccataaagtcgttgggatgattgacgttattgcccgtgatgtccatatatttcttgccgctgtccaaaatgtcctgatgcatggcgccgacgtccacgcaggcgacgtgctcgtaaagctgcgcgattttgacgttcagcgcggaatactccttctgattcttgctctgatcctttgcctgaggattggcgagcatggtgccgaggagaatgatatcgcagtcggcgttgcgcgcgcggatacagtcgatcatttttttgatattattggcgtaagcgttgagtccgatatttaaagtggcgtcgttcatgccgaagccgatgatcgccagatcgggggaatagtccgaaagctccgtggcgagaagcttgggaagccccgtctgtttgacgagctgccctttgacccagccctcgttttccgcgtcgctgactccctgcgcgctcgtccatccgcccatcgatttattggtgagaaatacctcggcgccgtaacgtcgggcgagatttttgctcatcagttcataccagggttgcagattcggcgcgatgccgagaatactgctggaattggagcctgtggaaatgctgtccccgaagacgagaatttccgttttttccttccgtttcaatttcgaaacgacgcgggaaagcgtttcgccctgataggcgggaacggatttcgtccacttctccgtatggcggtaggtgacggaaatctgcatctgcacgatttgatagctttccgtatagggaatctgccaatccccttcggacgagggaatccccgtattcgtcgtcccgcagccgggaaagacgtccagacctttccattgacggtcggtgatatacggcatagaggtttccaccgaggtctttttgccctcgatgtcctctttcaacgtccccttggcggtgatcgtaccgtcggcgtactcgtaatccacgccctgtttaaaggaaacgacgcccgcgttgtcggcatggaaatattgcttgacttcgagtatttcgtccgctttaaagagcaggttgcccgcgggaagggaaacgatctccccgccttcgtccgtttccgccaccaagatcaccgtttcgtcgtacatgacgtccgaatcccaaaaatttttcaccagagtatccgccttttcggtcgtttcttccgacgaggacggaacgcctccgctttccttcccgtccgtattttctccgccgcaggcgccgagcgccgccaggacgaacgcggcggcaacgcacaccgcgcttctttgaaaaagtttcatgattttcctccccgaccgaagccgcatattttttcttttttccctttcagcaaaaactcttcgccgtcgaagcggacggggaaaggcgagcctttcaaaagcgccagggaaaacttttccccttccgcagtcaagccgacgagccgcccccgataaaaagtccgcatctctatctttttccaaaaaggcatgggattgggacgaagttccagacactctttccgcgcgcggacgccgaatatcccgcgaagcacggagagatagccccccgcaaggcagccgctgtgcacgccctgccaccctacgccgtgaatgtcgtccacgtcgatctttaaggtcttcatgaaatactcgtaaaaggatagcattctgccgttatccgccgccgcgatggcgtggacgggaaaggtcagagaagagctggtttcgcacattcgttcataatagtcccaattgacggcgtagccgttctcttccagtcccacgtccgccagcgtatagagcagcatgacgtccggctgtttgatgacctgactcttgtgatacagtccgctctttttcatctgaaactgttttaaggagccgccgcccgcctcttccagcgtccgcgaaagggaaaagtaaccgtcgaactgaggaatcaggccgcacctcgattgaggcagatacagtttttccgcgatctcgcaaaagaggctcttttcttccttttccaaagggtacgaaagctcctctgcgagaaagagaaattccttgaagagatactgcacgcagtaattggtgtaggcgtcgttgtccacgtaagggtgatgttcgtccgtgcccgtcacccgcaaaatttcataacggtcgtttttcttcgtcacacgactcgtccaaaagcgcaggcattcgagcatcatttccattccgcagtcccttaaaaaacgctcgtcgcccgtagcgaaatagtaatgcagaacgcccatcggcacatcggaattgatatgtacctgcataaagggatggcgcacgtatttccacacccgttcgtcgccctcgacggaggaacagaacgcgtattttgcccccttcattcccgcggcggcggcgttttcccgggacttcggaagcatccgatagcgatacatcaacagattttttgccgttgcgggcgccgcggcgaggaaaaagggaagctggtggatctccgaatcccaccagacgaactgattatacctctcccccgtaagccccttggcggaaatgccgtgcacgctgtcgtgcataggcgcggaaatcgccgtatgataggaagcaaaacgcagatatccgtccgcctcgtcgtccccttcgatgcggatatccatcggttcgaaatacgcccgatacgccctttcgtgcgccgacaagcgttcggcaaaggaaaaatcgagagaagcgcagctttttgaaacgaacgaatgcaaaggctcttcgcaatcccgctgcgtcgccacgaaagtgaatttttccaaagtgtagctttccgcttgtttcgcggcgcagcggattccgacgacgccgttttcctcataggggaaaagttctccgtcggggaagttgtttttgacgaaatattccgccgcaaatttgtatttgttgagggcatggaagcgatgaattatgctatctccctcgattttcgtttcgtccgacgcggtgacgatctgcccgcccgtcttgcggagagtatccaccgcggagatcagttccaccggctcggaatgattcaagggagtcgccgtcacgcgctgacaatagagatgctgagtttcgaaggaggcgaatctgacgaattcgagccgcgtctttcttcccctttcgtcttcccagaccgcgcggcgggtatagacgccgcgcgagggatcgagaaaacgcgtccaggaaagaagtttcccttcccacggatagaagatgcagccgcccacaacgattttcaccgtgagaaagtcgtgcatattcacgcaggaatcctgtttttcaaagcttttcagcgcttcttcgtcgagatagtatttcttcatgtactcgttattggcaaacggctcgcagacctctatgatctcgtcgatatagccgcggacaaaagcgccctgcacgcgcagggaaccgaactcctcgaagctgccgcgcacgcccatatacccgtttcccgtcgtgaacagagccgccagcaacggctctttatccacgtcgtactcccattcgcagaaatttttgtctttatccaatccgaacatatctttgattcctttccaggaagcaggatacggaaaacagatttcgtttcccatatccgttgtttcccgattttacagtgaggagcaacaaaaacgcgtcgcgcccgtttttcctcctttattgtcccgagcaagcaaaggacccggttagtccttctttctctttttgcccgtcaggatcatggaaaccgccgcgccgacagccgcgatacccgcgatgccgcccgtcatgatgctgccgcagccgttgcagccgccgcgcggagccgaagagccgccctgactgctgttttccgaagaagacgtttcttcgccggaggaagaagaggaagaagtggaagaatccggaccgggcgcgggcggttgtttggcaaatttcgtatcgttgacgctcaggagcgtgaagcagttgggatccgccgtatagtccgcgaacgaaccgaaggagaaatagcattcgtcagaaatctccatgccgttcgactccgcgagcgcgtcggcaaggacgatctcctgaccgttgatagtgatgatatacgccttatagctttctcccgccgcaaagtcctcgtacattccgtgaaccaccgaaatggtgagtttgccgccgttgatgggggtggaaaggacgccgtgcgccacgctctgatcccgcgcgttgacgatatccacggaggattcctgttcgaacagccaaatgatgatgttcagtcccgaagccatggatttatacgaatcgggagcggaaaggaagttgatggaaatgttgtttgcgcccttggacgcgcccgactccgtcttatcgccgttgtagtacgcgatattcgtaaactctatttccgcggtgatccccgtcgccatgttgagtttttcgttataattgatgcgcgcggggaatttcgcggtcatctcgaaatatacgcccgtgtcgttctgctccacggtggaaagccccgtctgcgagaagttataccacaagtttgcctgtaatttctcggtgagcgcttcgtgcgcctccacgatcttcgtataatcttcccgctcctcgtccaataagtcgagcacgatttggttatacgccgatctcacttgcaggaaggaatcgagcgtaggaaattctccgtccaaactttgggaaagatcggtgatcgcccccgaaacaaaatcttccaaagccttatacagcgtttccaccgccgtcgtgtagcgcgtatagagcgccccgtccgcctctacgatggcgacgttttctttgaggttatccaaaacggcgaacgccgattgaatattggcatacgaagtgaccaaatccttttcgagagccgtttcgagagccgtaaggtaagactctttcaccgccgaggaagcggcttcttccgccgccgcaagagccgtgtccgccgccgcgatgcgggcgcttatcgccgccttatccgtttcgttcataccgttgatcagcgtttcggtggaacttcccgccagggcgttcttcatcgccttcaccgccgcgatgtcgtcgccgaccgtcgccgcttcggggtcgattgcggccaccgctttttcgtagcctaccacccattgaagcgccttataataatttttggtgtagtcgagttcggcaaacgcttcgtcgagttccgtctgcgctgcctcgtccagcatggattttctgtcctcgtactccgtctttgccgtttggatcaaagtcacagccgcctgatacgcttcgttcgtcaaattgctttccgtcttgaacgcgtcgaaagccgccgtcgccgcgtcgattttatcctgcaccgcctttttcacgacggcgacgatctcgggatcggcggccagagcctcgtcgacagccgtgatcgcttccgtctgttccgctttttctctcgcgcgaagcgcatttgccgcggtcagcgcttcttctctaagcgccatcgccgcgtcgtaatcgtccgtcgtcgcgatggcttccgcggcagtcttgtacgccgcgactttttccttgacgggggcgacggaagtcgtctgatattcccggctcaaatcgtcctcgacctttacgttgacgctgacggcgggatcatcctcgctggggaaacccgcaaacgttatatgcgtatagccgttggcgtcgagcagaggcgccatcgtttcctttttgagatacacggtgctcgtcttcgtttccgcgtcgtaattcgcgttgttcgtccacatttcgccatgcgtcatcgccaccgtgaccgaatagagcgtttcgttatactcttcaaacgttatggaatatcccattctttccacggcggtggaaacgtgggagcccgctacgccgaagcccgccgtcgtgcattcgggcgtcgtatagaccagggcggctccgttataatcgtggttagcgccgaaaaccagacggctctgattgctgtacagcttccaattcgtcaccgcaagtccgccgggaaatacgctgccgcccagaaactcggtgccgaaaaagaatcctacgcagtcgctcgaactcccgttgggaagtatggcggaatcgaaactgaccgtaagcccgtcgaattttacaggttcgctcaggtacgcgcagtagccccagcttcccagtcccgaaacggtggaatagccgttttcggcgtatgtgacggtgactttatttgtcgaaacctgataccccgtatccgtctgtcctacgacgtccgcgtttgcctttaccagagagccgccgatgccgacggtgagagc

SEQ ID NO: 4242 - DNA, 32759 bp, Unknown
  16S sequences of unknown bacteria
tagcctcaccacccgatcccactatatacaggaaggggctgcggccccagggcttagggtcgctgtcttttttcggccccgcgcccaatcgagccccgggggccccgggccccaagaatttggggtggtttttaggctatgggtttgcgccggtccgcaaaaagggcggacggaggacgcccccgtctgcccttatggattgtccggccgccttgtgtcggctccggcggagcactacccgctcccgccgcttttcttcatttgccgcgagatcgacagcacgatacccatctgggcgagcagcatgacgagggaggtgcccccgtaactgaagaagggcaggctgatgccggtgttcgggatggtgttggtcaccaccgccatattaaagaccacctggatcccgacctgcgcggtcaggccgatggcgagcatggatccgaatttgtcgggggctttcatcccgatcatgaacccccgccagaccagcagggcgaacagcacgatgatgatgaccgccccgatgaagccgagctcctcgcacacgatcgcaaagatgaaatcgttttgcggctcgggcaggaacaggtgcttttgccgggaattgcccagtccctgccccatcaggccgcctgaaccgatcgcgtagagggactggaccgtctgccaggccatatcttttcccgccttgcccgacgagaacacggcaaaggggtctagccacacgtcgatgcgttcccgctcatatcccttgaaaaagatcaggaacgccgccgccgcgccgccgccgccgatggttatcagcaggtagacgagcctcgttccgcccacatacatcagcaccagcccgatgaagagcagcagcatggtgccggaaaggtggggctccttgaacaccagggcgcaggtgatgccgaggatggcgatgaagggaagaaacccgcgcagaaaggtcttcatatttttgtggttgagggaaatcaggtgggcgaagagcaggattaggccgaatttcgcaacctcggacggctggaactgcccgatgcccgggatccggatccaccggtggacattttggatggccggcaggaacagcaccagcaccagcagcgcccaggagaggagcatgaccgggatagccagccggtgaagcacatggtaatccacaaccgacacgagcagcatgatccccacgccgagaacggcaaagaagagctgccgcttgatgaaataatagctgtcctgctcataccagtagtacgcataggcgtaactggcggaaaacaggctgatcagccccaccaccagcaccagcatcagcaggatgaaaaagggcatgtcgaatccggaggacagggagaaaagccggagttttttctgcggcggcttaacagcgccttccggcgggcgcagcgcggcggccttctgtgacatggctcttccccctttcctgatctttcaaaatctagtgtattacatccccgtcccgaatatacggggatttcaaagaaacaggagccccgcagcagccccgcagccaagcagcgtaacgatcgaaaagacaatgacgatcttgttttcgctccagccgctcatctcaaagtggtgatgcagcgggctcattttgaacaggcgtttgccgtgggtgagcttgaaataggtcacctggagcatcaccgacagggtctcggcgatgtagacgatccccaccggtacgagcaggaaaggctggttgatgccaaaggccagcgccgccagtgcccctccgagaaacagggagcccgtgtcgcccatgaagactttggcaggatggaggttccacagcaggaaccccgcgaccgcccccgccagcgccgcggcggtgaggccctgtccggcgtactgcccgctgacggtgaggaagaacaggcaggcgatcaggctgaccgagccgcacaggccgtcgatcccgtcggtcaggttgaccgcgttcatggcgccgacgatcacaaaaacggcaaaggggatgaaccagattccgaaatccaccaagccgagaaacggcaccgacaccgccgtgccccccgccatgtagaccgacaccgcgtatcctgcgcccaccagaagctgggcgaagagcttttgcaggctggtcaggcccaggttgcgtttcttgaccaccttgatatagtcgtccaggaacccgatccctccgcagcacaacgccaggagcgcgccggccaccagctttgttttagcctcatagctccaggcatccgagaacggcttgaccggcaggaaaagctgcgccaccacgacggccgccatcagggtgacgcaggacgccagaatgaaaatcagcccccccatcgtcggggttccctgcttgtttttatgccaggccggccccacgtcccggatggtctgcccgaatttcagccggtggagcagcgggatcatcaccttgcccagcagcgccgacaagaaaaacgagacgagcgccgtacccgataccagaatcagggtggtcatatccattataaagactcattcctctcccgtggtctggaaaatccttccggggatccgcacggcggctcctactcgtccgcggacgcggccggtgccatctgcgcgagcgcctcggccacgacctcccgttcgtccaggtggacgataccgtcgcgcaggacctggtaggtctcatgccctttacccgcgagcaggatggtatccccggattttgcattgtggatcgcccagcgaatggcctccacccggttggccacgacggtatagggggtcttgctgtccgcgagtcccgccaggatatcgtcgatgatcgcctgcggatcctcgctgcgggggttatccgacgtaaccaccaaaaaatcggacagtgctgcggccgccttgcccatcttgggccgtttggtcttatcccggtccccgccgcagccgaacaccgtcaccaaacggccggtcttgcattcccgcagggctccgcagatcttttccaggccgtcgggggtgtgcgcataatcgatgacaacggtgaaatcccgtccggtcggcaccacttcacagcgtcccttgacaccggcggcttttccgagggcatccacgaccggctggaagggcaggccgagcgtcaaggcacaagccgccgcgcccagggcgttatacacggagaaccgtcccgggaccgcaagccgcacccggccgatcacccccgtgccgaccagttcgaaatccaccccgtccggcctctgccggatattgcgggccgtgtagtcggccgcgtcgttccccgccgagaacgtgaccgtcttgcactccaatccttcccgcatcggcccgtaccaggcgtcgtcctgattgagtatagctgttttgcacagggaaaagaggcgctttttggcggcgaggtagttttccatcgtcccgtgatagtccagatggtcctgggtgagattggtgaaaatcccggcgtcgaaggtgcagccctccacccggtcctggtcgagcgcgtgggaggagacctccatcaccgcgtagccgcagccctccgccaccatcaaggacagcatgctttgcaggtcgtagggatcgggggtggtgtgcccggaggccagcacccgctccccaatcatattctggatggtgccgatcagccccactttctcgccgttcgcctcgaggatgcttttgagcagataggtggtagtcgtcttgccgtttgtccccgtcacgccgatcatccgcaggcgctccgcgggattcccgaaccagttggcgcacatccgggcccaggcccggcgtcccgacgccaccagcacctgagggacgccgtccgcgacccccagctccacaggatgctcggccacgatgacggcggcgccgttttccaccgcctgccggacatactcatggccgtccacagcggtcccgcggatgcagacaaaagcgaaacccggctcgacgcggcgtgaatcgcagctcaggccctttagttcctcccgctccgggaaagggcccggcaggacgccggtatccctcatcaactcacaaagtttcataaccagacaccatcctatctttcatggcgggaaaaggctgccggcccgccgctttttattccaccgtatcctggtacagcacgtcgatgcgcaccaccgtaccgggcggcgcattcgtttcggcctccaccgactgggcgcgtaccaccgcctgcccgtcccggtcatccaggcccgcaataatcaggttgagcccagcgccgacggcggcgctgttggcctcggcgagggtcatgcccacaaaattcggcactgcggtcgtttcactcccgtcggttccctccgtatagagcaccaccgtgccgttcttgggcatgggcgcgcccgcctcgggaacctgccggagcacctctccaccgcttcctaccagcttcgcctgcaactgcacgctctggagctggttttgggcggccgccaccgaggaacctgtcacatccggcgccgcccggttcatggaggtgatttcctcttcggtgtactgaggctccacccccagatagggcaatgcctcggacagaatcttctgcgccaccggggcggaaagctggccgccgtagcggatagcggtctggggctcgtcgataaggacgaggactgccagacggggctcataggagggggcgaagcctccaaaggacgccaccacattcttgcgtgcgccctcccccgccgcctggtcggtcttgacggaggtaccggtcttgccggccacgtgatagccggggacgtacgcatttttggcgccgatttccacgaccccctccatcatggcagccatccgtttggcggtatcctccgagatgaccgtacggcgcacggtcggctggatctcttcgacgacgttcccattctcgtccaggatctgccggacgacatagggctgcatcagccgcccgccgttcgccacacaggcgaggccggtgatcatctggatgggtgtgaccttgaaggtttgcccaatggcggaggtcgccacgtccaccggacggatgctttcctccacatggtagagggtgggggtgacccgcgcctctcccagcatatcgatgccggtcagctcggtaaaaccgaacgcggcgtgatactggcaaaacaggtgcccgccgatcatgccgccgagcgtcatgaaggccggattgcaggaatgggcgatggcctcggcaaaggtctggtccccgtggctgcggggatagacgtggcatttcatcggcttgacgcccggcatcgtataggtgccgcggcagaagaagtgggtgttttcggtgaccagcccttcctggacccctgtcgacgccgtgaacaccttgaataccgagcccggctcgtagaattcggaaatcggtttgttcttccactgcttctgcagggcttcgagcacggcggcgttctgctcgtctccggacagcagggcaatctgggccgcggtgtcggggttggcgattacccgggggttgttgaggtcgtaatcccctttggtcgccatggcgaggatggcgccggtctgcacatccatgacgatggccgcgccgcggttggtcgccccggtctcccggacggcgatctcgaggtatttctcggtgatgcgctggatggtctcgtcaatggtgagaaccaagctgttgcccgccttcgcttcgatggtgctttcataccgcagttcgttcggcatggcgtcgccccagccgtttttggccgtcaccacccggccggccttgccggcgagctggctgtcgtatttagcctccagcccttccaggccgtaattgtcggtgccggtaaaaccgagcacgcaggagaggacgctgccaagcggatattcccgcttgtaatcctggatgacccggaatattccggtgaactggtgttcctgcacccagtcgatgaaggtatcgcagagggaatggtcgattttggctttgatcacctcatacagggaggtctttttcccggtttttttgtacagcgcgtcccggttgatctccagcagaaccgacagctcatccgcgatcagggtgcgggtggcctcgtccgggatctcgctcggggccatgatgatggtcgcgacctctttggtctgggcgagcacctccatgttggtatcatatatgagcccccgtttcggggatatgatgctgttggacatttgctgttccatggcccgttcctgccagacggcgtattcgccgatctggatgacggcgagcttgccgcccaccgctccgaagcagagacagacggccgcgaggatcagcagcgagcgccgccacatctgcctggatggggccttgattgacacgtcctgttgatgaatcgcttttttcataaacaggtcgcctcatattcttcatgatcaaaaatcgcgtcgctaatgcacggtgtcctcatagatgaattccacattgaccaccgtccccttggggactttggagcctggcgccaccgattggcgaagcgatttgggctcgccgtcgccggcggtgatgccggagagctggacattgatcccggccgaggaggcggattggttgacctgtgcgacggtcttctcccggaaatccggtaccgtcgtggtcacggtgggggtttcgtcggtatacagccagacggtgccgtcctttgggatggaggagccggactccggaatctgccggatcaccgtcaccccttcacccactacttgggatttgagggatttggttttcagggaattttccgcctcagcggtggtcatggaggtcacccgcggcaccgtgcggttcagttcggccagttccttctcggtgtaccgcggctcgatgccgagatagggcaggatgctctcaaggatctttttcgccaccggcgccgcgacggcgccgcctgattttttgttcggctcatccaccatgacgagcaccgccacccgcggattgtccgccggggcaaaaccgccgaaggaggccaccacttccacatccttgccggtcggatcgttttcgtccttcatttcggttttctcggacgtcccggtcttcccggccacccggtagcccgacacataggcgtttttgatagcccctcccgatacggcgttttccagcatggccgccatccgcttggaggtatctgccgagatgacctgccgcttgacagcgggctcggtattggacaccacgttcccgttgctgtccaatacctgctgcaccatatagggctgcatcaggtatccgccgtttgcgatcgccgcgagggccgtcaccatctgcagcggcgtgaccttgaaggtctggccgatggacgaggtcgccaggtcgaccggcttgatatccttctcatcatgatagaggcccggtgtcacgagcggttcgccgagcaagtcgatcccggttctctgggtaaagccgaagccggtgtagtatttgaaaaacaaatgggcaccgatctggtttcccagcgtcataaacaccgggttgcaggaattggcaatggcctggacaaaattctgattgccgtgattctgggggtacacgtggcagcgcatcggcttgacgccgggcagggtgtaatacccctggcaggtaaaccgcgaatcctcactgacgatcccttcctccagcccgatggaggcggtgacggtcttgaaaaccgagcccggctcgtaaaagtcggagaccgccttgttcctgtactgctcgttgcgggctttgaccagggccgcggattgctcgtcgccggagagctgcgcaatctgcgccgccacgtccggatcggcgatggtcaggtagtcgtttgggttatagtcctttttcgtggccatggccaggatggcaccggtctgcacatccatgacgatggcggcgccccggttcttcgccgcgtattggttgatggcctcttccaggtatttttccgtgatctgctggatggtctgatccaccgtcagcaccagggaatacccgtcctccgcgtccacggtattctcatagggcaggcgggtgggcagctcgtcgccccaggcgttgagcgccgtcaccagccggcccggagtgccggacagcacctcgtcatacttgacctccaggccctctttggcgagattgtccgccccgacgaagcccagcacgctggagagcagattgttcatggggtattcccgcttgtagtcggtgatcacccggaatacggcgccaagcttcttctcctccacccagtcgatgaaggtgtctcccagcgatttatcgattttggctttgaccaccttgtactgggatgcactatccgacgcctgctcccgcagtttctcccggtccacgtcgagcagggtcccgagctcctccacgatcatctcccgcgtttcctcgtccggaatatttttcggggacataatcaccgtgcagacttccctggtcagggccaatatcgacatattggcatcgaaaatctgcccgcggttgggggaaatcgtgatgtcgctgagctgctgggtcacggctccgcgctgcagatattccgactgcaggatctgcagggaaaagagctgggccgtcaccccgccggagcagaggatgaccagcaccaccatgaccaccagcacccggcggcgcatctgccgcgtgagcgttttggtcgcgccctgtttttttggttctgtttttttgaccttggtttcttttgacacgtcccatacctcacagaatccgtcgaatccgggcgaattctccggataagaaaaggagagtcaagacttccatcccaactctcggctcctatccatttcgcccgcggcgaagttcctatctcatacttatgcctcaaacgaacaagtatgccttctccgggcagaaaagcgggggccgcggcttaggaaccgcctccgccgccgaaaaagcccgcgatggcatcccataccgattcccaaaatccgggttcagtcccatcctcgccggtatcggcgccggcgtcctccaccgtaatataggcgatttgccccggctccattttctgcatgccgttggccttcgcgtattcctccacgcttttggcggaggtacgggccgccagctcgctttccaggcgcttggtttcgctgatgacctggttgagctccgcctccttgcggcttttttcgctgttgagctcggtcagacggacacggctggaaatgagcagcccgaccacggccaccaccgccgccgccgtgagcagcgtcagggccgtgttgaggaacgactgaaccctggcgcggcggcgtgcctctttgaccgcttttttattcggtttcagggcgaccagcttcggctcccgcggttcaaacagcgagaggtcatacgcttcggatccgttgggattcaccatgacggctgctcctttctcacggccgtgtccaggacactaccgatatcgttcatgacactttcggatgcaccgcagcttggcactgcggcttcggggattctcctccagctcccgctgcgaggcggtcgcgggacggcgcaggaccggctcggccgccggcgtcctcccgcagacgcaaaccgggaagtcgggcgggcaggtgcagcccttccgccattcggcaaaacgctgcttgaccatccggtcctccaaagaatgaaaggtaatcaccgccagccgtccaccctcgttcaggcagtcgaatgcggcgtccagtccttccgacaggcggtcgagttccccattgaccgcgatgcgcagcgcctggaacacgcggcgggcgggatgcccatcccgccgggccgccgccggaacggcccctttgaccagttcggccaaggcgccggtggtatcgaccggtccgctctcgcgcgcccgcacaatggcgcgggcgatgcggcgggcaaacggttcctccccgtatcgggaaaagagcgcggcgagttcctgttcgggcaggacggctatgagatccgccgccgtcttgccgcttttgctcatccgcatgtccagcggcgcgtcggcgtgataggaaaaccctctttccggggtatcgagctgatgggaggaaaccccgatatccagcaggatcccgtccacgcccccaatcccaaggccgaggagcacctcccgcatagcggcgaaattggaacgcaccaccgtcgcgggcagcccccgcaggcgcgccgacgcctcttccacggcgtcgggatcctgatccagggcgatcagccgcccgtttttcagtcgggaggcgacggcagaggcatgtccgccccctcccgccgtgccgtcgagatacgtcccgtccggccggacatccagggcggccagcgtttcctccagcaggaccgggcggtgatagccgccgatcggttgctccatctcccgtcctcccgcaatcagaatccgagctccatgaactccgcctcgacctcgtcggaggtcatggcgccgatgtcgtcctcatacgcggccgggttccagatttcggcccggttgcccgcgccgataaccagcgcttccttctgcagatcggcgtaggcgagcaggtgccgggggagcagaatccgcccctgggcatccacctgcacatcggtggcatttgccgacagatagcgctgcaacttgcgggccttggtcatcggcatctgtgcgagcccttcctgcagcttgtcccattcccccatggaatacaggcagacgcaatgatccatcacggccgcggcgataaaggcatcgcccagcttctccctcagcttagcaggcacgaaaatgcgccccttcgcgtcgatattgtgttcatagcgtccgtacagcatagttcgttcctctggccctgccagggccggttgggggatgcggtccgcggcagtggtggaaaactcggtggaaactgttgaaattcaccacaacccaccacttagatgcacttttcaccacttgcatccattatataggctcttagcggaaattgcaagggctcgctctaaaaaaatggagaagaatttgtgagagtttccaagaaatttcttcctttccccttattcttctttctattccccgccgaaagccggcgaaccgccggtataaggcggacatcgggtcgtatttccggactgaaacagacaggcgcacccccttttttcgccgaaacccttgcgaaaccggcgtgaaccgtttagaataaggccatatgccgtatgaaatgaggttgaatcgatgcagcgtatcccgcttacatccgacgccgtgaccttccacggccggatcgtccccgagggcgaggggctttggctcggctggaccaacacaggaatttccttccgctttgagggccgtcacgtggcgttccgcttcgccctccccccggcggggcaggtaccatatgtgggtatcttggtggatgaggaaccccgccggatgctgccggtggaggaagggcgcctgacgctggaaatcccgctgcactccccgggcgaacaccggatccgtctgatcaaaatgaccgaattgctcgacgatatctccctgtatttggagggagtgactctcgatgacggggcccgactccttcccccgccgcccctgccctgccgccgtctggaattcatcggcgattcgatgacctgcgggtttgggaacctgagcgccggcccccaggagcccttctccccgacgacggaggactccacccaaacctacgcggcgctgacctcccgccatttcggtgcggacacccgctatctctgccgttccggccggggaatcatcagcgactgtgaaggaagccgggcgcagccggtcccccgttggttcttcgaaacctccctgacccacccgcagccatgggacttttcctcctggcagcccgacgtggccgtgatcaatctggggacgaacgaccgcaacggcggtgtttcccaagaggaattcaccgccggagccgtggcgttcctccgccggatccgcggcgtgtaccctaatgcccggctgctgtggatgtatgggctgatggacgaggacttcatccccgctgtcaaaggggctgtcgaaaccgtccgtgcggaggacccgcttgtggacctgctgctggtcccgtcgatttatccccatcccgaagaacagggtgcctgcaaccaccccaatctcgccgcgcacgcccgggcggcccgggccctgataacgaaaatcgccaagcagaccggatgggcggcccgcccctccttctggccctgaggtgtcgtttgaaagaaaggcgtccacctttctttcaaacgggtctttgtgtctttccggctgaaacagccagaatttcggcttcgccgaaaccggtacaacgtccctatcctcggggattttagtccccgtataccctgccggttcaggcgcctgtgtccccgccgaggccatatccggaaaggagatgcgttttgatgaccgcagacgaatacatcacccgctggaaggcggaggaacaggcggcccatatccgggggtgggacttttcccctatccattcccgctatacggccgaaaccgatttgccgtgggattacgagaacattgtgcgttcccatctggaggaaacggcggcactgctggacatggacacgggcggcggcgaatttctgctgtccctggggcatcccccggacaagacgagcgcgacggaaggatatcctcccaacgccgcgctgtgccggcagacgctggcttttcggtcgacgcctgtgccgaccggctgctgcaggcgcagggcattcttgaggaacgcggcgccgtccagggaacgatccaccggtatctgatcgtggcccgccggacgggggcccaaagcaaaaccgaatgagggggatggagatggggcgtcatctcgcgactttttccttcagccatcgcttcttcaccgaaatctaccagccgggaaggttggaatttcagaagaaggggctgacggccttctggctgggggatgtcctgttttccttggagtacaaggacctgctgcatgtcgagatcacgggccgctttccccattgggtcaaaatcgtcggaacggattcgtttctctatgtacaggcgggatcctacaaggccctgtgccgcgaagtcgaggcccggggcatcccgatcaagaaagtccggcggtttcgggactaaggggtccagggacggctgtagcggcaccggatccataaagaatatcggaattatggaaaggaggcgggggatgacccggctgaattacaccgtacctcccgcctatgacggcgcgcgggtacaggatttcctgcggcgggactgcggcctgtcctggcggatggtcgtacggctcaagggagtggcgggaggcatcacggccgacggcgtcccgatgcggagcatcgaccggttaagggccgggcagacggtggtcctcacctttccggaagaccacgtgcgcatcgagggaatggagatgccgctggcggtggtgtatgaggacgcccacctgctcatggtggacaagccgccctacctcgcggtgcacccttccgccggcaagccggacccaaccctcgccaacggcgtcgtcgcgtattatgaaaaaaaaggcgaggccgcgtccttccggccggtcaaccggctggaccgtaacacaagcggcctgcttctcgcggccaaggatccccacacggccttcctgctgacacggaaaccggaaaaggtctatctggccgtggttttcggccgcctggagggggaagggaccatcgatgcccccatccgggtaaaggagggctgctgcatcacgagagaagtggggccgggcggcaaagagagcgtgacccactggcaggcgttggcatcggatgggaagctcaccctgctgcggctgcggctcgagacgggacgtacccaccagatccgggtgcatatggcctatattggacacccgttggtgggagatacgatgtacggtacggatgaaaccttcctcccccgccatgccttgcactgttccgaaatggcgtttgcccatccgctgaccggagaaccactgcatttcgtcagtccgctgcccccggatatggagcgtcttttagaggaacggggcttgccctctccgccgctccgcggataggcgcaaagagttttcttaagattttcggaagggtcatgacgggacggcgcggatggtgtataatggcggtatcgaaatccgggggaggaatggacatgccggcgatgatcgcgcactatctgtttgcacaaagagtgttttccaaactgaaaaaagcgggcgtgacacccgaggccccggccatggcggccgtgggcgcgcagggtcccgatattttcttcttccaccgggtgctcccctgggagccggggaccagctttgccaaacaagggagtttgctacacaaaatcagtcccgcgaagctgtttgaagccttccgtgccggcatcaaccgggcctccgccgaagaccgcgccgccatgaccggatacgtccagggctttttctgccattacgcgctcgaccgtgcggtgcatcccttcgtctattactggcaggaggagcttcgccgggagcagccgggatatgggtccaccgcccatcagtaccatttccggatcgagagcgcgctcgacaccatcactctgcgcagggaaaccggcaggctggtacgggatttcaaactagcttcggtcattccggccgaatcggccgggggatggccggcgctcggccgtctctatcagccggtgttcacccgtctgctagggcggccggaggccacggcggcacagattgccctggctccgaaggatatgcgccatgcggtttcgctgatgaccgaccggacccaggtcaaacggcgcctgctcctcaccccggtggaaaagctggcccgcaaaggggccttcgccacctccctgatgcgtccggcggacacgggtgactgggactatgccaacgaaagccacgcccgctgggtgaatccctttgacgaggcgtatgaaagcaccgacagcttttttgagctgtatgacctggcggcctgtgaagcgaccgacatgatcctcgccttcctcgacgcgctgccggacggtgcatccatggcggatatcacacaggaccggggattcgcgagcgatctgccgggcgtatatgaagtgcgcctataattaataaggaaagaaaggacaaggagcttgaaacggattgccagctttgaggtggatcacaccacccttaccccggggctgtatctttcccgggccgacggggacgtgacgacatacgacctgcgcttcgtgcgccccaacaccccgcccttcttgccgaacgcggtcatgcataccatcgaacacctcttcgccacctatgtgcgcaacagcacgctgtcggagggcgtgatctattttggcccgatgggctgccggacaggcttttatttcctgactagggggctgtcccaccggcaggtgatcggactgaccagggaagccctcgccttcatcgccgccttcgagggggagattccggggacgacggccgctgaatgcggcaactatcgggagcacgacctggaaggggcgcgccgggccgccgccgggatggcggcgctcctggcagactggaaagaggaagcgctttcctattcgacagaaaagtgatgtgtacattgcattgaaacaattgtctttgttgagggaattttaacaaaacacaacaaacatcctgaaaaagggttgcaagtttgtaacattccgagtataatgatactcaagttgttacaaacttgtaattttttatgctttatctccgggacaggctccggtcttttccgatccatgatgagatcgggctctccgcaacagggtccgagatgctgaatgtaaggaagtgtattccctcttatgacgactcctcgcaaacagcggcccgccgacgccgcctataaattgaaaaaaaacatgcgggcgctgtggtctgccgcggcccgtttcttgaccgccatccttccagccgcagccggaaaggccctgcacgccggttatgtgctctgctatacggtaggggtgcataccctgcgtgtaggcaaacggagcggccgtctcatgggccgtatcctccgccctgccggccgtctggcatataaggcggcggacaagctgctgctgcgccatctgcgtgcgatgcgccaggagctcggccggatgcgcgagggcttcgtccttgctggccggaggctgaaggaggcgtatcgccgccatcccttgcttgtgatcccccaggcgctctgcctgccggtcaaagcgctccgccgccaccgcaaagccgtggccagcaccttcaacctgctggcgccggccgccgccgtgatggtgctggtcctgaccctgcagttttggagcagcgcgaccttcgcgctggccctcgaatacgacggccgcacactcggctatatcgcggatgaatccgtctatgacgccgctgcttctcttgcaaacggccgggtcatcaatgccgacaattcattcagcgtggaacgggtgcccaagctgaccctcacgctggtcaataaagacgacattctcgacgaggcagcggtctgtgaccgtatcctcgacaccgccggcgaccgcctttccgaaagctccggcctttatgtggacggggcgttcgtcggggccctcccctcccgcgcgctgctcgaggaatcgatggacgcggccctctccgcgcggctgaacgggtcggagacaggcagcgccgcctttgtgcaggatgtccagctggtggacggcctctatccggtttcggcgctggtcgggaccgagaccatggacggctatctccgccagctgccggtcaaggtgacgtcgtatatcacctatgaggaacccatcgcctatgcttccaccacccaggagctgtcttcccagctgctcgggtaccgctccgtcaaaacgaaaggcgtcaacggcgtgcagtcggtgacggcggaggtcgtcacgatcgacggcgtggagcagtcccgcaccgtggtttccacctccgtgatcaaagagccggtgaacgaagtcatcgcggtcggcggcaagaaatacaacgacgtatcggtcgcgggcgacggcaaatccacgggtgcctttgtctggcccctgccggccaccaagcagatcagctcgtatttcggcagccgctggggttccacccatggtgccattgatatttccaacggccgggtctacggcaaacccatcatcgcctccgatggtggcaaggtggtggaggccggctggcattacagctacggctattatgtcctgatcgaccacggcaacggcttcaaaacccggtacgcccattgcagcaagctcaacgtcaaggtgggccagcgggtggcccagggcgaatacatcgccgacgtgggcaataccggaaacagctacggcgcgcatctgcatttcgagatcatcaaaaacggcaagctggtcaaccccctgaactacgtcaaccgataacgccgctttcagcgccgccggtttcccggcggcgctttttcgctgtctatccgggccgtaaaaaaagcaactggggcccttgccatttccgcgcacaaggagtagaatggcggtgaatccaacgcgtgtatgaacgcagataaggaggatcgacatgaacaaaaagcgtacagtgccggtggccctgcagctctattcggttcggggcgatatggaacaggattttgaagggaccctgcgggccgtcggggagatgggctacgacggggtggagctcgtcggcctttacggccggaaaccggaggccgtgcgggaagccgtggccgccgcggggctcgtccctgtcagcgcccatgtgccctatgccgaaatggcggcggatccggatggggtgatggccgcttacgcggcggccggatgcgcttatatcgcggtaccgtatctcgaggaggcctgccgcccgggtcacgacggattttccgacgtgatcgccgccctgccgaagctgggcgaggccgccggacgggcggggctgaccctgctttatcacaatcacgatttcgaatttacaaaggttgaggggcagtacggactggatttgatgtaccagcgggttcccgcctcgctgctacagaccgagctcgacacctgctggatcaatgtcgcgggggaggacccggccgcctatctcgccaaatacaccggccgcgcgccggtggtccatctgaaggactttgtactggaaggccggaagcccgcccatatgtatgacctggtcgggctggaaaacgagaaagtcccggcggagggagagggctcctttgccttccgtcccctgggccacgggatgcaggacattccctccatcctcgaggcggggaaacgggccggcgcccgctggttcgtcgtggagcaggatgagcccagcctgggtctctctcccctcgaatgcgcgcgccgcagcctcgagaccctcgatgcgttggattggtaagggccttcggggcggtgtggcgccgctggagactgtgaaaaccgcccggcattcctatagggaatgccgggcggtttcgtcctttccgttctactgtatttcctgttcaagcctgtcaaactctggcgtgctgaagaactccccgagagtgatgtccagcccatcacagattttcttcacagtcgcgacttcggggcttttgcttttttcacccagaatactatatatggtcgatttgtccaagccacaagccatggccaatgcatagggagacagtccctttttcgcacaaagctccgtaatacggaaaccaatggtttctttcagtgtcataccgcgcactctccttcacgaggtgtttccctaactcgaccaagacaaccgatggatgggatttctgccaaagttgtctctcttctcaagccaaaaactggcctgcgggccacctccttttgcccgagcttcagctcgtaagcaacaaggaggcaaaaatgcttccggggttcccccggaccccgcggttttctttttaggaaaaccggcattaacgcggccgcctgagcctgccgaatatacataggcggctggaccgcgggcgcgggaggttcactcccccaaaaaacgcaccatcccccgggccgcagcccttacttgtataaggctggttcaggcagcatggcctgtgtcgattttcatagagagaaaatcgacaaaatcacccggggatccagggggtgccccctggcgcttctttcccctctttctttgcgcaaagaaagagggtgctaaagcacaagtttgtgccttgacggcatacgtgaatttgatagatgctattgggggattccgggggattctcccggtccccaaacccggaagaaggagactttattcggggcagacgatgtaccctgtccttattttaagtaatttttatactttattagtgggacttgtccccctggtaaaaatatgttatagtggactatatcccactaactggaaggagacgaagacatggaggaaacaaggatcacatttgaggaaggaacaagacgcattgtgctgccgcaggcggtgaagcagatcatgggctgggacaaaaaaaacccggtggaaatctggctgaatgcagccgatgacgccgtgattctcaaacgacatatcgtcacctgttcgctctgcggctcaaccgaagatttgcatccggttcgggaccggcatctatgtcccggctgcctggccgctctccgctcgggcaaataacgcctatcaaagcaaggagcgcccccacccatgcccatgcatggataagggcgctccttcggccggctcccaaaaaagtagcagttgcttatcaaggtcaatttatgctatactaaacgattgaaacggcatggttatgcgcgtttgactccacacccgccccaaacggcgggagaacgaggtgttgtcctgtgtccgggaatcgcgacctgacccgcaatttctgcattatcgcccatatcgaccacggtaaatccaccctggccgaccgtatcctcgaaaagacccggacggtcgaactgcgggatatggaggaccagctcctcgacagcatggatctcgagcgggaacgggggatcaccatcaaggcccacgccatcaccctgaactacgacgcggcggacggccgttcctataccttcaacctgatcgacacccccgggcacgtggactttggctacgaggtctcccgctccctcgcggcctgcgaaggggccgtcctcatcgtcgacgcctcccagggggtggaggcgcagaccctcgccaatacctatctggcgtccgagcatgggctggagatcgtcccagtcatcaacaagatcgacctgcccgccgcccggccggaggaggtccggcacgaaatcgaggatatcatcggcatcgacgcctccgacgcccccttggtttcggccaagcagggcaccaacatcgaggacgtactggaagcggtggtcaaacacgtcccgccccctgccggggacgaaaacgcccccctgcaggcgctgatattcgacagctattacgacagctataaaggcgtcatcgtatatatccgggtcaaagagggccgggtaaggcccggcgataccatcctcatgatggccaccggcgcccggttcgacgtggtggaaaccgggatcatgcgccccggccggctcgagccccgggacggcctggaggccgggcaggtggggtatatcgcggcctccatcaaaactgtccacgacgcgagggtgggcgataccgtcaccctcgcctcccgtcccgccgccgcgcccctgccgggctaccgcaaagtcaaccccatggtgttctgcggcattttcccggccgacggtgcccagtatcaggacctgcgggaggcgcttgaacggctgcagctcaatgatgcggccctgaccttcgagcctgagacctccgcggccctgggcttcggtttccgctgcggctttctcggcctgctccacatggagatcatccaggaacggctggagagggaatacgacctcgacctcatcaccaccgcccccagcgtcatctatcgtctgaccctgaccgatgggacggtgcagtatatcgacaacccgaccaactaccccgatcccggctccatccagatggcggaggagccctttaccgatgcccatatcctggccccgaacgagtatgtcgggaacatcatggagctctgccaggagcggcggggcgtgttcaaggacatgaaatacctcgaccccacccgggtggatatccattacgagctgcctcttaatgagatcgtgtacgacttcttcgacgcactcaagtcccggaccaaggggtacgcgagtttcgattacgagttcaaggggtatgttcggtcggagctcgtcaagctggatatcctcctcaacggcgatgtggtggacgccctgtccttcatcgtgttcgcggacaacgcctacgcgaggggacgccgcctctgcgagcggctgcagcagaacatcccccgccagctcttcgaggtgcccattcaggccgccatcgggggcaaaatcatcgcccgggagacggtacgggccttgcgcaaggacgtgctcgccaaatgttacggcggcgatatcacccggaagaagaagctgcttgaaaagcaaaaagagggcaaaaagcggatgcgccgtctgggcagcgtcgaggtgccgcaggaggcgttcatggcggtgctcaagctgggggacgactaggccggtccccgacgggattgtatacgaacgccaccttggaccggccgccgctcatttcagcttcgctgaaatggcccggggctgccataatctccccgacgggattgtatacgaacgccaccttggaccggccgccgctcatttcagcttcgctgaaatggcccggggctgccataatctccccgacgggattgtatacgaacgccaccttggaccggccgccgctcatttcagcttcgctgaaatggcccggggctgccataatctccccgacgggattgtatacgaacgccaccttggaccggccgccgctcatttcagcttcgctgaaatggcccggggctgccataatctccccgacgttaccgtatataccgattgcgaaaaactcggattatcgggattccatccgaatagcgggggctgtcgcggccgcgtctccgccctcccctattcccccacgcacctaagattccattctattcgacgcagtcgaatatctcccatatatttgacggattccctctcatggagtacaataaaaaaagagccgcccgaccgatgtttccaaagctttccgggcgcgcccacaggaaaggaccggaacctcccatgaaagtatccccttcgattttgacctgcgattacgcccatctcgaccgggaaatggcctttgtcgagaaaaccggtgcggatatggtgcatctcgacgtcatggacggcgtattcgtgcccaatctgagcttcggcccgcccgtcatcgcgcggctgcggcctttgaccacgctgccctttgacgttcacctgatgatgcggtatccccaccggctggtcggcgcgtttgccgacgctggggcggatctcatcaatttccacctcgaaagcgactcccccatcggggagactctcgacgacatccgcgcgagaggcaaaaaaaccgccctcaccttgaaacccgcgacgccggccgaggcggtgttcccgtacctcgaccggctcgacatggtgttggtgatgacggtggagcccggcttcggcggacaagccttcatggaggacatgctcccgaagatcgccgcgatccgggcggaaatccgccgccgctccctcgatgtgagcatcgaggtcgacggcggcatcggagacgtcaccgcccctctcgccgctgcggccggggcggatgtcgccgtggtgggcagcgccttgttcagcgccgctgatcctgcggcgctcgtctcccggatccacgcgctggggtaatcgtcaaatgcgggtgctcatgaacaccggcccagctgttccacggcatctccgatggccaggggctggccgtgctccgcagtaaaggcggccgccgcgtccccttcgcctaccagcttcccaaactcggacagcatcccgctcatcccccgtggggtgacgaacccgggatagataaccaggcggtagccgtttccaaaacgatacagggaagacgcaggatcccggaacgcggtttcgccgcccgtgcggcggaaccgtttgagccccgcgcagagctggaagagctgatccacgccttccacggcatagacgaacggcccgccggcccgcaccatgcggaaccgacggcgctcggacggagccgccgccggggcggcccggccaggtgtcatcaggatcaggcagcccttgtccaggggaaggacctccacaagcagcccgtcgggggcttcgaaccccgtctgctccctggctgtttcgagaaggcgggcaaccgcctctcttgtcgcggcgttgcggtagtccatttcctcgaaccgcagccccatttcctgcatatcgggttcatccagccatatcttcagacagccgttctccaactgttccattttcacggctgtatccctccttttcagccgcgccggcggtgcttggatgccggcgcagggtgctggtgccgtgtccgcgcagtcccgcgcggacgggcaccggggcagggcccccccgggcccctgccctactaccatcatattagccggaccagcactttgcaagaggtgaaaaactggaacgtttcgacgccagggcgaaaggcggtttagtcaaatgccgattgaaaccagacggggtatccggctcccccacctcaaagagccggcggcctcccgcgaggtggcccgcctcgaggccaagggccccctttctcttcctctcgcctacgacgagcagggagggacacccatctgtgccccgcgggagatcatacgaaaagggcagcctgtcgcactctgcggcgattcaggctgtctgccggtacatgccggcgtgaccggtacgctcgaaggaacccgcaccgtatcccatcccctttacgggaggatcgactgcgcggtgatcggctgcccggcaggggaaacggaggagccggatgcgctcccagccgacctgggccggctctctccggacagcgtgatcgagaccgccctgcatgccggcattatcgatgagctcgacggggtgccgctgcatctcaagctttcccagtggaaggaggaaggctgcggttgcctcgtcgcggatgggacggaaccggagccctacgcctccagcgcctgggcggttttgaatctccacgccgaacaggtgggagaggggctgtcgctcgccgcccgctgtgtggacgcagagagctgtcacgtagccgtcttactgccgggagaccggcggcggtccctgcagcagcgcctgggagaggaacgggtttatcttgtgcgccgccgttatcctgtcgtccgctatgctcccgccgggcggatgcgccccgataaggcgctgcgccgcgtcggagtgcaagcccttctcgcgctttaccgtgcggccgccttcggcgagccccagaccggatgcgtcgtcaccgtcgccggggacgccgtagccacaccgcaaaacctggccgtcccgtttggggtgccggtccgggagctattggcacactgcggcctgcgggagaatcctcaatatctcgttctcggggatttgatgacgggacggaccgccccgtctgacgatctgcccgtcctgcccggcatgacctgcctgctcgcgctgaaggtgcggcccgcgctcctgccggaaagggcctgtatcggatgcgggcgctgtgtccatgcctgccatgcggggttgctgccctacgagatcgtgcggcggctggaaaatatgcattatgaacgcctcgtttccctccatccggagggctgtgacggttgcggagcctgctcctatgtctgtccgtccggacgggacgtcgccgcccgcgtacaggaggcggcgggagcccacggcaccattttcctggaatggggtgatgacgatgacgcttaaaatggccagcgcgccgcatctgcgtctgactgagcgctccgccgccctgtccctggatgtgctcatcgctctcgtgccgctgtgtgtgttttcgtttgtccactacggggtccgtcccgtgctcctggttctgaccgggatcgtcacggcggtagtctgcgaactcctctgctgcgcattcatgcgccgcaaaccgtcggttctcgacggcaccgccgccgtcaccggcggcctcgtaggggcgatgatgtcgcccctctccccctattggctgccggttatcgccgccgcctttgccatccttgtcgtcaaaatgcccttcgggggagccggccggaatgtcttcaatcccgccgccgcggggctcgcggtggtgacggtctgttttcccggccgggtgtttctctacccctacgcgggccagctccagccccttcctttgggggatatcagcggtgtcctcaccgcccagtccccgaatatgctcctgaacagcgggggtggtaccaacctgaactggctgaacgtgctgcagggcggctttcccgggccgatcggcgccacggccgtggctgtgctgctggcatgtctgctctatttgttcgcccgccacacggcctcccccctgatcgcgctgccctatcttctgacctgtgccctgatcgccgcgctgtttccccgcgcggccgtcagcgccgggaccagcgtgatgctggagatgagcgccggagtgctgctgttcagcggcgtgtttttggtcactgaccccgtcacggcgccgcgtcactggctcgccaggatcctctatggcgcgttggccgccgtctttgtgatggtgctgcgccatttcggccgctttgaatgcgtcgcgtatttcgggatcctgctggcaaacgccctgtcccccgttttggaccggttctgctggggcgccgcctatcgcgtgagggaacgctggcaaatccggagaggaggcgggcggatatgaaccgaacgagaaccagctcgggcttccgccggctcggcggtatctttctcgataccttctttgcgaaaaacatcgtgctggtacaggccgtcggcctgtgtccgatcatcgccatcggcatcaatctgaaatacggcgtcgcgctgacgctgtgtacggcggctgtccttctcccgaccagcctgtgcatgtccctgtggggcagccgcctgcctgcgtggctgcgtccgccggtttatacggtgggcgcctcgatcctgctgctgggcgcggcggcgctggtaaaccagtacctctcccatgagctatacgccgctttatatctgtacctgcccctgatggcggtcaacaccattttcacctatcgcgcgggcgggttttccgtgaccaaccggccggtcgccgcgctggtggacgcggccggctcctccctggggttcggccttgccatctgcgtggtttccgccttgcgtgaaatggcggcgagcggaacgctgtgggatattcccctcggctttaccctgcagcttcccgaagcggtggagccgtttgccggcttcatccttctcgggttcatggccgcattcctcaaatgggtgaaggctggcgccgcacgggcggcccagcggaaggaggccgggagatgaagctcttttgggatatgctgttcaccctcctcgtcgccgcgctgatccaaaatctcgtgctgacgacggggttcggcacctccattatgctccggatcgtccgccggccccgcgatatctggatcttcagcggcctgcttgccgtcttttccgtgctgaccgttctgctcttttacccggtcgacgccctgatcgcctcccgtttcggaacgggctggtgggtcaagatctaccggccggtgatcgtgatcctgatcgcggcgatgctctatttattggccgccctgctggtcaaacggttcctcccacggctgtttggccggatccagcggctgctgccgctggcggcgttcaacaatgtggtggtaggggtggcgctggtcgtcaaccatcaggtccgggtcgagctgctgcccgccgtcgggctggcactcggttcctgcctgggcttcctgctgctctcctggctgaccgccgaagggatggaacggctggacaaccccgacatgcccgcggcgttccgcggtcttcccgcgacactggtgtatctcgggctcttggccctggccctgatgggctttaccccggcgttttccctgctttgaatgcccgccggtcccagttgcccggcggtatgaccatctcgaaggaaaggtgtggtggccgtgcccaaaaaattcaaacggcgaagcagaaacgtattccataagcgcaacacccgacccctaaaaattctcagctggtgtgttgccggtgccctcgtggtgtgcagcggcgttttagtcgccaaatgggcggcaacgaatccatttgcaccgacgcccgcctcatctgcagcagaaacggagagcaacgctcccgcttccgccgctcccgccccctcctcttcggagacacccgagcccgaaccctccctgcccggggacgggacaacgaaatccctgcgcgccgtcgtgatcgacaccgcccttctcgccgacaccgcggccctcgacccgcttctcgagcaggcggcagcggcgggctttaacggtgtggtctttgacctgaaagacgacaagggctgcctgcattatgcctcggctgtcgagcagggagcggcggtgctgcgcactcaggcgagccgtctcgccgcagaccaggtgctgccgatggagacccttctggcggcggctgcccatctgcgcgaaaaggggtttgagccggtcccccggctgtacgccttcaaggatcaggtcgcgccctatgcgctggcaaatgtgaaaatcggcgtcgaggggtcccctgcctcggtctggcacgacgccaatccgagcaagggcggcgttccatggatgaatccctgttcgacggacgcccaccggtatatgtccgccctggcgggagaactcaaaacggccggcttttcccttgtcctgctcgacggagtgcagtttccagaccgggaatacagcgcggattacggatcctccgagcttgccgggctgccccgcggccaggtgctgtcccgttttgtcggcgggatccgggacatcctcggagacggcctcatcctggggatgccggccttggcggcgacgggggatgcgacgaaaccgtttggggacaatccgctggtattgggcgccccgaatgccgcccccctggtcgggacggaacagtttaccgacggcctgaccgtcggaggggaaaccatcggcaatccggccgccgcgccctatgaaacggtccgccgcctgctcgaacagcttaatctccgcgttggactgatcgaatcgggcaagcagccgctgctgctgcctgttatcgggaacgcggaggaagcgagggcggtccgggacgcgctcggggaggcttctccctatctgtaccgtcccgcctccgggcaggcggatttcagtggattttaacctatcggaaagaagcggatgaacccgtgaccatcgattttcacacccatgccttcccggacaagctcgcggccggcgccctcgaaaccctgactgaaaacacccgccggtttgccgccatctatggagaaagccgtccccatcacgacgggaccctggccgggctggccgcgtcggcaaaacagggcggagtcgacatatccctgcttctccccattgccacctccgccaagccctctcactccatcaacgacttcgcggccgcggcggacaagctgccggggctgcgttcgttcggcagcgtccatcccctctcccctgcctggggggaggagctcgaacggctgcgggagctcgggctccgcgggatcaagctgcatcccgaataccagggctgctatgtggacgcccccgaaaccgtcgcggtcgtcagggcggcgggcgagctcgggctctgggtagtgttccacgcgggcgcggacgtaggaatggagcccccgttccactgcactcccggccgggcggcccgtctgcgggacgcggcgcccgatacccggatcgttctcgcccatctgggcggggattggatgtgggaagaggccctgcacaccctgaaagggatggatttttattacgataccagccgtgcgattccggaacatcccgagcggtgggacctgttcggtgatatgatccggacattcggccccgaccgtatcctcttcggcaccgactccccctggacggagcagcggtatgcggtggaacagatgcgggtattcctcgagaagcagcgttttacccccgcggaatcggcggccattctcggcggcaacgccgcctccatcttacagattcgggaggatcccatatgagcgagccgcagcctttatcccatccctttgccgcgttctttgatctggacggtaccttggcgattaacaatggggcgccatccggggccgaccgggatgccatccgtgctttccgccggcagggcaatttcgcgtttctctgtaccggcagagcaccggccttcttgtatcccgcggtcctcgatatcggcttcgacggcatcgtcgcgggggcgggggcacacatcacgctgggaaaccgggtcttgtaccggcgcttcctctccgaacagacgatccgcaacgtggccgacttcagctcccggaccggggatgtctgcatcctggagggggaaaccggtatgtttcaggtgaatatccgcggccattcccgctatccttgggccacaatcgtgagcggcgacgactttttcgcccggtatccgcatgaggtcatcaccaagctcacctatttctgcccgtttaacgccgatttggagaaactgctctccaatctccacgtcatccggcaccccgactatttcgaggcggtcccggccggctgctccaaatcggagggactgcagcgggttctcggggagctggacatcccgcgcgagaacagcttggcctttggcgacagcatgaacgatctcgacatgatcgcctatgccggcgtcggtatcgccatggggaatgcagcggagccggtcaaggccgccgccgaccgcatcacccttccgctgtcggaaagcggagtggccgccgccctggcggactggctccggcccgcggaataaaaaaactcaggaaaggcgcgatatagatggatccgattcactccaaacgccatcccggcgctctgtcggcatggctgccggccgcgttgtggctcgcggccatgctgctcgtttcggtgcagagcgtggccgtcacccgggagatgctgtccatggtggccggcgccgccaagggcataatgggcgccatggtcaaggacggcctttcggccgagacggccgacctcgtcggcaaagtcgcctgtgcgggggtggttttcctcggctatgcggtgctggcgctgctgctgctgcgcgcgctccggctgcgggggacggggccccgcgccgcttatggcctctccctgtccggctgtgtcctgttcgcggtagtcgcggagcttttccaggtcctgattcccgggcggcagcccacggtgggggaatgcgccctcaatatcgcggcatccttcgtcacgctgctgtgcgcggtgctcttttggtggatgtggcgccgttttcccaagctcgtcaaccgggaaaccgtcagttatgtgatattcggcgttctgaccaccgtggtcaacatcgtctcctacctgccgctgtataaattgctgctgctggcggggctgggggaaaccctggccaatgtcgtcagcaatacgaccgcctgggttctcgccgtcctgttcgcgtacgccaccaataaaatcttcgttttccagagcaaaacggggtcgatgaaagccgcgctgcgggaatttgcgctgtttgtcggggcacgggcggcttcctatgtcgtggacatgggcgggatgctgctgttggtcaacctgcttcatgtgcataacgccgtcgccaagatcctgaccaatatcctggtcgtcatcatcaattactttttcagcaaatggtttattttcaaccgggatgccaaacagccgccggagaaaacagcggaaaaaaccgccgacggctcctgctcggaagactaaacctcttccagccacactcttggaaaaccggggttcttggatatggaccggccggtttctccgctgcatttcagcgcatgtttcctatatatggcatcgtctatatgtcatgataacacatgttatcctcccgccgtttcctgtatactgtatatgggtgaacgtatatgatagacgagaacaaacgggcatataaggacctggggttttacatactctattttcgcaaaaaacgggaattgacccagaggcaattggcggatctcatcgatgtcaactatgagaccatcagccgcatcgaaaacgccaacacggggctgtcactggacatgctgctcaaaatttccaaggcgctggacatttccctaagtgagctcttcgcgcacgcgaagctctgaaaaggccaagggcgccggtgcgttcctggccggccctatcttttggctgatacccgtacaatagagggaggccggggcaaaccgatcggtttgccccggcccctttttctaaatcatcaagtgcggagcttgaacagctctcttagcttcaggcgttggccataatgcagcaccgacgccgaataaatccggacggatgccgccgcaaccaacacgatcgcaaccagaagcagcccgacagatatcgcgatatccgcagccggcactgtgtcgttgagcagccggaagggcatgacgaagggggaggtgaacgggatgtaggtcacgatccgcttgagcccctcgtccggcaggaacatcaccatgaacgccgcgtaaaaggagatcacgctgatgagcaccgtcggcatcatggcggagttgagatcctcggcccgactgaccgtcgcaccgcagaccgaattcagcatcgcatacagcgcatagccgagcaggaagtacaccagcaccagcagcgcagacgggacggtaaaggaagacaaggcgagcggcatccccataatggtgaaatcctccggcacgagaagggcgaagccggcgccgcccaccagcaggaacagccccatctggaacagcccgagcacccccatcccaaggcatttgccgagcaggatgcgggagggcttggctgagacgatcagcgtctccatgacccggctggttttttccgccgcgaccgacatggccacgccgtatccgtaataatacaccgcgaagaaaacgatcatggtcaggacgatgccgaggacatagccggtcatgtccattttgcccagcatcaccgtctggggctccaggggagccagggcgagcgaggcggtttcctccggcagacccgccttcgagagcagatccgacacatacagggttttgaccacgtccgccaccccatcggccgagatgccgctcaagatatcggtgacgtataccgtcaccgacggcagggtttcaccgggcgcgatttccacaatagaggtggt

SEQ ID NO: 4243 - DNA, 3769 bp, Unknown
  16S sequences of unknown bacteria
tatatatatttatatttaattgcgtagggttttccaatgtaggttttgcctgcgcaggtttatccaatgttggattttccaatataggcttttcggatacaggtttttccgatatcggctcttccgacacgggctgctcccttattatgtattccgtgcctcgcagtctgccttgctcatcgcgcgttcgtgtgcgggttatatatccctcgttttcaagctccgttacagcctttcttacggaatcaacgctttcgaggctgatatatgcaagcccccgcagggtataatcccagtcatcgggcagcgacagtattaaggacaacagcccctttgcttttaatgacaacgcgcggttttttaaatgatggttcgacattaccgtataatcaccggttcgctctactctgaataccgacatttttaattatctctcctttaatgtacgaaatcttttgtattcggaagcctttaagcttccctgcggcaattatatccgattaattttccgccattcaccgacatatttataatcgtgactgtatttgctttctttgggcttgtacaaatttgcacatctaatgtatttaagtgcgatattcgggaaaaacggacggctcttcgcccgagatattgccgttttcatcaacaaaagctgtcggtaaacagatccgtttcgggagcaccgccttcaagagcagcagaagtaattacattgattttcatgcaccccgcatttttgttttgcttttttcggcaggatgtgataaaatagatttatgtgtgtgactgcacattaattgtcgctaataaaaacatatgaggagatgaatgctgcaaaaacactacgcttaataatctcaagataaaaaaggggaattgatttatgaaaaacagcgatgtaactaaaaacgcctcattttgggacaaaaggttccgttataccgaaatggggtcgtcactcaaaacggaggtagtcgcgggacttaccaccttccttgcaatggcgtatattcttattgtaaactcgggaatgtttgcaaacctcggctctgtatcctttgacgccatgtatgtcacaacggcgctttcggcaataatcggaacggtgcttatcggtcttttgtcaaatttgccgctcgcgcaggcacccggaatgggacttaacgccttttttgtatacacggtttgcatgacactcggtttttcctacgcaaacgcacttgttttcgtgctgcttgacggaatcattttcgtgctgcttaccgccacgggtcttcgcaagattattttcgatgccattccgcatgttgtaaaggctgccatacccgcaggtatcggtttattcattgcctttttgggactgcaggacgcaaagctggttatcccgagcgaatcgacaggcgttacgctggcgtcctttaatcttctcggaggagccggatggggcgcggtcatgccgctcatagttgcggtgttctccctcctgcttatagcagtactgtcacacaaaaaggttaagggctctattctttggggaatactcggcggaacgggactgtattatatcctgggcttcaccgtaaagggtttttacaagggctttgcggaaaccctctcctttaatccgattaagccgttttcagcctttgcctcggaagcgttcggcaaggtatttaccgagggctttgacttctcggcatatttaagcgccgacggtcattcgataggcggacttgttattctgtttataaccaccgccctggcgttctgcatggttgatatgttcgatacgctcggaactctgtacggcgcctgccgcggcggaaatctgcttgttaaaaacgataagggcgagcttgaggttcccaatatggacaggacaatgatggcagatgccgttgctacctgtaccggctctgtgctcggaacctccactgttaccacctttgtggaatcctctgcaggcgttgccgccggcggcaaaacgggcgtcacctcccttgtaaccgccgctgcctttgcggttgcacttttcttcgctccgattgcaaagcttataccgccctatgcctacggtgcagcgcttatttatgtcggcgtgcttatgataggcagcgttaaggatatcgactggaaggatgtctcggtttccgtgcccgcattcctcaccatcgctatgatgccgttcacatataatatatcctacggtatagccttcggactgttctcatatgtaataatcaaagcattctgcggcgaaataaagcagataaaaatcggcacatgggtcgtaaccgccctgtttatagcaatgttcttccttacacattaaggaagctgccgatagctctgttctgaaaaaaactgcgtctctcccctttttcggggcgggacgcagtttttgttttagacagacgaaaatcataatcgctgaatttgtaatatataagcaatgaatatacattatgtaatttattttcatggcacgatatgcttcaaaacaggtgttttttgaattatgcgtactgtaagcccggatacggcaaacagcacaactgcatagataattctaagcaaaaaacgctgcggcgctatattaaaacacttcgacgcaacagtcataagttgaatatgaataagatatattccgaatgtctgtccgctgaaaaaagaaagtgattttattataaagccgggcatcttatcaaacggaaagtctttgaacagtaaaaataacgctgtcgaatagaaaacacagggtacattggtataacccttaaataatgaattcaaggaattatcccgaaaggaaagataccatgttccgaaaaagtgaacagccagtcccgatatgccgagtatatatattatcgctttcagtttaccggacagctcatatttgtccaaatagtaaccaatcaaggcgtattgcagatatccgttacatatcggaaatacgaatttcggattatgattgatttttccacccgaaagcgaagtcaaaaaaggtaatacggtgttaaccgttaccgcaactaaaatgcaataggataatgccttttttcgtttttctttcggtatgagtccaatcataggtaatgctaaatatattccgaatataataataaaaaaatagtacaacggcaggtatttgcaattaattatcgagtcaacaatatccgtcggtttaaaactgacactttcctttccgtcacgccatatcaaaaagaaaagaccgaataagctccaaaagaaaaacgggataacggttttctttattcgttttttaaaatattccgctgttgtgcagcggtcgcgataatcaatcaaagtaacgccggagatcattatgaatatgggaaccgcaaaataaaaaacacactcaataaaatttgcggcgacccaccctcgcgtcttgccgaacccccaaaatccgcttgtgtgaagaaacaagacacttaaacaggaaacaacattaagcatggttatatatgttttcttttctgtcattctatttttcctttcaatcgggttttataatttttcggaacgtaagcacagcaaggtttaagaaaaacgcgaaaatcaaaaaaatttcctttaatacataccccccgaagctgcaagaactccggggggtagattttccgaaataacagaaattatctctttgagaactgcggtgcacggcgagcgcccttgagaccgtactggcgtacagtttagcgccggttttccttgattttatgggctttttggcctctgc

SEQ ID NO: 4244 - DNA, 8011 bp, Unknown
  16S sequences of unknown bacteria
aaactcaccgcgcagacgatcaaagccgccattgcggcgggcgtcagcctcgtttgccttgtctgcctgttggcggcgggcgtcgtggggcgggaacttgccgatatcggcgtaaacggcgccttctcgggcgctgccgtgatcggcgcgctctttcagggcggtaaactgagttattcttatctcgtagacggtgaaaagatctttgtcacggcatatttgccgacggcgatcggcgtgttgctgaccttgtgtatcgcgctgtttctggcgctgtttctgtatcaggcagcgctcgtcgtacttttcagaaagcgcggcgaagataacgcggcgcgtctcaacgccatcggcggctgggcggggatcggactgggatttttgtgccttgtcgtctatgcgctgctcataaccctcaatataccgactacctatctcgtgacggcgggattggaagacgttgccgtgcaggccgccttttacaaggtgttttctccctcggtcatctggctggtgctatgccccgtctgcatcgtcgcgggcatgatccagcgcaagatcgattccgcgcaggtagttcttctgaaaaggtacattccctcgtatctgtttatggtctttccgctacttctcatcgcggttttcaatctctatcccatcgtgctgcaaacggtgctctcctttaaggactactcgttgggaacgggcattttcaacagtccgtgggtgggcatggcgaatttcaaggaaatatttctcagccccgaaatgctgcgcgtcatcggaaacacgttgtatatatcgcttttaaaactcatcggcgcgacggtgccgcccttgcttttgtctatctttctgtacgacatgcgcatgatgcgcgccaaaaaggtcgtacagacaatcgtctatatcccgcactttttcagttgggtcatcatttacgccatcacctacgcgtttttgaacgaagaggggcttttaagcacctggctgggtacgagttcgagtattctgaccgatcccgactggtttattttcatcgtcgtcctcacgaatatctggaaggagttgggctggggcacgatattatatctcgcggcgctctcttccgtgccgcccgaattgtacgaagccgccaaactcgacggcgcgggcccgtggcagcgcgtgtggcgcatcactcttccgagcattctgcccatcgtcatgtaccttctcatcatcaatctggggcagatcctcaaaaacgcgggcggcgaacagttgctgttgtttgccaacgccgtcaccaagcccaaagccatggtcatcgacacctggctgtactggtcgagtctgggcgaactgaaatattcgcttggcgcggcgatgtccttcttccaggctgcggtcggcatggtgctcgtgtacggctgcaataaactctcgaaaaagaccacgggcatcggtatgtggtaaggaggggaagtatgcaggaaaaaaagaaaaagccgttgttttcggcaaagtttcacgaaaacctctaccaggtcatctgcaccgccgtctgctttctggtcgcggcgctgtgcatctatccgctcttatacacgctggcggtttctttcgccaagcccgaggacatcaactattcgttcctcattcccatccccacgaaagtgacgctgtattcttacatacaggtattcaccgtcagttcgtttctggggcgagcgatcgcggtatccgtattccgaacggcggtgggaacggttctgagcgtgcttttgaccgccattctcgcctacgcgatggcgcgcaaaaatctgcccgggcggcggtacttcatgtatctgatgatcttcatcatcattttcaacggcggtctgattcccacctatctcgtagttaagagcgtggggcttctggataacatctgggtatatatcttcccgaacctcatcaacgcctggaacgtcatcatcatcaagcagtcgatggaggggatccccgcggaggtggaggaatccgccatgctcgacggcgtgaacgactggcagaatttttccgccgtcgttctcccgatgtccatgcccgtcatcgcggcgatcagtattttcacccttgttttccagtggaacagttggtacgacgcgatgctctacgtatctcccgcggcatcgcatctgtggccgctgcaatattacgcgaccatttcaatgaacaatctcaaccaggtcaacaatgccgatatcggaagtctggaaaatattttgggtatcaaggacgtggacaatatgtccatcaaaatggcgctcaccatcgtcacaacgctgcccattctgtgtatctatccgttctttcaaaagtatttcaccaagggcgtttaccttggtgcggtaaaaggataaaaaggaggttttatgaaaaagatcatcacattgcttttagggctcgttctcgtatgcggttttgctggctgcggcgggagcggaacagggggcgggaacaacgcgcagaagatcaacatcctgttttcgggctgggtcaatacgcccaccacggcggacgatccctaccgcgcgtacatcgccgaaaattacgggctgaacgtgcaactcaatgccaacagcgattttgaaaacgcggcgatcatggcgttcaactctaccgagaaccgtcccgacatcatcagttttcccagttatacgagttatcgtaaatttttcaaacagggagtgcttctggacgattggacgccgtatctgcagtatatgcccaatttttccaaatcgctgaacgcgcagtcgcaggcggcttccaaagcggtgtttaccgacggagagaaactgaccgcgctgtggacgcccgccgatccgcccacatggtcgttgaaactcagagaggactggctggatatgtaccgcaaagacaaggccaaggaagagacctgggcgccgaccacgcccgacgatctgctcgatttcgcgcggtggatagacgcgcagaaaaaggcgggcgtgaaagagttcgaagacgcgtacgcattttccaccgcgggcggcggaaattctctgggcgttctcggcacctggatgcctctcatgttcggctccgtgaccgtcgcgccctacggcttttacgtggataagaacggcgaagtgcagttcggtaccaccgacggctcttataaggaatttctggattatttcaagatcatcgtcgaagaacagctcatcgagccggcctggttcacgcagcagtatgcggagcgcaagcgtacgtacgcgggcaagatcggcatcgagtggatgcctggcgagatcaccaaaaacacgcaggcggaattcaacgacaaaaagatcacctacgcccagcgcggcatgacgccgcccgagggcaagagcgaaaacgacgtcatcgacgcgaccgatttgtggaagacgtacgctcttcccaaaaagcagggcacggagaacgagcgcgcgggctatatgcccggcacggggctcgcgggtaaggtcatcaccgtatccaaggccacggcgcagtcgaagagcaaaatggaaaaaatatgtaaactcatcgacgatctctattgctatttcgatgaagaaacgggcgaatacaagcggggcgaggcatacgacgcgctgcgctggggcgtcggcatcgaaaaaaatctgcaattccagaaaatcgagggcagcccgcaggtgtatatctgcaccagttccgaacgcgcgggatttaccgaaaaatattacaaggaaaagcaaaacggcgcgtgggactggggcgcgtggttctcttccaccaacgacggcgtcatcagcgcggacgaaccgcacgtgaacgcgttggtcttgaagatcgcggagcacgacaatctgaccgcgaatatgccttcgctgccgcagatcggcgattacgtcagtcttgacgcgagtcttttgagcgacatgacgagcgatatggtttcgttcgagtacagatacgtaaacagcaaatggagcgccgaaaacgcacagaaggagtacgattcttacgtgaaaaaatggaactccaccctgcacggccaggaatttctcgccgccgcaaaaacgcagtttacggaacttggactcatcggataaatgtaaaatatgaggaggaatcagatgaaaaagaggtttttgacggcatttttgtccgtgatgatggtattttgcctgtctgtttcggcaacggcgtttctcgcttcggcggccgccgtgcccgacgacgatacctatacgacgaacgtcgatctgacggacaagagcaatttcaaaggcgtgttcgcgggatcgggcaacaaggtgatcgcgggcgaggccgatgagatctgggatttcgatacgcagaacaagacgatcacgtccaaaggcgacctttcgacgaacgacgaggtatggtcgaatttctactatctgtattacgacaaagcggactacaagaatttttatatggaagtcaccttacagcacgtgggggatagggcgggctggagcggcctttgcttcggcgtggaaaataccgccaaacccgccaaagatagtgcgaatcccaaaggcggtctgacatttgtacagggtgacggcgtttatacctggcacgatcagcaaatcaacaacaccgaatggaacgatacgcatatcgcggctaaggatttcaacggcctttccgataccgtacataaactgaaagtgtacaaaaaccacattcagtactggctgaacgacgaagaccccatcgttgtcgatctgcagccgggcgacgaggccttgacctcgggcaaagtgggcgtcgccgtgaccaacaagacggtttccgtcaaatctttcaaggtgacctatctcaaagcggacggcaccgtcggcaccgacgaaacgatccccgccacggatatagaagtttcgggcatcgaaaacaacggaaaagccacggtcggcacacccgtccccgttaccgtcaacgtgctccccaaggggtcggacggcgaatacacctttacgagcgacaaggacggcgtctacctcacggacggaaaactgctcttcaaaaacacgggcgagtacaacgtgacctttacagccaagagcaaccccgaaatcaaaaagacttttaagatcaccgcggaagacgccgacagaacgggttatatcgcgtatccgctcaccgaagagggtatgagtgcgtttgagtcgatcggcattgcaggcaactcgggcaacggcggcgccgccgcgaaatgggacgatctgttcaccttgcaggacggcgtgctcgcgcgcaaagtcaccgcggcggggcaggtcggcaacgattacggcgtactgtatttcaacaaccgcgaccgcaaaaatttcgaactcgtttacagcgccaagggcaattccgacaacggttggttcggcgcgtttttcgccatgacaaacaagacgcaggcgggcaaccagacgggcggctctgcctttatgcagaacgcttccgcggcgcacaacgccaccatctggggcggcactcccgtaggcggcccgtacgagggcggctctccttcctacgtgcagaacgaattcagcacttttaaactgcgcgtattcgaagggcagatcgatttcttcgtagacgacatggtcacgccccgcatcagcaaaacggtagagggcgatctgacgggcgccatcgccctgtttgcggacggcggctgcaacgcgcagttcaaggacgtctatttcggaatgctcgacgatgagggcaatctgatcgactacaaagcggtggaaagcgtttccattgccaacaaggcgcagaccgcttacgtcggcgacaaactcgacctgacggcgaacgttttgcccgccgacgcgaccgataagagcgtcgcattctcttcgagcgatccgaccgtcgcggcggtcaacgccgagggaaaagtgaccttcctgtccgaaggcacggtcaccattaccgcctcttctaaggacgacgcgtccaaaaaagacagtttcaccgtcacggtgagcaagaaagtcacggacgttgcggtgacttccgtttccatacagaacaaaccgaccgccgcgacggttggcgacaaactgacgctgaccgtcaaagtcagccccgacaacgcgacgaacaaaaacctcgcgttcgaatcgagcgacaagaccatcgcgaccgtatccgaaacgggcgtcgtcacgttcctcaaagcgggcagtgtgaccatcaccgtcaagtccgaggcggatagttccaagagcgattctttcaccgtgaccgtttccgaaaagaaagaggaaaagagcggctgcggttcgagcgtcgcggcggcgtcgatgattttcgcggcgggcgcgctggcggcggccgtgctcgtcatcgccaaaaagagagccgaataaaaggagttctatgaaaaaaatcatatcctgctgtatggcagcctgtctcaccctcggcgcgctgatgcttggcgcgtgcggcgggggacgcgaatcgggaggagtcaaaaatatgttgcccatcgaatatacgcccagttcgtacgataagggaacggcggattccaaagtcgttctctccgtgcccggaaagactgtttccacgggcgacgagatcaccgcgaccgtgaaaatttcctccaagaccaagttcgaagagggctacgaatcggtgtattatatcgtggactggggcgacggtacctgggcgtaccagggccccggcttgcagagcgcgagcaagcagtcgagcgtcgccgtgccgcacacctataaaaaggcaggcgattataaggtgagcgcgacggccgtcgccatgcagaacagcgaggccaacctcggctggacggaaaccaagaccatcaaggtggagggcaaggattacgaacccgataccatgatccagaacgtttcgcccatatcttcccccgcctacgataaggagcacggcgcggaaaagatcgccgacggcaaacctacttattttaagtcccaggcgtcgaaagacatcgacgacgagttatatgcgggctatctgttcgatgaaaattacaccctcgatacgatcgaggtgaaaattcccgccgaggcggatattttcccttcgaacatcgccgtcgagtatacgtcggatttcggcgagagttggcagagcctgcccaaatactattacctgtacgattacagcgtggggcgctttaatcccatcatgcgttttccgaatcccaagggcgcgacgctcgttctcaatctcgacggcatcgttgccaacggcatacgcctgacgcagaaactgagttccatgaacctgagcgaactcgacaaggaaaagtgccttatggtcgaggagatgcgcgtgtacggcagtctgcgaaccttgctttacacctcgaaagggcacactttcgacgcggacctcaacaatatgtggacgatcttcggtaccgccaagaccgaacccgtggtgctcggctcgatcatgggcgaaacgcagaacgcgtcgcctttccgcaccggctccgcgatgatcggttccaccgaatggatggaatgggtggggctgaaattcaacttcaccgattatgaaaaggtcaacgacacttatctcgacctgctcgtccgtatccgcacgggcagcgatacctggtcgaacgacgacggctacgtctgggcgacgcccgacagcccgctgcatttaaacgccacgttcggctgtcactattcgctcaatcccatttatatcctcgccatccgcaattatctcctgcagtgcaaccgtcagggcaagttcaacgacgacgggaccgaattcacggagtttttaaatcttaccaacacgcaggggcagtccattcagtacaaagtggataaggcgatgagttacatgatgaacacgctcagcggcaagacgggcattatgaccatcaacgatcccgccaaggacggcaccacgtcgggcatgtcctccaactattgggacgtgcataaaacgttcggctata

SEQ ID NO: 4245 - DNA, 15306 bp, Unknown
  16S sequences of unknown bacteria
ccaaacatgagaaagcagcgatttacgtagtaaatcagcggatttcgaatgtttgcagaactgcgggagcatgaaatgcgaagcaatccgtgtgtcataggaggcaaaaggtattttgaccttttgaccctggcatcagtcatatgatattgagaattatagaaaggctaccgcctgctgctctttcctgtgacgggatgtacacggcaggcttttacgttatgaaaaagcacacaaatgattttgaacatgacgccatccctcagctcgtgctgcggctggcgattccaacgatgctcgcgcagctcgtgagcgtactctattcgatcgtcgaccggatgtacatcggcatcggtgtcggagatctggcgctcgccggggtgggcgtctgcagcccgatcgtgacgctgctctcttcctttgcctcactcgtcggcctcggcggctcgccgatcatggccatgcggatgggcgaaggtaatcagaaggaagcccgccgcatcttaaataatgcatttctgatgctgctcgggctttctctcgtgctcacggtgctcttctggttctcaaaggcacagctgctcatgtggttcggcgcgagcacgtcgacctttgactatgccaacacgtatgtgagcatttatacagccgggactgtctttgcgctcatttccgccggcatgaacagctttctgatcgcacagggcttctccgggcttggcatggcgaccgtcgtgctcggcgcggtgctcaatatcatcctggatccggtctttatcttcctgtgccatatgggtgtcgcaggggctgcgatcgcgacggtgctctctcagctcgcctcctgtgtgttcgtactgtactcgctgttttcgaaaaaaatgccggtgcgcctcggcatcgacggctttcagctgcgcgttgtgagaaaaatcgtctcgtttggattttctccttttctgatcattgcaagtgacagtatcctgctcatcgtgctcaatacagtgctgcagcgctacggcggtccgggcgagggcgatacgctcgtgacctgtgcgacgatcgtccagagctatctgctcctcatcacgatgccgctcggcgtgatcacgctcggcagccagccagtcgtgagcttcaattacggtcttggcagcgcaccgcgcatgaagcaagcaatccggtgtatcgtgctgctctgcgtctgcttttgtacgcttatgatggtcgtgacacatacgtgctcgccgctctatgtgtcgctctttacaagggatcccgagatccggctgcgctcggtgcggtatatcaagctctttaccgcaatgatcatcccgcttgccgtccagtatccgctcgtggatgagacgactgcgctcggtcaggtgaagctcgcactattctgctcggcattccgcaagctgatcttctttagctgtctgctccttctcccggccgtctttactgccgaggctgcctttttctcggagccagtcgccgatgtgactgccgcctgcatgacgactttgatcttccggcattgtttcccgcggatcgtggcgtcacggctgcaggagcgagaacgcacgcaggcataattattccagatcctctgctgcgatctgatatcgcttcatcagctttcacatccatttgcaatagacgcttcatgcagtggataattgcttcacatttctactgtatcactcgatattttcaaacatatccgccaatgtcatagaaatattggggaattctctcaatgtcacaaccgtatccgcattgtaatgtttctcttccggatcgtcctgaagcacatagctgtactttagatcatattctccattttccagataatacacttcaaccgctctttcttttggagaaataatccagtattctgcaattccggccttctgatagatctctttttttatcgttctgtctttcagggcggttgccggactaagtgtttcaactataaaatgtggagttcctgtataagacccgccttttaaatgcttcctgtcacaaataatcataatatccggaatcacatagtcatcattttcctgtgcctgatacttgtaatccagattttccataaatgccagacacaagcttccccttattccattttttataatagaataaatatttccgtcaacaatcccgtgctgatagttgggtgacggcgacatgtcataaattaccccgtttattttttcctctctctgagtgtcttctctcaatgatggcatgcaatcactccctttcttttccagcatcaatgatacacggattgctccgcatttcatgctctcgcaatccttgtatcatcattatatcgaagctttccggtaaacgcaatataaacacccttttatcttctgcgcagacatcgcttctcaatgagcccgagcagcccgtacagcagcatcgcaatcatgcagagcaggacgatcgacatcatgacccagtccaggcggaatacctgactgccgtaaatgatcaggtagccgagtccctcacgtgcgccgatgaactctccgatcaccacgccgacaagacagagaccgatattgaccttcattacgctcagcagcagcgggacagttcccggcagcatgacctttctaagcacatcgcgcttcgtgccctgtaaggtgtagatcagcttgattttatccggatcgacctcacaaaatccggtatagagattcagcactgtaccgaagatcgccacggaaattccggagacgatgacagacttcagatttgcaccgagccagacgatcagaagcggcgccagggcagatttgggcaggctgttgagcacgaccagatacggctcgagcacctcggacagtccggcgctgtaccagagcagcagtgccgccccaatcccgagggcgacgacgatcgcaaagctcagtaatgtctcgcataaggtcacacctgtgtgccggaaaatgctgccatcccgccacatgcccgcaaatgtgcgtactactctggacggactgctgaaaatgaagccgtcgatccagtgcagccgcacggcactctcccacagcgccagaaatgccacagacagcagcagccggaacgccagaatccgggtctgccttctgtgcaagcaccgcagatactgttcctgcgacatggaaatgcgttctctttcacccatactgattcagctccctccagatctgattgaaataggtcctaaattccggctcgttccggcgggcaaacggtgtcagatccgacttttcaaacgaaagcttcaaattcgcacagatcgtcgccggacgtctgcttaagaccaggacgcggtctgccatgctgactgcctcagagagatcatgcgtcacgagaatcgccgtcttttgctcttttcggagaattgccgccacatcatcacagaccgccagccgcgtctgaaaatcgagtgcggaaaacggctcatcgagcagcaaaagctccgggttgggcgccagcgtccggatcagcgccgctctctggcgcatcccgccggaaagctccgacggatgggcatttcggaagcgccagagcccataatcgcgcagcatcttctcgacccgcgcctctgtcttttcattaagccggtgctggatctccagacctaaaatgacattctggtaaatcgtcctccattcaaataagtgatccttttgcagcatatagccggtatccttgcggatccccgtctgcgtctttttgcgttcctttgtgcagtacgcttctccttcccctgtgctgtgtaataaaacagagccgctctccggtgtgagcagccctgcaattaaagacagcagtgtagattttccgcagccggacggaccgaccaccgctacaaattctgctttctgtatctgaaaggatatatctgacaatgcacagacttccccgtttttgctgtggtaagcataggtcacatgctccagttccagtaaaggggtcacggcatacacctcccatctcacagtgtattctatgccataggatgcatagtgtgagcgtgaggaaggccggtgataacatgtttgtagaattgcgggagctgcttcgcagcggagcaattcgtaggcatcagtcggggggcaaaaggtattttcccgcttcatctaaaaaacgggcgacaaactttggatttgaccagtagtaaagatgcggatacccagccgcgctcgccttcgtgccgtgtatgcagtcccagctccgcccggtgaccggcttttctgcatggtagtcgcttcccggatcggtgctgtcaaaatagtggaactcatgaccgcggatcgtctcacccggtacgagcagctgtagctttccttcttttgcctgcaaggtaatgtagccaaaccggccaagcttcggcgtccggtaggactcgcctagcagcacacccgccatgggataccaatgatcctgcatatcctgcattttctcatgcagatacatgaatcctccgcactctgccaggtagggcatgccgccctcgatcgcccggcggacagacgccagcatggatttgttttcgctgagcgcctctgcatacaattccggataaccgccgccgatcagaagaccggaacagccatccggcatcaccctgtcatggatcggcgaaaagtacaccagctctgccccgagcagctttagcagctccaggttgtcctggtaatagaagcagaaggcttcgtcctttgcaacggcgatgcgaagaggcctgctgcattcggatgtagcagttttagaaattgccctctttccttccgggctctgctgtacctgcagtacatcagaaacctctttcggaatatcccctgcctcatccgggtagtccctggcgtgctctgcaatcgcaagcagcgcctcaaagtccagacttttctccagctctcctgccagctcctccatgcgggtctgcagatcctgaatctctcccggcgtcacaaggccgaggtggcggctctcgacgcggcaggccgtcagctccggtacatagccaatcagcttcaagccggtctcctgttcgattttttcttttaagagcatggatgtcatttttgtcgcgcggttcaggatcacgccctgaatcacccgcccgtcggcgcgctgatagtccacaaaccccttcagaaacggaatcagggaaaggctcataccctttgcgttgacgatcaatattaccggcgtatcggtcacacgtgccagatcataggcggatgcctggtctgtgatcccgccgacgccatcatacagtcccatgacgccctccatcacagaaatcccggcatgctttgcgctgttggcaaagaggtaacgggtcgtcttctcccccgtaaaaaaggtatccaggttgcgggacggcgtcccgagtacacggctgtgaaacatcggatcgatatagtccgggccgcatttatatgaggccggtgcacagccacggtttttcagcgcctgcaaaatcccgcaggtcagcatcgtcttgccgctgccgcttgaaggggccgcgagcataaatcttggaagatgcagcataattcctccatttctgcattcagaatgaaatgatatacaccggattctgtccggtcatcatgtgataacgtcccagtgtgcgggatctagatgcacagatctggacgatgtcggcgtcgatttcccgctcctttaagatgccgagcacctcggaaatgctctccagcgcaatcgtgttgatgacgatacggatgtccggattctttgcccgcagtacatctatgatttttcccatgtttccggcgcttccgccgatgaaggcatgcgtcggtaccggaaggtcctccattgcatccggagccagcccctcgaccggaatcaggttcgagagcttcagctgcttcgcgttttcccggatcagctcgatgccctccggattccgctcaatggcatagacacagcctgacgtacagagccgtgcgcattccgcggatcccgagccggtcccggctccgacatcatagacgattgcatcctcggtcagctgcagctttgccacggaaaggatccggatctcttcttttgtcatcggtaccttgccgcgcacaaaggtctcatcgttcatgcccggtgtgatgatgtactttgcctccgggttttccagcatcatgatatgcagtcccgtcgtcgttaccgtcagaaagtcctccggagctcctgacgtcaccgtctcctccgggtaagataaattcgtgccgactgtcactcgcacctgatccatctttgcctcatgcagcttcgcgcaaaggtgcataacatcgcccgcgccgcttacgatcatgatgatcttcggatagcgctgcacgctgttcagaagattcacctgcttgccgtgcgcactgagcagctttgcatcctgccaggaggtcggaatcttcgaagcaaaatagacgactgatgagattccacagtaaaaatgcacattttctcctgcgaacgcctcctgaatgccgcgcgctccgctgtaaaatccgacatctccggacatcagaaccgcgatacgccggtactgtggatgcgcttccaggtatgcaaggatcttcgtgccgatatactctgtcacaagcggctggccggatgacagaatgcccatctcctgcacactcttcaaaagccgatcggcgccgaaaatgatctgcgcgctctttatcgcctctgccgcatcgtgcgtcagtgtgccgagatttcccataccgatgccgatgcaggaaaggactctttcttcacttgtttgggctttctcgccttcaagctcacatcccagtgcttccccgagctttttaagcagtgccgcaaagtccagtcccgactcctccggtctgcggatcacgaccatgcgcacgccaagctgatgtgccgcctgctccttttccggatagcctccggtcgtaccggtatccttcgtcacaagaaacgcagcatcggtctgcttcagcattgcgatattcatctcagcggaaaatggtccctgcatcgcgcagatctgctttccctccataccgagatttcggcactcggtaatgacacttgccgacggaagtacgcggataaacagacggccaagatcggaaatccgttccgtaaagacatgcagctccttgctcccggtcgtcaggaaaatattgccggactgcgtttccagataagtcgccgcctctgctgcggaatttacccaggtgatcgaagagtcggtcccggcatccctcccgcttatcgaagtgctttgatgcgcgtcagatgttttggaacccgccacgcgtcccgcatcccgcagatagcgcagatacggcatatctactgccttgcacgccatgcgcacattttcggataccgctgtggcgtacggatgcgtcgcatcgacgacgaccgcgtagtccccgcttcgcatcagcgcttccatctccggcacatccagtcgtccctgacggatctgcacatattccgtgtgctccatcacttcctcgccgtagtccgtcgcgacacacaccgtatgccggagctgtcttttatcgagatactcggagagcatccgcccctccgaggtcccgccaaaaatcagtacctgtctcatatccgatagccccgcggcgtcaccatacgtccgccaatctccttcgtcatggaattgccgataaatacggtcgtaaacatgttgacttccgcattgcgcaactcgccaagtgtgtatatttttgcacactcaccctcacggccgatattttccaccgttccgcagatccggtctgccggaagcacagagagcagaatatcgcatgccttctgcaggtaatccggacgtcccttgctcgccggattgtaaatggcaagcgaaaaatccgcctccgctgccaggcgcagacgcttctcgatcttctcccatggtgtcagccggtcgctaaggctgaccactgcaaagtcatgcgtcagcggtgctccgagtactgcccctccgctcagtgcagcagtcacgcccggaatgacctctacctcgatatccgggtaaccggcgccgatctccagcatcagtccgctcatgccgtatacacctgcatctccgctgcagaccatcgctacggtcttgcctttttgggcttcctcaaatgccatctcacagcgccttgcttcctgcgtcatcggcgtcgtcaggtattcttttcctggataatcctctttcagaagattgacatatacagtatatccgatgatcgtgtcacattttttcagtgtttcatctgcgcggatgctcatgcggtctgccgcacccggacccattccgactacatataatttattcttcaaaattgtatcccccatttctgaatggccagcgcaacggtcacgccatttccggcctctttttttcgaatcattgtcccgccgtctccggcaagcagtaaggcagcgcgctcgcagacattgtccacaccggtcgtccttttgacaaattcggacggtgtaaagtcgccccggacagccagcagctgctctgacgtataggtggtaaaggaaagccccatccggcgcgccgtctcccaaatgccctcctcatcctttttcagatcaatcgatgcgatgccgaccagcgcttccttcggtatctgctcttctgccagaacccgccgcagcgcctccgacacagcatccgccggctttcctttacggcagccgatgccgatggtgacgacgcgcggcgtgagaacgagtgtatcatacatgtccttttctgcgggctgcagccacgggcaggtacgttcggaaatccatatccggcagccggccggtgtatggccgccctcgtttcctgtcggctctgccttcttcgggctccatttctctgtgcggtttccctgtatcagcgtcagctccggcggtacagctccctgcacggttccggaacagtacacctccaccggctcaccgcgcaggatcgccgcctcgacgcatttcgccgctttcatgctgctgatcgtcagatgattgttctttgcaaagacatccaccgcaatttttccgcggacatcggaggccgtcgtgatgacaggggtcgctccagtcagccctgcaatcttttgtgcgtacgcatttgcgccgccgatgtggccggacagcagagaaatcacatactgccccgcctcatcgagcacgagcaccgccggatcctctgtcttgctttttaaaagcggtgcgatcgtccgcactgcaatgccgcaggctccgataaatataatcagctcggctttggcaaagcaggcggcgcaccagtccttcagtcccttttcatacaagagaatctcatactccggtgcaagtccatccgcaatccggtgtgccagcctgccgccctgctctgtaaaatatgcaattccggcttttttcatgatctcacctgtttctttcttctgattctcctcttcgccacagaacggatctgcttttgctcctccgtccggtgacgtcggatgactggatctacttccgctcctccgtccggtgacgtcggatgaacggatctacttccgctcctcggtcgcctgacggaactccgtcgtgaaagccggatgatacagctcggaacgattgtatccgctctgtgctacggtatcgccgacgatgatcagcgcagtctttgtaatattgtactccttcgcgcactgtgccagtgtggaaacggtgcagatatggctctcctcctccggccaggttgccttgtacacgatcgccgccggggtatccgccgcatagccgcctgccatcagctgctcactgagcttctcgagcatgcctgtgctcaggaaaatgaccatcgtagagccgtgagaggcgagctttgcgatctcctcgcgctccggtaccggcgtgcggcccgccatacgggtgatgatcacggtctgggaaatacccggaagggtgtactccatcttcagcgcggaagccgctccgcagaacgcgctgacgcccgggcagtaatcataggcaatgcccttttcctcgagcacatccatctgttcccgaatcgcgccgtacacgcacggatctccggtgtgcagccgcacggtcgtcttccctgccgcttctgcctgatcgatcactgccagcacctcttcgagtgtcatctttgcgctgtcgtatacctcacagccttcttttttatactgcagcagctccggattgaccagagatcccgcataaataatcacatcagcttccccaagcagtctgcttccgcgcacggtaatcagatccgccgcgcctgatcctgctcctacaaaatgtaccatgatgattcctcctcttattttttcgttttattttttcgtttcattttttcgttttattttttcgggtccttcacaataatcagcgaatagtagctcgcatcctccggaatatcctcagctctcgtaaagatccgctcattttccataccgcagttttctaccataaatacctggctgtcagactgcatcagcatctcctttaccgctccgatcttgcgggccgacttcatgagcacgcgcgtccccggatagctgatctcctgctcgatgttgtgcaccgccgggatgacatgaagctcctcattccactcagtcagggagatatccatccgcgccgctgccgcgcagaatgacgggataccgctcacgatctgtgtcgcatagccgtgtgcctttacccggctgtggacatacatgaaggtcgaatacaccgtcgggtcgccaagtgtcagaaatacgacattttttccttccttcagcacgttctcgacctgaagtgccgccgcatcgtgattctttgccagctctgcgcgatccttgatcatcggcatcggaagcgccagcagcgtcttcttttccagctccggtaccgcctggaccgcaatacggtaagccaccgtctccttcgcatcatttcccggaacggcgatcacttcattttcccggatcacccgcaccgcctttaaggtcatctgctccggatctcccgggccgacacctacacctattaaaattccactcattattcttctccttttcgtttccgtcaggcggatattcgcaatccgctttgctgcttcgcagcttattgcttcacgcaatgaaagcagggaatgcctgattcggttaaacgcgatatagcttctgcttctccgccgctatcagcttcatcagtgcttccgccccccttgactctccgaggtagccatactgatttgagaaaagcacgacctccgtgcgcagctccccgccgacgtgcttttgcagataaaactgaatcctgcggatcgcttctgatacggtttcctccagatcgccggtctcctttaaaatgccgacggcctcctcggtcgtgttcgtcgtaagcagctgctttacggtatccgccgacgcaccggcacgcatcgcctgcgccgccatcagctctgcacggcagtctgcatgggcagaatgcgtattcataatgccgccggacaccttgataaatttcccgatgtgcgagacaaacagaatcgattttacgccaagctgcagcgccatatccagcgtctccccgacgtagttgctgcacttcatggagtgctccggccgcagcagctcgtactgcttctgcccctttaaaaagtccgcaccataattgcccggcgtgatcagcagatgccgctcgccgttttgcaccttctgacgcatctcgatacggatactgtcgatcagcgcctgttcgctcatcggcacgacgattccgctcgtcccgagaatcgagataccgcccaggatgccgagatgtggattgaaggtacgctttgcgacctcctctccgccccgcaccgagaccgtgatctgaatcgccccggtatagccaaactctgcgcatacctcccggactccctgcgtgatcatactgcgtgggacacggttgatcgccgctgccccaatcggctgctccagccccggcttcgtgacacgtccgactcctaccccaccgtctatcagtacctgcgcagactccgttgccgcatctgtatccggcatacccggcacaggcatctctgccgcatcttcccgggagacctgttttgcttctgcaaaaatcagcagtccatccgtcgcatccggatcatcgccgccaaatttacgcactgcgcaggacgcgcgtccttctccgattaccggctgtacaatctccagatccagtgagacacccttcggcgtcagaagccgtacatcccggcagatttttccggtaaacagcatccgcgtcgccgcaagagacgctgccgtcgcacagcttcccgtcgtgtagccgcactgcaggcgttcatttttctgtaccacatagacatcctcgatgccgcttttatgcaatcgctcctccggcagcggcagccggtccgtcagctgcataaaacgggcgcccgccgtgaccctggccgcatcttgtatctcacaggcaaagccctcctggttttttacctgccagtcaaaataggatttttcttctgtacaaaagcgctccatcagcgccatgattgtcccgccatgcaccacataggctacggatgcacagcccgcctgccgcagtgccgcaacactctctaaaaacgcctgacagcagcgttcctgaaagctcttctggctctcaccgcccggaaacggcagggtaccgttgctgtcgatccagcgctggtactctgcatcccggctaagctccatatagttgtggtactcgaaccggccaaaatcgcactccttcagcccgtcgcagcattcggaaggaatccccggaaacagcagggaagccgtctgcatgcagcgcttcagcggacttgtcacaacctgcaccggaatcgggtacctcactcgcagcttttttaaggcagtgaccgcatcctttgtcaatggctcatccgtcgtccccacatatcgtttttccagattgcccggcgtcgcgccgtgacgtatcagatataccttcatatattattttctgctcccgtccagttgatacagcagcgcgttgcagatcgccgccgccacgttgctgccgcccttgcgtccctttgccacaatatagggcacatccgtctgcatgatcagctcctttgactgtacgacattgacaaagccgaccggtacaccgatgatcagctccggacggaacgtcccctgccggatcagctcatataagcggatcagcgcagtcggcgcatttcccaccgcatagatcagcggacgtcccagccgtgccgccttatccacgcagacggatgcccgggtcgtcccctgctcctttgctgcctgtgcgacatcttcatccgaaataaagcagtgcgcctccccgcctgccagctgcaggctctttttattgataccggagagcgccatcttcgtatccgtcacgatccatgcgccgtttttcagtgccttctgtgcgatctgtaccgcattttccgaaaagcagaggttctgaatgtagtcaaaatctgcggaggtatggatcacgcgcttgataatcatcgcccgctcatcgtccgggatcgcatctcccgcctcctgtgatataatctcaaaacttctctgctcaatctccatcggcttcagccgttcaatctgatcgatatccatatgtttcctcctgtcttttactcgattctattttagcgttccactcccatgatctcatatattttcttcatatccagatgcctgcgcagcccgtccgctaaaatatcgtactgctgctccttaaatgcggcaaaatccatcgaaagcgtcatctcctccgtgatccccttcgcctctgccagcgcacgtacgacggcatttacgacggcttcgctgtcaaaaatcccatgtacgtaagaaccgcacacgttgccctgccatgcaccctcctgcttcgtcacgcccgtgatcgaatctgtgatctcggtaaacggctgtgcaccgctgccaagcgtcgtctgtcccatgtggatttcatagccctctaaggcacatccggaaagtgctcccgcaaggccgtccgcttccggctttaccggcaaaataacgccggaaactctggtccgcgccttttccgcctcgaataccgtcgtcgtatcgagcagtcccataccgcggatcacgccaccctcttcgacaccgtccgggtcggaaatctccataccgagcatctgatagccgccgcacacaccgaagatcgcggtgcctgccttctgtgccttcaaaatctgtgcttccagaccgttctggcgcatccagagcagatcccgcatcgtattttttgtccccggaagaataatcaaatccggatggccgagctcgcgcgcttccttgacgtagcgcaccgtcacaccctcgacgccctcaaacacattgaagtcggtaaagtttgaaatacgcggtacccggatgactgcgatgtcgatctgtccgacctgctgatctccgtccaggcgctcgcttaagctgtcctcatcctccagactcaccttcagatacggagcaacgccgacgaccggaatgccggtcagcttctcaagcatctccacacccggatcgaggatcgtcttgtccccgcggaatttgttgatgataaggccgcggatacgcgccttctcctccggctccaaaagctcgaccgtcccgtaaagctgtgcaaacacacctccgcggtcgatgtccccgacgagcagcaccggagcatccacgagcttcgccattcccatatttacgatatcatcctgctttaaattgatctctgcagggcttcccgcgccctcgatgacgataatatcgtatttctcctccaggtgatggtacgccttcaaaatatccggaatcagcgactgcttcattttgaaataatcgcgggcattcatcgtgccaagcacttcgccgtttacaatgacctgcgaaccgatatcatttgtcggcttgagcaggatcggattcatcgcaacctccggttcgacgcctgccgcctccgcctgcatgacctgtgcgcgtcccatctccagcccttcctttgtgataaaggaattcagtgccatattctgtgatttaaacggcgcgacgcgatagccgtcctgatgaaagatccggcacaggcccgccgccattacactttttcctgcattggacatcgtcccctgcaccataatcaccttcgccatttctggtatccgttactgaaaacttataaaaagttataaacttctatgtttcattcctactt

SEQ ID NO: 4246 - DNA, 32759 bp, Unknown
  16S sequences of unknown bacteria
tcgaaagtacctggctggacacggcccgggaggatagatcatcgccggattccattttagcagcccatcgcattgcgatgggctgctcttgcatacaaaggagaaacccatgcggatcgtggatacgcacaacgacgccctgctccggctgcgctacccggaacaggggctgacagatccagcgcgccacgtcacgtgcaggcgcatgcgggagggcggcctgaccatgatgacgttcgcggcctatacgagcgagccggaggaattcggctccatgctgcacatgggcctgcgcgagatcgacgcgttctacacgatgctcgacgtgcatcgcgaggacctgcagcaggtgcgcagccccgaggacctggagcgcgcggcagccgcgggccgcatcggcgcgctcctctccgtcgagggcggcaatgtgctcgagggcgacctgcacgtgctgcgcctgctccatcggctcggggtgcgcatgtttggcctgtgctggtcgctgagcaacgagatcgcgacgggctgccgggacacgggccccgaggatcgcggcctcctgccctttggcagggaggtcgtccgcgaatgcgaccgcctgcggatgatggtcgacctctcccacgcctcggaccgcacgttttggcaggtgctggagatcgcgcagaaccccgtctgcgcctcgcattcctgcgcgcgcgctctctgcccggaccagatgcgcaacctgacggacgagatgctgaccgcgctcggggcgcgcggcggctatgtcggcgtgaacttttcgcacgatttcctcgtgggcggcgggctgccgccggagcaccgggccacggtggacgacgtggtccggcacatcgaacacatggcggagcgcgcgggcgtgcgcgccgtcgggatcggctcggattttgacggaatcgggcgcacgcccgtggggctggaggactgcggctgcctgggccggatcgcggaggcgctgctccgccggaactggagcgaggcggacgtgcgcggcatcatgggggagaacttcctcgcctattggaagcgcgttttggacgcataagaacaggccccgcagcaaggacgctgcggggcctgctttgcgcgtttcccaggaaagcggtcacgtgggcagggagcgggcgaggaggcggccgaagacctccggcggatagaccgcgcgcaggatctccatgccctcggcaaagaggttgggctcgtgggccgcggcgtgggttccgctttgtaccaggcagaagcccagggaatcatagagcagaatggcgtcgtggctccaggtctgcgtgccgagccacacgggctgcggcgccggcggatagctgtgcagggcgtggagaacggccgcgcgcgccaggccccgccgctgaaaggcaggcgtggtggacacccagtgcagaagccggtcgcccgcttcctcccaggccgtcgccgtggccacgggcaggccgtccggcgcgcagacgaagcagcagcgctcgcgcaggaggttctgccgcggaagaaagcgctcggcaaagtaggcgcgcgccgcgccctcgccgtcaaattccgcgaccgaggtctcgatgcgcgcccaatggacttcgtcccccgggcgatagcggcgcagggaaaagccggcgggcaaggccggctccggcgggagcggcgccggttcccggcgcatgatcaggctcttataggggatggatttgtccagcacgggcgggacctcctttgttctgcggatcagtcggccaggccgacgcgcacgcggatctccacgtcgggcagggcgtcctgcagggcgcgggagaggcggttctgccgctggttggagtcgctgcccagcacgacgatggtggcgccgatgcggcgcgcgtgcgcggcgatggtgtgcacgacgtcgtcattgcgcaggagcatcatgtccgcgctgtggctcttgctgatggcgaacaggtactccagcgcttccgcctccgaggcgctgccgaggaagttgctgcccatcttggccacgtgtacgacggacagggaagcgccctcctccgcggcgatttccgcgccgtcgtggatcaggcgcgcacaggacttctgtcccgtcacgcacacgagcacgcgggattccttacgcatggggcaaaacaccctttctcatactcattcagactgcatggatacaatggactggccgtgcacggagacgacgaagcgctgccccgtggggaatccctccctgggatacttgctcaggtcgaagtagcagagcttttcgtcgtccgccgcctcgtcgcggaagtagagcgtcttgcagggcacgccctcgcgcacggagtcctcggcgatggtggtcagcgtgccgcggaactcgtggctgcggcccgtgacgacctcccgcgcatagcgcaggtaggcgtagaccgggtagcagaacaggccccaagtgaagatggccatcgcgccgcccaggcagcccaggagcacgctcagccactcgatccggatcgtatacatgacgacgatgccggcgacgttggggaggatggccagcgcggccatcaagccgatgcgccgcaggagctggttcctcgcgttttggatatcctgttgggaatacagcattcgtttcatcctgcctctcattcttatgtgcgggcacgccgcctcatccctattatcgcacatttgccaggtggagaaaagggggcgcggcccaaaacctgcggaccgggcctcaagtgtcggtttttggcgcccggggcgcgcgggtgcggcgggcggccgccttcttcgccggcgcggcggactttgcggcgggccgcttccgcgcggcctttgggcgcggggcgggcgggaaggccgcgggcggcgcgctgtccgccgcggcgcagaggaaggcgcagtagcggcggatgctgtccatgaagcgcgcggggtccatctggccgcgcgcgatgtccgcaaggcccttctcccaccggcccgtggtctcgggcgaggcgagcggctccggcacgacggagatgagcagcttgcccttctccgtggggaggagcgacttcctcgcccgctgcacgtagcccacctcgatcaggcgctccaggatcgccgcgcgcgtggccggcgtgccgaggccccggtccttgagttggcggcggagctcctcgtcctcgacaaagcggcccgcgttctccatggccgccagcagcgtgttttctgtgtagggcttgggcggctccgtgcgcttggcgagcacgtctgcgcgctctgcgcgcgccggctggccctgggagagggcgggaagggtctgctcttcctccgcggcgcggggctttagcgggggctttacagcctgccagccgggatcgaggaccgtcttgcccacggagcggaagcgccggccctccacgttcgtcaggaccgtgaccgtttcgctcaccatgggcggatagaaggcggcgaggagctggcgcacgaccaggtcgaagatgcgccgctcgttttcggtcaggctgcccggcgcgcggcccgtgggcacgatggcgtggtggtccgtgatcttcgcatcgtcaaagacgcgcttgccggggtcggcggcgcgctccggggccgggacccattcccggtatggctcgggcagggactggaacaccttctgcaccttgggccgcatgtcgtgcggcaggtggcgcgaatccgtgcgcggataggtcaggaccttgtgcttctcgtagagggcctgggccaggtccagcgtcgcctgggcggtcaggccgtagcgcgcgtttgcctcgcgctgcagggtcgtcaggtcgtagaggaggggcggcatctggctctggcgcgcggactccacgcgctccacgaagccctcccggccgcgcacggcctgcgcgatctgctccgcctcctcgcgcgtcttcaggcgcgtcttgccctgcgaatcgacgtaggtgcccttgtagcccggggaaaagcgcgcgcagacctcgaagtagtcctccggcacaaagcgctcgatctcccgcgcgcgctgcacgagcagggagagcgtgggcgtctgcacgcggcccacggacagcaggctgtcgtagcgcagggtgaaggcgcgcgaaccgttcatgcccacgagccagtccgcctccgaccggcagagcgcggaggcgtacaatccgtcgtatgccgcgccctcgcgcaggcgcgcaaagccctcggcgatggcctcctccgtcatggaggagatccacagccggaacacgggcttcctgcagcgggcaaaggcgtagatgcgccggaagatgagctcgccctcgcgcccggcgtccgtcgcgcagacgatgcgctccacctgcggcgcgttgaggatcttcttgacgagggcgaactgcttcctggccgcggcggtgggcacgaccttcaggggaatctcctcggggaggatgggcagcgtgtcgcgccgccaggccttccagcgcgggtcgatctcgtccggattgcactgggtgacgagatgccccagcgcccaggtcacgacgtagccgttgcccttcaggcacccttcgcccgcctcccgggcgcccaatacgcgcgcgatgtcccgcgcgaccgaaggcttttccgcaagaacgcaggtccagcccacgcgctttcccccctttccgcttcggggccgaacgccccgtcccttcattatagcatttttttcatcggcttgaaacttgtttctgagtagactataatggaaactgtcaagagagaagcgaacaatgcagcggggagggtttgtcatgaaatacgagtacaccgcgcccagatggcagaaccccgccgtgcagcaggtcggacggctgcggccgcacgcggacctcatccccttccaggacatgaccagcgcctggctgggcgagagggagctctccggcttttacaagctgctggacggcaggtggagcttctggtacgcccggggcgagcaggaggttccggagggcttctacggcacggattatcagggggagccccactggggcaagatgcccgtgcccggcgtctggcagatgaacgggtatgggcgcaaccagtacaccaacatcgcctatccctttccctacgacccgccgcgcgtgccggacgaggcgcccatcggcctctaccgccgcgaattcaccgtgccgcccctctgggcggagaacgaccggcgcatcctcgtctgctttgacgcggtggacagcgcctttaccgtctacatcaacgggcaggaggcgggcttctccaagggagcgcacctgggcgcggagttcgacatcaccgacatggtgcagaccggctccaacctgctcgcgctggaggtctacggcctgtcggacggctcctacctggaggaccaggacaagtggcgcatgtccggaatcctgcgggacgtctacctcctggcgctgcccaagatccacgtgcgcgacgccgtgacccgcacggagttcctcgacggcggctcgaccggccgcctgcacatcggcgcctggatctacaaccacagcgaggcggactgcgtatccgattacaaactctacgcccacctgtacgaccagggcgcgcgcatcggcgccgcgggtgccgaggacatccgcatcgacgcgggcaacgaggagcgcgtggagctgacgatcgacgtgccgggcgtgcagccctggtccgccgagacgccgcacctctacaccctcctgctcctgctggaggacgacatgggcaacacggccgaggtcgagcgcatggacgtgggcttccgcaccgtggaggtgcgggacggccggctcctgctcaacggcgcggccatcaagctcaagggcgtcaaccggcacgagtgccaccccacgctcggcgccgtggtcagcgtcagcgccatgctccgcgacatcaccctgatgaaggcgcacaacatcaactgcgtgcgcaccagccactaccccgacgacagccgctggtacgcgctctgcgatcaatacggcctgtacgtcatcgacgaggcggacctggaaacccacggcgacggcgcgcacggctatcccctcagcgacgaccccgcctggcgcgaggcctacgtggaccgcgcggcgcgcatggtcctgcgcgaccgcaaccatccctgcgtgctcttctggtcgctggggaacgagtccgggttcggcgagaaccaccgcgccatggccgaggccgtgcgcagcctggacggcacccggcccctgcactactgcgaggcgggcgaggacccgctggtggacatcgtctcccgcatgtacccggaggtggaggacctaaagcgagagggcgcgcgcacggacgacggccggcccttcttcctctgcgagtacgcgcacgccatgggcaacggccccggcaacctcaaggagtactgggacgccatctaccagagcccgcgcctgctcggcggctgcgtctgggagtgggcggaccacgggctgctcgccgagcggcgcgacggcaagttcggctacgcctacggcggggacttcggcgacgcgcccaacgacggcaacttctgcatcgacggcctgtgctggccggaccggacgccgcaccccggcctgctcgaactcaagaaggtctatcagcccgtgctcgtggaggcggtggacctgcgcaagggcctggtgcgcatcacgaaccggtatgccttccgcaacctggacgagacgttctacgccacctactgcgtcacgaccgagggcctgcgcgcgctgcagcgcgacctggagctgcccaagggctttggccccggccagacgcgcgaggtggagctggagtaccccctgccgatcgcgggcgagagcttcctggagctcgcctttacgctgcggcacgacgagtcctttgcgcccaagggcacggagatggcctgggagcagctcccgctgcccacgccccgcgtgcccacgctctacaacccgctgagcctgggcgagagcctcaaggtcacggagaccgacgcgcacacgctctccatcgccggcggagagttctccctggagttctccctgcgcacgggcgagatgctccacgccatccacgacgggcaggacgtcgtcgtgcgcgcgccgcacccggtcttcttccgcgcgcccacggacaacgacgcgcgcctggccaaggcctggcgcgaggtggggttggaccggctgaagccccgcgtggagtccgtgtcctggcagaagatggacgagggcgtggtctgcctggagtccgagagcgtctacagcgcggacgccgtggacccggcgctgcgcgtgcgcgtccgctggacgatcagcgcctccggctgcgagcgcgtggacgtgaccttccaacccctgcgggagctgccggacctgccccggctcggcatgcagatgaccatgccccggagatacgaccacgtcatctggtacggccgcggcccgcacgagagctatcccgaccgcaaggagagcgcgcgcctcggcatccaccgcagcaccgtgcgcgagcagcacgtgccctacatccgcccgcaggagaacggcgccaaggccgactgccgctgggccgcggtcaccgacgtcatgggccagggctggatgttcatggccgtgccgggcgagcagttctccttcacggtccacgactacacggacgagcagctcctcgccgcgcgccacgacgacgagctcccccgcggcggggacacggtcgtctccatcgacatggcgcagggcggcctgggcagcaactcctgcgggccggggcccttggcgccctaccgcctcaccctgcgggagagccgcagctacagcttctacgtccgcccgttcaaccggcaggggtcctcgtacgtggccgcctaccatgtcctgcccaaggagggctgacgccaagcagcagagaaacgcgccgcggggcgcaaaaatcaggggcgtgcggcttcccgcatcgggaatccgcacgcccctgattttttttatcggacgccgacgatcttgctgaggcattctctgtaaatttgcgaggtcttggaaatgacttcgtcgggcagggcgggtgcaggctccttgccgttgaggccattttggatcagccaatcccgaacgaattgcttatcgtacgatttgggagattcgccaactttgtagcaggccgcatcccagaacctgctggagtccggggtgaagatctcatctcccagcgtcagctcgccggagggagcaaagccgaattcgaacttcgtgtccgcgatgaggatgccccgcgttttcgcatgctgatagcagcgatggtacagctccagggaaagcgcgcagatcttttgggtcagctcttccccgatttcgttctggagctgctcgatcgagatatactcatcatgtccggcagccgccttcctggaaggcgtgacgatgggctcggcgagctgttccgcttgctgatacgtcccggaaagcctgcggccgcaaaacgccttcccctgacggtaggcctcccacatgttcccgaacagatacccccgcacgatgaactcatagggaagcatcctgagcttctttacaagcacggtgcgatcgcgatagaattccggattctgctgaaattccgccggaaaatcgccgagcgaagcggagaccaagtgattgggtacgatgtcgcttgtataggaaaaccagaagttggacagcgaattgagcgcaacgccctttcccggaatttcgctgttcagaatcacatcgaatgcagaaatgcggtcggttgtcacgatcgcgaggtgtgcatcgtccacctcaaagacatcccggacttttccgctaatgatttttttcatgtgcgtcctcccttcgtctatcgtttgtcgatccgaatccagcatagcgaaaagggatggggaagtcaagcctctgcttgtccgccctcccgcggccggccttgtccctacggtttgttcatgagcgcaatgaggatgctctcgatggaggactcctgaacctgtaaagaccggatggggacattttggcttgtcaagtgatacagagcctcttccgggttcacgtcgcgccgatcgctctccagcacgtatttacagccctcctgcgaggcgatgcggagtcccggcagccgaatggacagcggcgccgcgctctccaacgcaatggtgtagtggccgccataggcgttctgaaacgcgggaagcgatccatcgtacagaatctccccctggtgaaggaaaatcagccggtcgcagatctgctcgatatccgccatatcgtgcgtggtgagcatgacggtgacctgcttttcccggttcatcgcgcggatgaatttgcgcacattgctctttgccacgacgtccagtccgatggtcggttcgtccaggtagacgacctgcggatcgtgcaaaaaggtgagcgccaaattggcgcgcatcttctccccgaggctcagctggcgcacgggccggtggagaaactcgcgcaggccgagaagctccacataggtttccacgttctcccggtaccgttcgctcccgatgtcgtagatcctgcggtagagctcaaaggagtcggtcatcggcaggtcccagttcagccgcgatctttggccgaagacgacgcccatctgccgcgcattctcgctcctgcgctcgtagggcacgatgccgttgaccgttatgcgccccgaagtcggcgtcaaaacgccggacagcatcttgatggtcgtggactttccggcgccgttcatgccgatatacccgaccgactctcccttctcgatggaaaagcttatgtttttcacggcttttttgcagacatagacggggtggaacagcgattggatatagcctccaaatccattttgcctctggaggacctgatactccttgcaaaggtctttgacttcaataaagggcatgctgtttcctcctgttacgacccggtgctctgatatttcttcagtccccagttccaaaaccagaggctgaacccgaacgcggccgcgcccaccaacggcgtcagatactgaaagaacgggctgaatatcgaaaaatccgtcttcccgagaaagaattgcgccgggaaaaagttgataaacgcatagggaaggacgcacgtcaggagcacttgcaggaacaagggatagatcgtgatcgggtagcgaatgaagaggatcgactcatagtagaagaaatccacgattccggtccctcggaccatccaaagattcggggtggaaaagatcagctgggccgcagcgcaaatcagcgtcccgcccaatatgtcgacgatcagcaggacgaccttccaaaagttgaaagaaagattcagccgcacaacagcgaagaggaagcatccaagcgccaaaacgaagtgacggatatagtccgtcgtaaaatgattcaggacctcatacagcagcgggggcatgggcagcgtgagcgcttcatcaaactgccccgattggattcggtcgctcagggaattgcagcagccaaagaagaacgtcccggccagcgcataggtcaggagctgaaaggagtacagcagcacgatttcatcggccgtccacccgcccaggttctgaaagcgcatgaccagcacccatagcagcagcagttccgtgctgtaatgcaggatctgcgaaaacgacgcgacccagaatgccgccttgtattcaagcaggaccttgtacttcatgacgagaaacgttttgatcaaggaaaggtatctcatcgtctaacctccctgcacgaatactctgtttgcggccttccgccaaatgattttttcgatcaacacaagaacgatcagggaaatccattgcatcatcaggcagtggagaatctccacgccctgaatgttccccaggaagatctggatcggctcgtacgtgataaagcggaacgggagaacatcgctcatggccttgagccaatcgggatagagccaaatcgggatcacgccgcccccaaacagcctcgtcagcgcgatgactagggtctgaatgtaccagggcttcgtcacccaaaatgcgctcattgcaaacagatacaggatatggtaggagatgaggacgccgaagagaatggacaggagaaaacccgccaagccgatcgcgctggccggacctgccgcccgatacagcagaagggcaaccaccatggagaggacgcccgagaacaggaagttgaacagatttcctcccatgttttcaaaaaatatcttccacttgaagcgaatcggcaggatcaaatccgatgcgatggaaccgtcgtcaacccgctgcgagatgacgctcgtggcgttgaaagccgtaagatatccaaccaggctattgatgatcacatacgtaatcatctcctgcaggctcgcatcggcatagcccgtcgcaatcaacgccgtccaaagactcccctgcaggaatacaaacaggcccccatgcagaatctccatccacaccccggcgcgataggccattctttgccggaaggacgtggacagaagatacccgtagatgcgcagattctgcgcaagacgtttgacatccttcatcgcaatcccctcaccctgtcccccttcgggttggaaaacggcctccgcgcgccgcgcgtccggcccggacgactctgtttctgtcatttacaagttttgttatagtctcgcataaaaattgtgaaaagtcaatcttaagtttttgcatccttacttgcatccattgcggcatggcattcccgcaagtgcgcgaaaaaaaccggaacggcatggctgaagccatgccgttccggcgagccccgcatggagatgcgggattccttttttgcacgtccaggggttctgcggttacttggacttgtagctggcgcagttggtctcgctctcggcgcggccgtccccgcagttcatgcagggcttgacgtcgatggccgacagcgtgcaggcgcacgcctggcggtcgttgtaggcacaggaactcacgtgacagttgatgcactgatgaccggtagctttgttctgcatgtgttttgacctccttgctgtttggtgcaaggttagtatgcgcagcgcagcgcgcggcaatccggaaatcccaggcatcgtttccattttttgggccgcggctcaatcctccgggggcagcgcgcaaaaaggaatgggatcggcgggcgcgtcctcgcgcgggcggagctccaggccgtaccacttgacgtcgtgccactggcccagcttgtagcccgccttggcgaaggtgccgatccgggaaaagcccagggactcgtgcagcttttccgagggcaggttcgggcagcccaggatcgcgatggcctcgcagaagccctgggcgcgcagcgtgcgcagaagccgctcgtaaaggcgcgtggcgtagcccttgcggtggaagccctcgcccacgtagatcgtggtctcgcacacccactgatacgccttgcgcgggtggaagaagtgcgcgtacgcatagcccgcaggcacgccgtcctcctccaggatgtagaaggggaaaaagcgcgtgatctcctcgatgcgggcgcggtattccgcgacggagggcacctcgtattcgaaggtgacgctcgtgttttgcacatagggcgcgtagagggcgacgatggcggcggcgtcctccggggtggcaaggcggatcgcggtagacatgggcaagacctcctctaaggcagaatccaagaaaaaaagcacagcgcaaaggcacgcccttgtgcgctgtgctgcggggaatcgttattcgcggaagatgcggtcgtaggcggcgtcgatgcgggcgagctcctctgcgctcaggtcccagtcgccggccgcggcgttcatgatggcctggtccacgttcttgctgccggtcagcgcgcaggtcatgcccttctgctgggagacccagttgatggacacgtgcgtcacgggcttgtcgtgctcctcggcgatggcgcgcagggtcttgagcagctcctgcgtcttggaccagaagggctcgctgaagaagggatagaagttggcgcgcttgtcgccggcctcgggcttgggcggctccttgaacttgccggtgaggatgcccgcgcccagggagccgtagctcagcacgccgatgttgtgctcgcggcagaagggcagcacgtccgcctcaatctcgcggtcgaggagggaatactgcggctgcgtgctgacgatggcgccgcagcggagcgtgcgctccagcagcggtacgtcaaagttcgagacgccgaggtagcgcaccttgcccgccttctggatgcggagcagcgcctccatcgtctcctcgatgggcgtgttgacgtccggccagtggatctggtagaggtcgatgtagtccgtgcccaggcggcgcagggactgctcgatctcgtactcgatggcgtcgggctgcaggcacttgccctggcggcccttcgggtcgtcaaagagcaggccgaccttggtgcagagcacgaccttgtcgcgccggcccttgatggcctggcccacgagcgtctccgagtggcccttgccgtagatgggcgccgtgtcgatgaggttgacgccgtggtccagggacgcgcacagggaatcgatgcacttcttgtcgtcgatggcgccgaagaagtcgccgcccatggcccaggtgcccgcgccgacggcggagaccaccaggtcgctgttgccgagtctgttcattctcattggtgttgccccccttgttctgtggttctgttttccaaggtgattataccacaccttcccggcgcctgtacagagcgcagcccgcgccagaggggccgggaaaaatgcgcaaagaaaaggcggcgccctttcggacgccgcgcaagccatcgtttttctattgatggcaccccccattgccgctgttgcagcacgctttccatctgcagcgccgcgcggctttatctataaaaatatatctatttatctgtggttcataacggatacctgcccggcgaaagcgatacggttttacggaaagtatcgtgattttaatccgatcttctcccgggccatctccctttcacagtgcttattatagcggcattctacatctctgtcaattatatgattttatcatataaaagaatatgaaggtcaaaccctggggcgcgggtcggggcgcaggggcccaaaaaacgcttgaaaatcgcgttttttgggccccgttccgagagacggaaaagccccgcgcccgggaaacaaagaaattttatccggggaacgcggggcgggggctgtgcaggtcaggcgtcgtgcaggtgttctcgcgcgacggagagcatgagcttgatgcggttctcctggttgacgcgcgtggcgccggagtcgtagtcgatggggacgatgttggcctggggatacatctcgcggatctggcggatcttgcccttgccgacgatgtggttgggcaggcagccgaagggctgggcgcagacgatgttctcgtacccggactggatgagctcgatcatctcgcccgtgaggaaccagccctcgcccatcttgcagccgtagccgacgagggggcggaccatctccttgacctccaggtaggaggcgggcttgtggtagcgcttggaggcggccacggcgtccagggtgtacgtctcgaacacgcgcaggtagttgaagagcgcctgcacgacgaacttcttcaggggattgccgccgtagagctggatgtcgtccaggcggttgtccaccttaaagagcataaagcccatcaggcccgggacgttgacctcgcagtcctgggagcggaggaactcctccaggtggttgttggccaggggcgaatacttggcgtagatctcgcccacgatgccgaccttgaccttgcggaccgggaggagctccacggtctcaaagtccgcgacgatccggccgagctgggccttgatcgccttgggctggaagcccttgccctggaggaactgggcgcagatctcctggacccagcggtccacgtgcgcgtcggtctccccgggatttttctcgtaggggcgggtctggttggccaggagcatcagcaggtcgccgtaggtcagcgcggccagcgcccggcgcaggagcggcagcgtgatctggaagccgctgttcttctccaggcccgagaggttgaccgagatcaccggcacctggcccatgcctgcgttcttgagcgccttgcgcagcaggaagatgtagttggaggcgcggcagccgccgccggtctgcgacatcatcagggcgacgtggtccaggtcgtacttgccgctcttgagcgcggagatcatctgcccgatggtgagcagcgccgggtagcagatgtcgttgtggacgtacttgaggccctcgtccacgacctcctggccgtcgttggtcagcagctccacgttgtagccgtaggcgcgcagcacgttctgcaggatgcggaagtggatctccgccatgttggggaagaggatcttgtaggtcttgcgcatctccttcgtgaactcgatgcggccgcgctcgtccggaacgcgcttgtcaggcatgggcatagcctcccttctctccgatggccgagaacagcgagcgcaggcggatcttgaccgcgcccaggttcgtgatctcgtcgatcttgatctgcgtatagatgcggttcttggattcgaggatcttgcggacctcgtcggtggtgatggcgtccacgccgcagccgaaggagacgagctgcaccaggttgatgtgcgggtccccggactccgcgatgaagcgcgccgcggcgtacaggcgggagtggtaggtccactggttgagcacggtggtcggggccttgacgtactcgtcgcccagggagtcctccgacacgacgaccgcgccgctgtcggcgatgaagccgtcgatgccgtggttgatctcgccgtccaggtgatagggacggcccgccaggacgatcacgggcatgcccttttcccgcgccatggtcaggtactcctcgcccttctggtggatcttgcgcatgtgctcctcataggcggcgtaggcggccttggcggcggccttcacctcgcgcagcgtgatgtcgtccccgaagtggcgggtgaggatttcgtgcatcttcttggggaagtcgtgcggccggtggatgcccacgtagtcgtggatgaacttgaccttctgcacggacttcatgttggagacgatgacctccgggtagtaggcgacgaccgggcagttgtagtggttgtcgcccaggtgctcgtcgatgttgtagctcatgcaggggtagaagatggcgtccacgcccgcgtcgatgagggcctgcacgtggccgtgcatgagcttggccgggtagcaggccgtgtccgaggggatggaggcctggcccaggtggtagagctgcttggtggtcttgggcgagaccgcgatgccaaagcccaggtgcgtcaggaacgtgtgccagaagggcagcagctcaaagaagttcaggcccatgggcaggccgatggtctcccgcttgccgggcgccgagccgtaggcgtccagcagctcgcgcttgtagtcgtagaggttgtagcgcacggcggcgcggccgcggttcaggggctttgtgcactggttgccgccgatgaaggtcttgccgccggcgaaggtgttgatggtcaggcggcagtggttggtgcagccgttgcaggtgacggcgcgcacctcgtgggtgaagttggccaggtcctcggccgtgagcaggctcgaccactcggcgcgctggttctgcttggcgtagagcgccgcgccataggcgcccatcacgcccgccagcgaagggcggatgacgtcgtgcccgatctcctgctcaaaggcgcgcagcaccgcgtcgttcaggaacgtcccgccctgcaccacgatgtgctggcccagctcctcggcgttgcccacgcggatgaccttgtagagcgcgtttttgaccacgctgatggacaggcccgcagagatgttctccagggaggcgccgtccttctgcgcctgcttgacggaggagttcatgaacaccgtgcagcgcgagcccaggtccacgggcttgtcggcgaacaggccggccttggcaaagtccgcgatcgagtagcccagggccccggcgaacgtctgcaggaacgagccgcagcccgaggagcacgcctcgttcaggaagatgttgtcgatgacgccggagcggatcttgaagcacttgatgtcctggccgccgatgtcgatgatgaagtccacctgcgggtcgaacttcttggccgcggtgaagtgcgcgatggtctccacgatgccaaagtccgcgcggaaggcgttcttgatgatctcctcgccgtagcccgtggaggccgcggcgcggatggcgatgttcgggaagcgcttgtagacctcggccaggaagtccttgaccaggggcacggggttgccgctgttgggcaggtattggtaataggcgatgttctccgcggagtccaggaccacggccttgaccgtggtggagcccgcgtcgatgccgatgtaggcgatgttgtccggctgcaggcagccggtgacgcgcatctcatcccggttgtgccgctcggtaaagtccgcgtactcctgcgcgtttgcaaagagcggccggcagccgacgtaggcgccgctggccgtgtaggccccgatgcgcccgatcaggtcggagaggacgaagccctcgccgtcggcctgcagcgccgcgcccagggcgacgtagtacagggagttctccgggaggaggccctcggtcttgagcgtctggtcaaaggccttgcgcagctccgagaagaaggtcagcggcccgcccaggtacacgatgtgcccggcgatctcgcggccctgcgccaggcccgcgatggtctggttgaccacggccatgaagatggaggcgcagatgtcctccttgcgcgcgccctggttgagcaggggctgaatgtccgacttggcaaagacgccgcagcgcgaggcgatggcgtagatcttgttctgccgcttgctcagctcgttcatctccgagggcgtcaggtgcaggagcgtggccatctggtcgatgaaggcgcccgtgccgccggcgcagctgccgttcatgcggacctccatgttgccggaaacgaagaggatcttcgcgtcctcgccgcccaactcgatcaccacgtccgtctccggcaggttgcggcggatggcgacgcgcgtggcgtagacctcctgcgcaaaggggatggacatgctctccgcaaatcccatgccggccgagcccgacacgcagagctgcacgcgctcctgctccgggaactggtcccgaacctccgagagcattgcggcggccttctgcgtgatctgcgagtagtgccgttcataatttttgtacaggatctcatcgcggtcgttcagaacgacgcatttcagcgttgtagatcccacatccaaaccaattcgtatcatttcggtctcttctccttgatcggcgagaaaagcattaattcgacatttaacagtatacaccacacagggggggataagtcaattcgaaatgaaatttaacatgcggtttccgggaagttttcggaaaagaagaagaaaatgggaagcgaattgcattccgctccccgtttgttctgcaatctactgttctgcatccgaatcatctgcgctcgccagaatgtgcgcgtgcgcccggagaaagtgctggaggaagcggacgagcccgagctcctcataggcgcggggcgtcaggttcccctcctccatctccaggatggccgcctccgggatggccgcgaggatcgggctgtgcgtggccaggatgaactggctgccatcccgcacggcgtcctggatgaggtagatcagcgccagctggttgacataggagagcgcggcctccggctcatccatcaggtacaggccgcccggcagcaggcgcgagcggaagaactcgaggaacccctggccgtgggactgccgctccagcggcgcgccgtagaggtgctccagcgcgtccagggtgccgctgtagggctgcgcggccagcgaatcggcgtaggcgctgccgtacttgccggagatctcgcgcagcgcctcctgcgcaaagcgcttttccgcctcgacatagccgacatagcgcgtaaaatcctccgcggcaaagaagaagtggtgcgccggccggcgcgcgagcgaggggcggtagcagggcgccgcctgccagatgcggcgctgggcgtccgtgcggccggcgggggactcgccccttgcgggctgcgggggctcgatgcggttgatccgaagcgccgcggcgatcagctcgatcagcgtggtcttgccgcagccgttgtccccgcagagaaccgtcaccggcgcggtgaagtccaggcggtcgagcgcctgcaggagcggcgtgcagaaggggtattccgcctccgcgccccggcgcaggcgggagaggctgcgaagaaagatcacggggccgcgcccccttccgcaaggcgggcgagcagggcgtccagcccgctctcgccaaagacctcgatcccgctctcctgcagaagcgccgccgcgacgccgcggccggggacgagcgcgcccgtgaagctgccgtcgtagatcgcgccgcagccgcaggaggggctgcgctccttcaggagcgctgtgcgggcgccgagcagctgcgcaaggcgcagcgtttcctcggcgccgcggcggtagttctccgtcacgtcgcggccgtcgagcgcccggacgcgctcgccctggcgctccgcgggcatgcgcggcgtgggcagcccgccgaagacctccgggcagacgggcacgagggaaatgggcagggcgagcaggcgctccaacccgtccatgcgcttggactgcccgtcgtaccggcagcgcaggcccagcaggcaggcgctgacgaggagcaccatgcggtcacgcctcctctctgggcacgttgcttttacaggtgtattcctccacgtcgatgcggagaaccgccacgtttgcaagggcctccggcgcgaagtccgcgcggccggcaaagcccatgtggtgcaggagcgcctccagggcgaggcgcttttcctccggatcggtcaaaatcgcggcgcggcccgtgcccaaaaggctgcggtagcgcgccgtccaggcgcaggggcggtcggcgcgcacggtctccaccagcgcggagatggcaaagcccacgcgcgcatcccggcgcaggaggtcgagcttgcgcccctcggccgcgcagtgcaggtagagggtgaggcgcccgtcgggcgcgagggcaaagccgtagttcatggggacgacgtagggcgcgccctctgcgttgcaggagaggtgcaccgtccggcactcctcaaggagcgcggagatggcggaaaggtctgtgatctggcggtcgcttctgcgcactgtgctccctcctcgtttttagaactgctcggccttgcgctgcttgcgcagctcgctgcggcgcttgccggcctcccactcggcgcgctcctcgtcggtctccaggagcaggggcggcacgggcgtggagtggtcgttttcgtccagggcgaccaggaccaggtaggcgcggttgatcatgtgccgctcgccgttcaggttctcgacgaacgtgtccacgcgcacctccatggaggtgcggccgacataggtgaccacgccctcgaggaggatcgtgtcgttgacataggcgggagacttgaagtgcagcgtgtcgatggaggccgtggtcacgttgcagccggcgtggcggcgcgcggcgacggcggccacgatgtcgatccactgcatgagctggccgccgaagaggcggccggagccgttgatgtgctgggaaaggagaatctgggtctgaatcgtccgcgaggcggacgcgggcttgggcgcaaggtccatgaaattccctccgtagatggtcttagagtgtgcgggcaaggtccgcgaagcgctgcatggcctcgcgcgtgctctcgcgctggccaaaggccgtcaggcggaagaagccctcgccgttgacgccaaagcccgcgcccggcgtgcccacgatgttggccttctccagcagcaggtcgaagaacgcccaggagttaaggccgcccgggcagcgcagccagatgtagggcgagtggatgccgcccgtgtagaagatgcccagctcgtccagcgtgccggcgatgatgcgcgcgttttcgcggtagtagccgatggattccatgcactgggaccagccctccggggtgaagaccgcctcagcggcgcgctggacgatgtagggcacgccgttgaacttggtgctctggcggcgcagccacatggcgttcaggctcatgccgccgaattccagctcccgggggacgatggtgtagccgcagcgcgtgccggtgaagcccgcggtcttggacagggagcagatctcgatcgcgcagctgcgcgcgccctccacctcgtagatggtgcgcggcagggcggggtcggagacaaacgcctcgtaggccgcgtcaaagaggaggagcgcgccgcggcgcagcgcgtagtccacccacgcggcaaggccggcgtggtcgtagaccgcacccgtggggttgttgggcgagcagatgtagaccaggtccgcgtccagatccgcgtccggcaggggcaggaagccgttgtccggcgtggcgtcgacatagcgcacgcgccggcccgccatgacgtttgcatcgacataggcgggatagaccgggtcggggatgaggacggtgttgtccgcgtcaaagaggtccagcaggttgcccaggtcgctctttgcgccgtcgctgatgaagatctcctccggcgagagggtcacgccgcgctcggcgtagtggccggccacggcctcccgcaggaaggggtacccctgctcggaggggatgtagccgtggaagccctccggcgtgcccatctccgaaacggcgcggtggagcgcgtcgatcacggcggggcagagcgggcgggtcacatcgccgatgcccaggcgaatgatgcgcgcgtccggatgcgaggcggcgtaggccgcgacctttttgcccacggtcgagaagagatagctgtcctggatgttgcgatagttttcattgatgcgcatgcattctgcctccctcaaaggcggtttttgcgaccgcaaaatttctccttctatcataaccgttcgcgcgggaaagcaccatccctttttggcttgcaccgcgctttttgggttaaaaaatggaaaaaccggaggggagcgcgacggcgcttccctccggcaagagcgcgggaggaattggcaaggggaatggtggaaaacgggctagcccttgatgcccgagagcgtgaagcccgacatgatgtaccgctggaagaacaggaacaagatcgtcggcgggatgatggtgaagatcagcgccacgacctggatgtcctccgaataccccgaggagccggccatgtagaagatcttgaccatgacggtgtagagctccgaccgggaaccgagaacgaggtagggccagaagaagtcggaccagctcgcattgatggtgaagatggcgatgaccatgagcacgggcttggacagcggcagcatcacgcggaagaagatgcccaggttcgtgcagccgtccaggcgcgcggcctcgatcagggactggggaatgctgtcaaagaaggacttgaagatcagcacgtagaacgcgttcgccccggccagcagccacatgggcaggtagctttccgtgatgttgatccccaggatcggcagcgagaggaagttcttgaacaggggaacctggctgacggactgcggcagcatcagcgtccacagcaccagggagagcacgagcttatagccgcgcgggcgcaggcgcgagagcacatagcccatcatgccgttgcagacaagggacatgatcagcgagccgcacagcacgaagatcgtgttgaggtaggcctggccgaagttgagcatctcccaggtctcccacagcttttccgggtggaaggagcgggggatgatggtggcggggacggagaagaactcccggctgtccttcagcgccgaggtcatgcaccacagcggcggcacgaagcaaagcagcaccgcgaggatcaggaagaaccagatcaggccgtagagcaccttgacgctcgggttctgcatgtcaaacttgctgatgatgcccatggcctgggcgtcttttttcttgtcgaatttgctctgtacgatttcagacatgaggcgttccctcctttcgtcagttgtcgttcttgcgctgcaggtagaagtagaggaaggtcaggccgatcaggaacaggaaggtgatggtgcccaccgccgcggccctgcccgcctggtagaagcggaagccgtagaagtagctggtgagcataagagagatggaggcgttgttcggcccgccgtccgtcatggtcagcggctcgtacatcacctggaagacgccgatgatctgcatgaccagcatcagggagaacatccccgagatcgagggcagcgtgatgttccagaacttgcggaacacgccggcgccgtcgatcatcgccgcctcatacagctcctggttgacgccctgcaggctcgcaaggtacaaaatggcggtggagccaaagcccttccaggtcatcatgatgacgatgcaggggatgaccaggttctggttctgcagccaggggatggcgtcgacgccaaagacggacaggagcgagttgagcaggccggaggtcgggtggtagatcagcgaccacaggatggccgcggcaacgcccggaacgatggagggaaagtagaccgtgaagcggaaaaacgccttgaagcgcttgacctcgttgagcatcacggcggtgaggatcggcagcgggaagcccaaaaccagggaccagagcgtgtacttaaacgtattgacaactgcggcccggaaggacgattcctgcacaacgtcaataaaattctgcaggccgatgaagcgcacaggatcaaagcccttggtctcaaacagggaaaggatcaggccgttgaccagcggctgccagacgaagaagataaagaggatcaggctcggcagcatcagcacccaggcgccgacgtcctgccggaaagcgtgcgcaaagcgcttgacgaggggttttttcttgcccgtgacgagttgcatggttcatcccccttgcttgtggattttgccccgcaaggcgaaggccgaagcgggtcaatggcgttctgtaaaagggggagggcaggccgccctccccccgcaggatcttgtattttcgccgccccgtggaaggcccatggggaagagaagtgggaattactgcgcctcggcgccggagttgtacttatccaggtagtcgcgctggaagtcctcggcggccttgttcagcagcgcctgcggatccgcgttttcgtcggtcaggaccgcctgcacgcaggagtcgaggatcttgtacatctcctggcagtagaccggcggctcggcgtgcagctcgtaggtgccgttctcgcaggcgtcggtgtagggcttgtacagctcaaggtcgacggtgacgtagggctcgatggcggccttgcgctggctgatgtagtcgggatccgtccaggcgggcaggcccagcacgccgaccagcttgccgttctcctggtccaccatggcgttgtccgcgaaggactgcagcgtctcctcggtcaggttcggggtgatgccctccagctccatccactggaagcaggcgttggcctgttccgccgtggcgttgggcgcgatgacctcaaaggtgccgcccagcaggccgatgctcttgcccttgccgttgtcgccggggacgatggtgcccatgccgaagtgggtgatgtcgccgttgtagttggtgacagagctattgagctggtcctgggccatctgcgccatggcgatctggtccagagcgaagagcttgtgcgcctcggtcgtgtcgcagaggatgttgtcctgcacaacgtcgtacttccagcgcatgtccttgagccactgcagcgcgtcgacagcctcctgggagttgaagatcgcggtgtaggtgtcattcgcctcgtcatactgctccatgtcgccgccgaaggaccaaaccagctgggtgaacatccagccgccctggttgttctgcgtggggaagaagtacgccttgtatcccgtggcttccttgatcttcacggccatctccgcaagctcggtggagttggtgggataggtgggattgccgttctcatcgaccaggcccgcggccttgaacatctccacgttgtaccacatgcccagcgcgtagccgctggagggcaggccgtagatcttgccgtcgcgggagatcagctccagataggcagggttgaccttgtcggtgtagccccactcgttcatcaggtccgtgatgtccagcgcgaagccctgggagatgatcttgttggcctcggtgaagtaggtgttgtagagcgtgggcagctggccggcagccgccttgggcaggaaggtgttgacgtcataggggaagtccacgacctcgacggtcacgttcggatacttctccttcatggtcgcaaggcgcgcttccatgatctgcttgcccgcggtgtcggtctccttgggcaggccgcgcacggagatttcgatggcttcgccctcagcggaaggctcggcagcgtcgccgccatcggtcgcagccggggcctgcgactccccgccgtcgtttgcggcaggcgcgctgcacgcggccagggccagcaccatcaggagcgccagcacgagtgacagtacctttttcatgttgaatcctcctcattttgtattttacatgccggctgtgcggcatataaatcgtaagtcgttcaccgggtgctctcgcgcaccacgagggacacgggcgtctggcggagcttcgccggcgcgccgccgccctccatggcggtcaaaaggagctcgccgctgatctgggccagggcggaaaagtcctgctgcaccgtcgtcagcgccggagaggtccgcgccgaaagctgcaggttgtcaaaccccgtcaccgccacgtcctccggcacgcgcaggccgttcgcctgcaaaaagggaaggagggacacggcgatcggatccgtcgcgcacatcagggcgaccgggcgccgcgcgctgtgcagataggccagcaggttctgatgcgccggggtgtccatacgctccgcgttctccagcaggagcagcgaggtgtcgcgcacgctgcgccccgagtgcagcagcgccatgacgtagccatggtaccggtcgcgcagcgaggtcgcggaggaaagcgggaggtttgtcacaaagagaatctgttcgtatccgcgggagagcaggtagtccgccagcatccgcccgccggacacattgtcgctcacggcgaccgggaagcccggcaccaggtgcgcgcggtcgatcagcaccagcggcaggcgcatctcccggatcagcaggagcgccgggacgtttcccagggaggaaaccggatacaggaggatgcccttgacctgctcggcgagggcctggcggagcagctcgccctcgcgggcctcgctgtcatccgaaaagtgaacgccgaggtagtatccgcgccgctccagaagcgtgtagagcgttgcgatgaactccgcggccttggtgtagtggctgtccttggggaagatcagcatcacgcggtccatctgttccgaggaaggcttgcccgcggaggggtttgccacaaagctgccgcggccccgctcgcgaacggccaagccctggcgcttgagctcgttgagcgcgcgccgcgccgtgatgttggagacgccgtagagctgcgccatctgcgcctccgaagggagcggatcgcccggaacgagcatgccgctctcgattcgcttgcggtagtggtcgaagatggcctggtagagcgggagattcttcgggttgtccattgtgctggccgtcccttctgcaggcgcgcggcccgtcggtatggttcctggaaagatttggatttgctgacgggaatagtatactattccttttgaagttatgcaacactttttttaacaatatgaattccaaattaactaaggcgggatttttgcggcagttttaacaatactgtgattttttgattgaattgcctgcgggaatttctgcatgaaaagcacaaaaaaacgcctcgctcatcccgaaagcgaggcgaaaacgagggcgttttgaatggaaatcactccgaaagaacggtctgtttttctgcgttgatgcactggaagtccagcgcggcgcggatgaacccggcaaagagcgggtgcgccttgttggggcgggacttgaactcggggtggaactgcacggcgaggaagaagggatggtcgggcagctccaccgcctccaccagccggccgtccggggaggtgccggcgatgcgcatgccgttttccgcaaaggcctcgcggaaggcgttgttgaactcgtagcggtggcggtggcgctcgcgcagggaggccgttccatagacctggcgcatgcgggacccttcggccagctcacagggataggcgcccaggcgcatggtgccgcccttgggcaggttgccctgctggtcgggcatcaggtcgatgaccgggtggcgcgtatccggggagaactccgtggagtccgcgtcggcgtagcccagcacgtcgcgcgcaaattcgatggccgcgatctgcatgcccaggcagatgcccaaataggggacgccgttttcgcgcgcgtactttgcggcgagcaccatgccggggatgccgcggccgccgaacccgccgggcacgagaatgccgtccgcgccgcccaggcggagcgcggcgtttgcgggggtcagggtttcggagtcgatccagtcgatctcgacgcgcgcgctggaggcaaagccgccgtggcgcagggcctcggccacggagaggtaggcgtcgtggagctggacgtatttgcccaccagcgcgatgcgcacgcggcggtgcaggttctcgatgcgctcgagcatctgccgccactcggtcatgtcgggctcgggcaggttcgtccagttcagctcgcggcagacgatctccgagaagcggctcttttccagcatcacgggcgcctggtagagcacgggcacggtcaggttctcgatgacgcagtcgggcttgacgttgcagaacagggcgatcttgtcgcggatgccctgctcgatgggctcgtccgagcgggtgacgatgatgtccgggaaaatgcccatggagcgcagctccttgacggagtgctgcgtgggcttgctcttgtgctcgcccgaggagcggatgtagggcacgaggctgacgtggatgaagaggcagttgccgcggccgagctccagggagacctggcggatcgcctcgaggaagggctggctctcgatgtcgcccgtggtgccgccgatctcggtcaggaccacgtccgcgccgctcttttcgcccacggagtagatgaagcgcttgatctcgtccgtgatgtgggggatgacctgcacggtcgagcccaggtagtcgccgttgcgctccttggtcagcacgttccagtagaccttgcccgtcgtcaggttggagaactggttcaggtcctcgtcgatgaagcgctcgtagtggccgaggtccaggtccgtctccgcgccgtcctcggtgacgaagacctcgccgtgctggtacgggctcatggtgcccgggtccacgttgacgtaggggtccagcttctgcgcgatgaccttcaggccccgcatcttgagcaggcggcccagggacgcggccgtgatgcccttgcccaggcccgagaccacgccgccggtgatgaagatgtatttgctcatgggaaaaaacgctcctttccaaagcgagaaggggggaaaatggccatgaaaaaaggggcggatgccccgaagaaagcggttcttatggatcgtagagccccaggatggagcgggcgacctccccgcgggtgacgcggcggtccatcgcctgcttttcgatgtagcggtgcgcctgggactcggtcatggagaggtattggatcagcatgcacttggcgcggtccaccaggcggatctcctcgatcttgctctgcagcttgcggttctcctgcttgaggcccagcacgcgccggcgcgccgcggcgaccatcttgagcgcctggtagaacatcgcgcggccgaggggcttgcccaggaccatcacgcccacgtcctcgaccttttcggcgatttcgtccgcggtctcggcgcgcacgagcagcaggatgcccgcggaggtatccatcgccagcgtgcaggaaaggccgtcccccaactcgtcggaaaggggggcgttgatgacgacgaggtcgtactccacctcggcggcgagccggcgggcctctgcgccgctggcggcgacggcggggctgatctcgggcacgccgcgcatgagctcccggagcatctcccgccccttttccgagctggagacgagcagcgcacttaccatgcttttcgctcctttctcaagcgacgcggggggtcagcgcgccgtggcgcgcgcataggccgcgagcgtgtggctgggcagggccgcctgcagaaagggcgaggcggcggcaagggcggcggcctcctgcaaactcgtgggcagggccgcgccaagggcggtctccggctccgggagcgggagctggcggtgaatgccgtccaggcccgcaaggagcgtcagcgcgtagacgatgtaggggttgcagaggttgtccggcgagcgcagctcgatgcgcgccgagtccccctgcggcgggggcaggcgcaggatctggccgcggcccatgcggctccagcccacgcccttgggcgcgtttttgcccagcagccgcgcataggaggcggaggccgcgttgcagaacacggtcatctccggcatgtgggaaagcacgcccgcgatgaagctctgcgcctcgggcgagagcgccccgtccgcctggggcagaaacaggctccgcccggcgcggctcagggagaagttgatgtggaagccgctgccgttctcctccggcaggggcttgggccccatgtccgcatagagcccgttgcgcgccgcgatggcgcccaccaggttccggaacgtcacgcagtggttcgccgcggtcatggggtcggcgggcgcgatggagatctcgttctggccggggcccatctcgtggtgcgaggacagggggcggatgcccatctcctccagcgtcaggcagatgtcgcggcgcacgttctccccgcggtccaggggcgcgacgtccaggaagcccgcgcggtcgtgcgggatgggcgtcgggtcgccgttttcgtccaggcggaagaggtagaactcgcacttggcgcccacgcgcgcggtatacccctcctccagcagcgcctgcagcgcgcggcggaggatctggcggccgtcctgctcaaagggctcgccctcgccggtggtgatgtcgcagtagaagcgggccacgcgcccggtctgcggccgccagggcagcacctccagggtggaggcgtccgggtgcagcacgaggtccgcgcgcggcaggtccgcaaagccgtccacgagcccggcgtcaaaggccacgccgtattcaaaggcgcggggcagctcctcggccatgatggagatgttcttcagcgtgccgtagacgtcgcagaacgccaggcggatgaacttgacgtcgttgtcgatgacgaattgcagcacttcgttgtcggtattgctcatgcttgcgccctcccttgcgcggggacggggtttgcccccgaaaagcggtccatcttgggaagaaaggggttgttttttcccaattatacaatccctagttctgcgtgtaaaggcggtggtaggggttgtgcgtgttcgggcgcaggacgtagaaccggtggtccatgacctgcgccatgtccagggagaaggcgcggcagaagtccgccacgtgcggccgcaggaaggcgaggtccgcttcctccgcctgcacggccatgacctgcgcgggcaggtcctccggcagggcgtcggcccgcaggtacagcacgccgccgtgcatgccggtggcgcagaagtcgcccacgggcgcgcggccgcgcgtctccagacccagcaccgcgatgcagccgccggcctggtattcgcccaggaagctgcccgcctccccgcctacgatcagcacggggatcttttcctggtaggccttcatgtggatgcccgcgcggtagcccacgttgccgcgcacgaagatgcggccgccgcgcatggcgtagcccgccgcgtccccgcaggagccgtggatgacgatctcgccgtcgttcatggtgtcgccggtggcgtcctgcgcgttgccggcgacctcgatgcgcgtgccgtccaggtacgcgcccagcgcgttgcccggaacgccctcgatgcggatgcgccgccccgcagagcccgcgccgatgtagcgctggcccagcgcgtgctccaggagcacgtccgcgtcctttgcggcggcgatggcctcgttgacctggcggaagctcaggccggttgcgtcgatgcaggtcatgcttgcacacctcccaacatgtgcgcgcgctcggcccggctgaaggcggcgagctgcggcttttcccggatgagttcgtagtcgatggaggagagcggcgtctgctcgcggatgagcgccgtgtagatgcccgcgcgggatacgtcgcccacgagcaggaaccccaccaggcggccgtcccggcggaccaggcgcttgtagctgccgccctggcgcaggatgtcgctctccccgttcaggtccccggcggagaccacgtgcaggccgaagaacccgcccgcgttcatggggatggccttgtcaaaggggacgtcctcgccggccatgctgcggcccgcggtctcgccctggagataggcgttgggcaggatcgccaggatcttgtccgcgccggtgctgatgtcgtggctgcgcgtgcagtcccccgcggcgtagacgttgggcaggctcgtgcgctggcaggcgtcggtcgcgatgccgcgctccaccttgccgccggccgcttccacaagctccgtgcgcggccgcacgcccacggccagcaccagcacgtcaaacgggatctccgccccgctttgcaggtgcgcgaggttcttctcgaaccgcgccacgctgtccgagaggcggaaggcgatgccgtgcgcctccatgcgccgctgcacgagggcggcggcctcctcgtccagcaccgcgggcaggatgcgcggggccatgtccacgatggtcaggctccggcacaggtggcggatgccctcggcgcacttcgtgccgatgagccccgcgcccacgatcagcacgcggctgagcggggtcagcgcggcggccagggcgtgcgcgtcgtccagcgtcaggaaggagaacttcttctccacctggtccaggcccgccatgggcgggacaaaggggcgcgagccggtcgcgacgagcagcttgtcgtaggggacgtcccggccgtcggccaggcgcacgatctgctttgcggggtcgatctttgccgccgtgcagcccagcaggggcgtgacgcccatcttttcatagtagtcccgcgggcggtagagcatgcgctcctcgtccgtcttgcccc

SEQ ID NO: 4247 - DNA, 7705 bp, Unknown
  16S sequences of unknown bacteria
caatgtagccccacttatcatcgctctccacacgggcaagcccattatcagcaaagtcccaggcatcatcaaactgtggattgataacataggagccagtcgtgtcaatgtagccccacttatcatcgctctccacacgggcaagcccattatcagcaaaatcccaagcaacatcaaactgcggattaataacataagaaccagttttgtcaatgtagccccacttatcccccgaagatgccgataacaagccttgcttaaaaagcgtttctttaccagaagttgatttgccttcgctaccgcctgcaaagacgacagctgcaataatcatcgcaataacaatgcttattgcacctattattagaccaatttttttcttttgctttggagcttgcgtattattgtttaaggtggattcttcctctcccgtttcaacacttccctgttgcactgcattttcttctcgaatcgacgtttcgaccgattcacttgtctgctcgatattgttattcattgcatcatccatgattatctctccctttttatctgttttttacgcaacatatatcctttgctgccgtcatttcactacgttatcgtcggaacgcagtactatctccttcagtatatatatatatactgtcaagctttttgcaaaatttagtaaagtctaccagaattttgtgtttataggggaaattgcgcgccttcctggcgcgttcttatagaactgcgccagatttcagcaggttttgacagagcaccgacagcgcccgttccggtggctacggtaagcgggagaaggacgcggcgatggtgctgcggcgaaggagtaacagaacagcattcggggagaaaaaaataaatatccagaaactgcttaattatgcggtttttggatgtttgtttgggcagaactgatgcacaagtgaggcacaggtatacgaatcgcagcccacagctgtggatgcagatagtgagtttctgcttgcagtatccggcgtagataacgtaaaagcatgggcgattatggatgaattcatgggtgcgctgcaacttgtgaattctagggcatacaattcagttcttgcaaaacagggaggaatatgattttccgttactgacatattactaacaatatccagcatgagaaaaagaaaacccattgaaaacagcatgttttcaatgggtttcgtggtggagactactggactcgaaccagcgacctcctgcgtgtgaagcaggcgctctaaccagctgagctaaacctccggatctgcagcgcaaaaccggtgcgttgcctacaacgtagcgttattataccatatctttcggaaaaatcaagacccaggtcgattttttatcctgcaggccggaaaagccagcgcggcgcgagaaaaaagcttgcatttttctccgcgccgtattatgttgaaagagatcaggcggcgcggccgaaagtggcagcttgcgacttgttttgctggaaacatgtgctatactggttttgcaggcgaaaaatcgcagatattccgggcagcgcatcacaggacttgcagaatgtgccccttgagatagagattctggcccacttgcagcgaagcagggtggtcccggctttgcagcagattttccaccagccggacctgccgcccgctgtctgccgcggcctgctgcagcatctggaaaaagaggggcggcgtcataaagtggctgcaggagcaggtcagcaggaagccgccgcgcttcaccatctgcatgcagcgcagattcagctctttgtatccccgggtcgcgccgtccagcgcctgcttgcttttggcaaatgccggcggatcgcagatgacgacgccgaatcggcggccttcgtccgcatactgccgggccaggtcgaagacattggcttgggtcgtttgaattttatccgcgacgccgtttgccgtggcgttgcgccgcaccagtgccagggcgctggcggagacatccaccgcttcgacatgggccgcgccgtacagggctgcgtggatcgcaaagccgccggtgcagcagcacagatccagtacatcctgccccgggacatagggccgcaggtgcccccggttttcctgttggtcgaggaagtggccggtcttttgcccagtggggatattgacaaacatggccgcatcatgctcccggatctgaatttctggggggacactgccgtagacgcaccggctgatctgtgccatgccttccttttcccgtacggcaaggtcatcccgctcatagatcccggcgggctgaaacagctctgctaggatggagataagcgcttccttgcgctgctccatccccaggcagacgatctgaaagctgaggtaatcgccgaatttatcgaccgtcagccccggcaggccgtcactctcgccgaagacgacgcggcaggcgttggaaaaaccaagctgctgccggtaggtccaggcggcggcaatccgcgctcggaaaaaggcccggtcaatgggtgtatcctgggaccttgtcagcatacggacagcgatttttgactgtgcgttgaaaaagccgcggccaacaaagcgatggcggctgtccaggaccgcgacgacatcgccgtcccggcagcggtcgtcgcaccaagcgatctcgttatcatagatccagctgcagccggcggccaggtccaattcttccccgcgccgcaggcatacctgcccgatatccataggtatactcctttaaaatagaaatatgacgcttcccggtcttgaccggtagaagcgaagctatcataacaaaagaacgaaaaaaatgcaagccgcaggcagcggccaggaaggagcgaatctccatgaatcagtggcgttatcccgccagcagcggcggggagatccaggcgtatggctggcagggccagggcgaaccccgggccattgtccaatttgtgcacggcatcgcggagcacgccgcccggtatgacgcgtttgcccaggccctctgcgccaagggcatttgggtcgtggcggaggaccatatggggcacggcggctccatgggcgagacggcggggtatttttccggcggctggctggcagcggtgcaggatatttacgcgctgcagcaggcgacgagtcaggcccaccccggtgtgccgtatttcctctatggccacagcatgggctcgtttttgacaaggacatttctgatcgagcatccggactgccccctgcagggcgcgatcatcgccgggacaggctggcagagtcctgtggccctccgtctggggctggccatctgccgccgggaggcgcggcgcttgggggaaaaggcagtcagcccgctggtgaaccggctgatgttcggcagctacaacaaggggatccccgcccctaagagtacctttgcctggctcagccgggatgacgccgccgtggccgcctatgaggcggacccgctttgtggctttgacgccaccgtcggcctggcccgggatatgctcgaggggctgcagatgatccaaaataagcacaaccttgcaaagatgaatcaggcgctgcccgttttcttcctcgcgggagatcgggacccggtcggccattacggcaagggtgtggaaatggcctgcgttgccttccgtcggagcggaatgcagcaggtggatatgcagctttatccaggcggtcgccatgagatgcacaacgaaatcaacaaagatgcagtctatcaggcggtgatcgactggatttatgcaaaaatataggattttttattcatatctggcgtttccggcctgttgtagtattgacagacggcagggaaattgctataatagttacaacattgttacgaatttagttacaggagtgtcaccgatgatgagaaaaatactaagcttccttctggttgtcacaattgtgctggctgtattaccggcggcttacgccgcatcggacgagcccgggcgcaccccggatgagacggcggccagcgcgctgccgggcgcaccggaggagcatcaagaagaatccaaagagccggaggaaacgctgccggccctgaccgatacatataaagaggcacaaaaaacagcagaagaaattctagaattattatttgttgaggctggtgatgaagaaaatcaggctcacaaggttggttatgtgtcaaaaacaactagttctgccggtgttgattttattaaaaaccgtgaaggatttttaaaatatccaacatgggatgagtcgcagtggtctattggttatggcagttgctgcccaaattcgccgaaggttaaggaatattcaaggaatagttttgcatcgcaggaggaatacgaaagcttcttaaactatgtcaaaaatggcattagtcagcaagaggcaaacgcgttgcttcagaatttcttatctgatagctttgaacctgcagttaatgggttgattgcaaggggaatatctttaaatcagagtcaattcgatgcattagttagtttttgctataattgtggcagtggttggactgagaaaagttatcgcttaaatattgggctaagtaacggataccatacgaagacttggagtaaagtgaatagtcttcagaacgtcggctggtactttattaatgcaatggggacttggtgtatatctggttcacagttactccctggacttgctctccgtcggattatggaattggaaatgtttgcatatggtaagtattacaattcctggtcagaacttcgtcaggcagggccacattttacatatctattttttgacgccaatggtggtacgcagatcaatcctgaaggaaccaattgggatctaggacggcggttctacttcattggaacgccttatggttctttgatgaatgctaaacggaacggatactattttgccggttggtacacagagcggactggtggaaagaagattacagcgaacacaattgcacaggtaaattcgtctgccgggatcaccgtctacgcccattggagcacgacaccggtcgacccggagatcggcagcgccagcggcagcaagaccggctacacagacgtcgcggagacggactggtttgccgatgctgttgtcgaggccagccgccggaatattttcagcggctatcccgacgggaccttccgcccgaatgagactctgacccgggctatggccgtgtcgctgctctatcgcatcagcggccagagtggggactataccgcatccgcccgcgtctttacggacgtcgcggcaacggaatggtacgcaagcgccgttggctgggccaggcagaacgggatcgtctccggcacctcggatacgaccttctcccccaatgcgacgatcacccgggagcagctggcgaagatgctctacggctataccgtttacgccacgggcaacccgtcctaccaggcgccggccggctatacggattttgacaagatttccggttatgctatccaggccatgtgctgggctgtgagccatgggattatcagcggcgactccgcgacgaccctcagcccgcagaagtacgcgtcccgcgcccaggcagcttcaatctttgtccgctatctgaataagatcgcataacggggaaatacaaaaccgcaaaacggccgatctggcatcagtcagatcggccgttttgcgtatttattcttgcagcaatgccgggctacgctgctggtccaggcgatgcaggaccagaaagctgccgtccacagcaggattgtcaggagccatgagagagggaaggcgcggtatagggtggggagggtgcagtcggcccaaaataccgtgcagatccagccgatgcgaaaggcgcaggtgccgagcgccgggtacagggcatggccgctgccccgcaggacgcctgctgggatcttgcagagattgcagagcggttcaaaaaggagaatgcacaaaatccgcaccccggcggcatgattctggctggcgaacgtcgttgccgtttgcccaaaggtggtgatgatgtaatacgggaatattcaagctgcatggcgatcgtgctgcctgtgatggcgtccaggctgatctggcatccatcagatcggcctggcgatgaagcgccggagccacctgacgcttgcggtgaagacatttctcgcgtatctgccgtttcgggaggaaacggaaagcgggcagtaatttgccatagcacacagcgccccggccgtcaaaagacaaccggggcgctgtgtgatgcttagatggtgctttcctgccatgcgccttagtcgttttgcaacagggcgcggatggcgatggctgggcggcgggggatgcgctgccagtcaaattctgcgatgagctccgctggggtgaccggctccggcgctgggaggagcccggcggcacaggcgagataaccggtcagctgcggcgcgcgccaacgctggcgcagcgcggcaaaatccaggtcgccatcccgcttggagaggcggcggccggtctcgtctgtcagcagcggcacgtgggcatagcggggcgcgggaaagccgagcaggcgcattaaatagagctgcggcggcgtcgcgggcagcagatcgcagccccggacgacctccgtcaccccggccagcgcgtcatcgcagacaacggccagctgataggcatagacgccgtcggccctgcggagaataaaatcaccgcactctttctgcaggttctgcgccgtggggccaaagacccggtcggaaaaggaaattgtctcgtccggcacacggatgcgccaggccggggctttgtgtatctcggcccgctgggccggggtcaggtccctgcaggcgccggcgtagatgacacggccgtcggacgcatggggggcggacgcagcgtgcagctggccccgggagcagtagcagggatagagtagcccgcgccggtccagttggtcaaagtattcggcgtagacggcggagcgggcgctctggggcggcatctcctggtcccagtccaggccaagccaggtgaggtcctcccgcagctggcgggcataagccgggcggcagcgggctgggtccaggtcttcgatgcgcaggacgatcctgccgccctggctgcgggctgagagccaggccagcagggcggtaaacgcgttgcctaggtgcatccgcccgctgggggtgggtgcaaatcgtccgatcgtcgtcataaaactgctcctttgcacaacggttgcaaaatcagcctgtattcggtataatggggcgtacggtggtgcgctgcctgccgcagggctgtgtttttagctattttagcagaaaaccccggcggcgtaaagggtgcggccccggtttcctttggtattttcccgcgccctgtgcctggggcgggaggcgtgcagaaagaaggtatagcttgaaaaagttacttttggtagtcaatccctgcgcggggatgaaacggatccagcggtatctcgcggatattatcgggctgttcaccgcccacgggtatgaaaatatcgtctatatgaccgccggtcgggcggatgcgacgcagatcgtccagcgcaaggcggcggaggttgatcttgtcgtctgcgccggcggcgacggcacgtttaacgaggtcgtagcagggatgctgctgagcggtgcggataagcccatcggctatatcccggcagggtcgaccaacgactttgccagctccctgggcctgccgaagcagatcat

SEQ ID NO: 4248 - DNA, 2798 bp, Unknown
  16S sequences of unknown bacteria
aacggtgcctcgcccgccgcgggacggtatccgcgcttgtggagaggcgttccggaggtgtcaatcatgagtgtcgcgatatcgcggagtatgaagaactcgatctgatacttcacgccctcttccttgaaccactttatctcgtactcggcggagaggcggttgacgatcgctttcttgacgatagactggcagtccggtattgatgtcagcccggactttatgctgtgccccttgaccgggaaagcgtcgtcctgaccgatccatctctcccacggcagagaattcgtcccgtcaaagagctccgcgaaggtcttcgcgggaaagcttcccatcttgatatacagccgctcggcaaatcttagattaatattgcacctcgcgatagccgcctcatcaccgacaaaagtaacccttccgtctatagtctctgtcttttcatacccgagcgcctcgatctcttcaccgagcaggctttcgagcccgaacaggcaggtcgcgacgaactcgagcttgttattctgatccataaaaacatacctttcaattaacctgatattattatcccacattaattccgaaatgtcaagaggattttgaaaatgtgcgcctgttattccggaataaatcaaaatatcaacgaaaaacgtcaaaaaagccccgcccctttcgaagcggaagctataataatcaatcttcggaaattacttatcgaactcaccgaatctgcggaacctcttgtatctgccgtcccggagctcgtccggcgacagcttcgtgagccggtcgagatcggcggtaagagtctcacggatgttgtcgcacatacggtcgaaatgctcgaaattctcgggaatgacaccgtcggcaaccttgaagtcaaccatatcgtcagctgtgatatgcagcgcgtccgcggcgtccgcgacccttcccgcgtccttccagaggattgaagcgcagccctccggactgatgaccgaatagacggcgttctcgagcatatagacacggtcagacgacgcgagagccagcgctccgccgcttccgccctcgccgatgacaatcgagatagcgggaacgccaagccccatcatctcaaggatattctcggcgatagcctcgccctgacctctctcctcagcgtcagcgccgcagaaagcgccctgcgtgtcgacaaagcagatgacaggacgtccgaatttctcagcctgcttcatgagcctgagcgccttgcggtatccctccggcttcgggcagccgaaattcttcttcattctctcctgaaggtcgtgacccttatctatcgcgatataagtaacaggtctgccgtcaagcataccgactccgccaatgatagcgtcgtcgtccccaaaacgcctgtcgccatgaagctccaccttatcggtgaatattcccgctacaaaatccgctccggtcgggcggtgattctgacgggtaagtctaagtctgtcatacgcggtcatctcgccgccccctttctgaccttcttcgtgtgtatcttaagaagcgtcgcgagcgtgtccttaaggcccttcctctcgacgatagcgtcgatgaagccgtgctcgagcaaaaactccgccgtctggaaattatccggaagcgatttaccggtagtctgctcgacgacacgtcttccggcaaagccgataagcgccttcggttccgcgagtattacatcgccctgcatagcgaaagaagccgtaactccgccagtcgtcgggtcggttatgactgtcaggtagaaaagtccggctctcgaatgcttctcaaccgctccgctgaccttcgccatctgcataagcgaaataattccctcctgcatacgcgctccgccggacgccgtaaaaccgacgaccggaagcctcttctcgatcgcgtgctcaaacagcagcgtaatcttctcaccgacgaccgaccccatgctcgccatgatgaacctcgggtccattacgaatatagcgcactttgtcccgccgatctcagccgtaccgcagacgaccgcgtcattctcgcccgtcgtctcacgcgccttctcaagcttcgccgcgtatcccgggaaattaaggaaatcccggctcttatatcccgcgaaaagctccctgaacgaccgcttatccgtaaacatctcaatgcgcgtccgcgcgtccatacgatgatacttaccgcagtccgggcagaccataaaattatccgcgaactgcaccgcgtcatactcacgcttacaagccgtgcaattcaccatctccttctgcccgatggattttattttattgattattgattcaaacatatcacttattctctaccacagcaaagctgaactcagcctcaacgcaaacctcatccccgacgcgcccggtacccttagccatatagaacccgccgacattccggagtatcctgcactcagtcaccatggtgtcccccggcttcaccggtctgcgccacttaacattcttcatccccgcaaaataaggcgtccccttatcgcagtcaatcaacatacagcaagactgcgcaagtatctcacactgtataacccccggcaccaccggattccccggaaaatgcccctgcaaaaaccactcatccccgcggaacgtagtccgtcccacagaaaccttctccccgtcaatctcctgaacctcagcctctccaagaagaagcatagggtcacgatgcggtaatctcgattcaagctctttatgtgtcatttgtgctccttgtttgtttgcgggggaggaagggacctttgaaaaggtcccttcctc

SEQ ID NO: 4249 - DNA, 32759 bp, Unknown
  16S sequences of unknown bacteria
gtacggcaggttccaaaacgggttgatacgctcgtcgagcagctgcgcagaggcagtggagttggcaaggtggtacgagggtatgaagctgatgtcgtcgaggtagcgcgacacgaggtagtcgaaggtctcctttggcatatagcgcccatcgagcacgaacttgaagtcgtcttcgacggcagggcggtagagcgtgtccatccttgctttgaactcgggctctttgttgttgaacagcttgtcgtagaacgaggggcggcgcatgacgcagcgcacgagcgacttgaagaagtcgctcagatccaaggagcgggcgcccgtctcgaaatgcacgtaataggggagcatctccgagctgccctcgggagaaagcggggcttcgagcaggcggtctgccgggacattggctgtcaactcatcggcgaggtcgtgcctgaagacgtacatcgcgacgtcgtacttgccgtcgaagtggtagtagaacgtgttgcggttgatccccagttccttgatgatcttcgcgatgtgcacgctcctcatcgaagaggcttccgtgatgtcgacgacggcgtctacgattttctgcttcatcgcgcttttcatggtgagagacgcttcctgcaggagtgggggatggggctagatagttattatcaaaaactgtctattaaattatgagcatttcctgagcaaaatagaagccagaaacgagaatcacgccgagtgtcttcaaacgggtgtggcttccacggaaaaggagagatacgcatggactttgggtacacggacgaacaagagctgctcgtcgatagcatcaaggaattctgcgagcgctacaccagcgaagagcagatcaaggagatgtacaaagaccacaagatgagcgaggagctcacgagcgcctggatggaaaacgggttcggcctgatgggcatccccgagcagtacgagggcatcgacaccgacctcgtcacgctgggcatcctcaccgaggagttcgcgcactactccggctgcatgctccccacgctcaacaacacgcttgccatgcgcgacttcatcgacttcggcgcatctcccgagcagatcgaagaggccatggggtcgtacctcgagaccggtcagcccattttctcgctcggcttctccgagcccggagcaggttccgataaccaggccatgacctgcgtgaccaagaagcaggaagacggaacctacctgctcaacggccagaagacctgggttacccagggcgagatcttccccaacgtgctcgtgatcgcaaaagacgaggacccctcgcgccagaaccgcaatatgtccatgtggatcatcccgcgcgagaccgagggcctttccacggcgccgctcaacaagatcggccagcaggccagcgcattttgcgagatgtacttcgacgacgtcaagctgaccgaggacatgcgcatcggcgagccgggcaagggctttttcaatctcatgaagaacttcgagaccgagcgctgcctgatcgtcgcgcagtgcatcggcaccgcccaggcggcaatggatgacgccgcggcgtatgtctccgagcgccaggcattcggccatcccattgcggactaccagctcatccagctcaagctgaccgagatggagaccgctctgcagaactcccgcaatatgctctacaagaccctgtggaagatggacaacggccagtccgtgcgcatagattccgcgctgctcaagcgctacgcgggcaaggcgtgcaccgaggtcgcgtccgaggccatgcagatttacggtggcctgggctacaccgacgagacccgcatcggccgcatctgggtcgacctgcgcggtatgcaaatcgcgggcggcaccgacgagatcatggtctacatcgcagggcgtcagctcgcgaagaagtacgcacgcagctaacgcttgtaagcttgtattacaaacctctggacgcaggaaaactgcaggtcgcagggttttctgcgtccgggggcatcaagccgcggcaggtcgtgagggccccgggccgcggttcccgtcatctttcgcgagcctgcaggtgagcgctcgcgccgtgtccgcaaacgcgcgcgacgagcaattggggagtggtatcacgtatggtgcagggcctttccaccgctgcagacggtggtagcaagttccaggagctttccctgatgcaactcatcaggaacgtctatctcgagtctccacaccagcgcttcgggatgggtctcgacgactcgatcagctatgggacagcgtaccggagcgcgaacgcgctcgcgtggtacttccaagacgagtgcgggctgaagcccgggtccaccgtggtcttctcgtttcccaacctcatcatcacgcccgtgatcatggccgccgtgcagctgtgcggcgcgcgcatggccatgttctcgcaccgcctcgagcaagaggagttcgagcgggcgacgcatctggtaaagcccgacgtgctcatcatgtcatcgcccgatgcctgcctccaggcgcagcaggtggctcccgacgcgcgggtgtttgccgccggctgccccagcgcgccggtccccctcatagaggacctgatccaagaaggcggcttcgacgaggaccgctcgtttcccaactgctcggcggacagcccgatcatcgtgttctcgtccggctcgactggcgtgcccaaggccatcgtcaacaaggcgtcttccttcggactgaatggcagggctctcagaaaggcgttttccatcgagcgcgacgacgtgctatacgttcccgtgccgatgaaccatgtgttcggaatcgtcggcatctacgcgacgctcgtgtcgggagcctcgtttgtgacaagtgcccgctaccatcccgaggaagcatgcacgctcatcgacactacgggcgcgacgatgcaccttggcgtctcgacgatgttcttgcgcgaacttcgtgtgatggagagcggcgcgtggagcttgcagtcgctcaggacgggtcttgtggcaggtgccggatgcccgccgcaggtcatattcgagttcgaagagcgcttcggctgccggctcatgcagtcctatggcatgagcgagaccgccgcgacgctcaccgtgacgcccctcgagctttcggcaggagagcgggcggcaaccgtcggggtctgcatcgagggggcgcaggccaagctgctcccgggcacggacgagatcgcctgcaagagcgcctcgatgatgatgggggtgcttcaggaggacggctcgctcaagctcgacctggacgaagacggctggttccacacgggggacgtggggaagcttgacgcgaacggcatgttttcgattgtgggcaggctcaaggacatgatcatccgcggcggcatcaacatcttcccggcagagatcgaggcggcctacgagcaaaacgaggacatctcgtcgtgctgcgtggtcggctgccccgacgatgacctgggggagcgcacctgcctgtgcgtcaccatgaagccgggtgatcagacgagcgcgcgcgacctgcgcctgtggtcgaaggggcgcatcgagaaatgcaagatgcccgactacgtgctcaagatgaaggagtttccgctgctgggaaacggtaagattgacaagagggcgctgaggcagcaggtacgggcctgcctcagaggcgcgcgttcggaatgattcgaggcaaaggaaagacgacatggacatcgaactgaaggagcgcgtttacagggcagtcgacgagttctgcgacgagcgcattaccgaagagcacatcaaggactggtgcgcatccggaggcgtcccgagtgccgattatcgggcgttctacgaaagcgagctcggcaactactgccttcccccgcaaatcggcggctggggcggcccctttatcgtgcgtgccctgctcgtcgcccgtctcgcgcgtcgcgcaggcgccatcctgccgtaccagaccgacatgaactccatggcgctgctctcgaccatgggctcgctttcgcagcaggagatcgtcgaagacctcaccgcccgtaacggccgcgtgctgttctcgcaggcgttttccgaaggcgccatccaggacgactcggcgagcgtcggtaccgaggtcacggcggacgaaggcggcctgtacctcgacggcgccaagacctacgtcgcaaacggccagttcatcgccgacacgctcgtgctcacgcaggacatggtctgcggggcgcaagacggcggcatgtcgctgtggctcgtgcccatcaacgaagaaggtgtctacacgtacccgctcaacacggtgggccaggagatgctcgcaccggcgcgcatcgagttcgaccacgtcaagctcaaccctgaatggcagatccagaccgggggcatgctcaacaagatgctcgagcgccagtacgagctcgggcgcatcctcacctgcgcggcaagctttgggcttgctcaagcggccctcgacgatgcgctcgttcgctgctcgacgcgcaagacgaggggcaggtatctggggtcgctgccccagattgaagcgatgctcgtcgagatggcggcgaagatccgctcgatggggacgatgatcgagcgcgccgccgattccgtctcgaacgatgcgtccagagacgagcagcagctcaactgctcgcttatgaagtactacgtgccccaggccgcgacctcggtggcaagcgacgcgctgcagatctttggcggcatcggctacacggacgactcgcgcgtgagccgcatctggcgcgactgccgtggcaaccagattgcgcagggcgctgacgagatgatgatccacacggtcgccaagcagctcctcaaagggtacacgggcacgcttaaagacctctagcgctgggctggagctacgcggcaaatacggcaattatccatagccagcggggtggtcgtgcgggtatcgtgagaacggcccgttttgggcacagaagaccgaacacaggaaggctgcgggatgacagagtttaacgagatcactccggagattgtcgaggcgctcaaggcaattgtgggcgaggcgaactgccagataggcgacgagatcggcgaggactacacgcgtgacgagatgccgatctacggatctggcaagcccgaggtcgtcgtcttgccggcgagtaccgaagaagtgtcgcagatcatgagaatctgcaacgagcacacgattcccgtgaccgtgcgcggcgccggcacgggcctggtcggcggcagcgtcccgcttttcggcggggtcgtcttgtgcacgatgcgcatggacaagatcctcgagtacgacatggacaacctcacggtccgcatccagcccggtgtgagactcgccgaccttgcggccgatgcgctcacccgcgggctgatgtatccgcccgacccgggcgagaagaccggctctgtgggtggaaacgtcagcacgaacgccggcggcatgcgcgccgtcaaatatgggaccacgcgcgattacgtgctcgctctcacggctgtgctcgcaagcggcgaggtcgtccgcctcggacgtcccgtcgtcaaggccagctccggctacagcctcatgcacctcgtcatcggctccgagggcacgctcgcggtcataaccgagctcaccatgaaactcatccccaggcctcaggcagacatgacgttcatcctcccattcgaggatatcgagcacgcgattggcgccgtgcccaagatcaagctcgccggcctggcaccgcagtcgctcgagttcatggagcgcgacatcgtcgactcgtctgcggcgcatacgggcaatgccgtcatcccgaccaacgtgcagggcaacgaggtcggtgcctacatcctcgtgacgcttgacggcaacgacgaggacgagatcttcgcgcgtgccgagcagcttgccgagattgccgacgagctgggtgccttcgacacgctcgtcatcgaccagccttcaatcaaagaggcggtctgggcggcacgcagcgcgtttctgtccgtcatcgaggaagaggagaagctcgtcgacgagatggacgtctgcgtcccggtcgacaagattcccgcgtttctcgagtacatccacgaggtgggcagggagaacgagatcaggatccgctcctttggccatgcgggagacggcaacctccatatttactgctgttcgaacagcatggagaaagatgccttcctcgaaaaggtggatgccgtcatgcacgcggcgtatgccaaggcgacggagtttgatgggcaggtttctggagagcacggcatcgggcacgccaagaagcagtatctgcgcgagtcgctgggcgacacgtccatcgagctcatggcgggcatcaagcaggtgttcgaccccaagggcatcttgaatccgggcaaaatctgcagctaagaccctcaatcatcgtttgcaacgagccgccggcacccagatgggttccggcggctttctgatatccagacacacaataaaaatgtctaaatgataagttctgagaatgattccccattctatatcctgagaaaactgaatcaattgtttttcttcatgtacagacaatacgaaaaactgcctattactttctcaagccagtatttccacaatgaaggtagaaaccatgcgccgcgagtgcagcgcgcatatctttcgaggaggaaacatggaagacgtcaagcgtccgcttgaaggtatcaaggtcgtcgagatggcgaccttcatcgcagtccccgcagttggccgtatcctggcagacctcggtgccgaggtgatcaagatcgagtctgccaagggcgataacctgcgctacaccgcccccaacgagggccgtccgtccgacccgcatgaagacatcaacttcgacctggaaaacggcggcaagaagggcatcgtcgtcgacctgcgcacggacaaggggcgtgaggtcttgttcaagctgctcgacgacgccgacgtgttcctgaccaactggcgcccgcaggcactcgcgcgcaagaacctgacctacgacgatctcaaggggcgctacccgagcctcgtctacgcaaacctcaccggctatggtgagaaaggccccgacaaggatcttcccggcttcgactacaccgccttcttcgcgcgtagcggctggtctggctcgctgtatcagaagggcaccgtgccgtccaacctgattcctgccctgggtgaccatcagggagcgctcgcgctcaccgtcggcgtgctcgctgcgctgttccgtgccaagacgaccggcatgggcgagaaagtttccacgaacctcctgcacactgccgtgtgggtgcagtccttccaaatccagggcgcgcagtacggcgacgagttcggtggcgtttcctatccgttcgaccgtcgcgacaaccagctcccgtaccagcccgccgtccagaccaaagacggtcgtttcctgcaggtcatgggtcccaatttcggcatctactactcgctcatcatgaaggcgatcgggcgcgaggacgtgctcgacgaccccgtcttgagcgaccagaaggaaaggatcccccccggccgtgtgggcgaggcctacgacatcatccaggagggcttcaagcagaagaccgccgcggagtgggcgccgatcctgaccgagctcgacattccgtttgctctgtgcaagacctacgaggaggtcgtgaaagacgagcaggcgtgggcaaacgatgtcttttgcgaagtcgactatccgcgtggcccgaaggcaatggtccgcaccccaatcgaccttgaggaaaccccgctccctgaatacgagaaggcgccgcttctgggtgccgacacggtgagcgtgctcgagggacttggctacgagcagtccgagattcaggcgatgatcgacgacaagaccgtcggcatctgggaagagaagtaggaggcaccccatggtccaattggaacctgcaaaaagcgtagccggacgcgtcctcgccgaagtcgcgaacgacgtgtacgaagacgccctcaaggcgaaggcgcgaggcgaaaaagtcggctggatctcctccaatttcccgcaggaaatcccgacaacgctcggcatcccgtgcgtgtaccccgaaagccaggcggccgcgatttctgcaaagggcgccggtcaggagatgtgcgagcatgccgaaggcgagctcggcttttccaacgacatctgcgcctactcgcgcatcagcatggcgtatgcggaccttgccaagtgccctaatggcgagcgcgagatgcccctacctgatttcgtcctgtgttgcaacaacatctgcgattgcatgctcaagtggtacgagaacctgggcaagacgctgaacattcccgtcatcgtcatcgacgttcccttcaacaacaagtacgacgtcgaccgcaagcgcatcgagtacatgggcgcgcagttccgcgacgccatcgcgcagctcgaggagatcacgggcaagaagtgggacgagaagaagttcgaggaggtctgccgcatctctggccgcatcggcgaggaatggctcaaggcgaccaagtacctgaactacaagccggcgccgtacaagggcttcgacctgttcaaccacatggccgtcgccacgatggcacgcggccagcagcgctcgttcgatgcgttcatcgagttcaacaaagagtgcgagcagttcatcaaggagcacaagtcgacgttcaagggcgaggagaagtaccgcgtcatgttcgagggcatcgcgtgctggccgtacctgcgcgtcacctactccacgatgaagaacctcggcatcaacgtgacctcgtgcgtctatggcccgtcgttcgcgttccagtaccacaacttcgacgagatgatggaagcctacgcgtccgtcccgaactcgattaacatcgagcgctccaccgagctgcgcgagcgcctgtgcctggaaggcaaggtagacggcggcctcgtccacatcaaccgctcctgcaagatgtggtcttcgaccatgcccgagatggcgcgccgcatcaccaacgacctgaacatcccggtggtcacctttgacggcgaccaatccgacccgcgcaacttcagcgaagaacagtacgtcacgcgcgtccaggggcttgccgagatcatggcagccaacgcgcagaagggggagtagaagatggcgaccatcaacgaactcgtagcacagctttcagaggtagccgccaaccccacagccgagctcgaccgccatatcgccgcaggcaagaaggtcatcggcgtcgggccgtactatgttcccgaagagctcgtgtacgcggcgggtggcgtgccgtttggcgtgtggggccgcatgggcaccgccaccgaggcgcgcaagtactttccgccgttttactgctcgctgtgccagatgacgctcgagatggggctcaaccacgagctggacaagctgtccggcttcatgactgcggccctgtgcgacacccagcgcggcttctcgcagaacttccgcgtcggcgtgagccaggtcccgatgatcttcgtctcgcagcctcagaaccgcgccaccaaggccgggcatgactatgccgtgagctcgtatcgcgagctcaagaccacggtgggcgaggcgtgcgatgccatcattgacgacgcggacctgtctgcggcgatcaggctctacaacgagtggcgtgctgcgatgcgcaccttcgtcaagcttgccggcgagcgtccggcgctcatcagcgtctctgcgcgcaacgatgtcgtgaacgccggctactacatggacaaggccgagcacctcgccaaggtgcgcgagctcaacgagctgctcgcggcgcaggagcccgatacggacggctactccaagatcgtgctgtcgggcatcctctacgacatcccggcgatcaaggacatgctcgacgagaacaagtacgccatcgtcgcagacgatatcgccaaggagtcccgcgcgttcgcgctgcaggtccccgaaaagggcgaccccatcgaggccctggcaagcggctattgcgcgctcaacaacgattccatcctcttcgatccggagaaatcgcacatctcccacgtcgtcgacatcgcgaaggaaagcggcgcacagggcgtcgtgctgctgctcgccaagttctgcgacccagaggagttcgatgccccgctgctggcaaaggcctgccgcgaagccgggcttcctctcgtccagatcgaggtagatcagtccgcagagagctacgagcaggcccgcaccctgctcgagaccttcaaagagctcctgtaggataggcggaaaaaagacgtccgggcgcgccggcaggtgttgggcggagcaggctccgtgccaatgcggtgaggcgcgctcgcgtgcgataaggagaatcaaggcatggcagagacgtttttcctgggaattgacatcggttccacggcttccaagtgcgtcatcgtcgacgcggcgggcgaggtccgcggcacggggctgtacccctccggcgcgggcaccaaggggccgagggcggcgatggacgaggcgttgtcgaaggcgggcatcgcgttcgaggacatcgcgcgttctgttgcaaccgggtacggccgcaagctcatggactgggctgattcccaggtctccgagctctcctgccatgccaagggcgcctcgcacctgttcgaaggcgttcggacgatcatcgacatcggcggccaggatgcgaaagtactgcgtctggcacctgacggcacgctcgagaacttcgtgatgaacgacaagtgcgctgccggcacgggcaggttcctcgacgtgatggcaggcgtgttcggtatcgatgtctcggagctctccgactacgatcgccagtcggacgccgttacgtccgtgtcctcgacgtgcacggtgttcgccgaatccgaagtcatctcaaagctcgcgagcggcgagcccatcgcgaacatcgttgccggcgtgcatgaatccgtcgtcgaccggagctgtgggctggcaaagcgcatcggcgtggtgccgcccgtcgccatgaccggcggtgttgcgctcaacgacgcgctgcgcgaacggctggcggcaaagctcggctatcccatcgagacgtccgaattcgctcagttcaacggcgcgtacggcgcggcactctacgcgctcgaaggccgctagaaaactgcaaattggggacagtccccaatttgcagttttgtatggagaggccccttaatcttccagatacgcaccggtctggcggctccacagctgcgcgtactcgccaccctgcgcgatgagctcggcgtgcggtccgtcttcgacgatctttccccggtcgagcacgacgatgcggtcgaggctcgcaacggtggaaagccggtgcgcgaccacgatggacgtgcgcccctgcatgagcttctcgagcgcgtcttgcacgagcttctcgctctcggaatccaacgcgctcgtcgcctcgtccagcacgagaatcggcgcgtttgcgagcatggcgcgcgcgatggcgacgcgctggcgctgcccgcccgacaacttgatgccgcgctcgccggtcacggtgtcaaagccctgcggcaaccgttcgatgaactcgagcgcgtttgcttggcgtgccgcctcgcgaatctcgtccatcgaggcgtccgggcgggcgtaggagatgttctccgcgatggtgcggtggaagagcagcgcctcctgcgggacgtaggcgacctgccggcgcaggctctgctgcgtgcccttcgcgacgttttgcccgtcgatcaagatctcgccttcctggatgtcggacaggcgcagcaaaagtttggtgagcgtcgtcttgcccgcacccgacctgcccacgaggccgacacgctgacctgcgggaatatgcaggttgaagttgtcgaacaccttcgttttggcattgccgtcggtgtaccagaagttcaggtctttgaagtcgatgtcgccggcggtcaccttgagcggcttggcattgggctcgtctgccaccaggcgcggctcgtcgagcacgctggtcatgcccgaggcatctccaaatgcgacgttgaagcgctgcaggccacggctgatgaagttgaactggttcgtgatggtgtaggtgtacgtgaacatgatgacgagcgtgcccggcgtgatgccgaaccacgcgttgccgcctgcaatgaacacggccaccaccgacatgatggcaagcgcgatgcatgcggtgatgattccgcgtgcgagcgaggccatcatgcgcttggtgtcgcgcgccacgacctcgcggttcgcgcggtcgaacagcttgcgctcataatcctcgcgcccgtaggtcttgacggcgaggatgttggtgacggcatccgacagtgcgcccgagagcgtgttctgcgcatcggccgcatcctcgttgagcgagaggatccgcttgtacatcacatacgagacgatggcgtagacgaccagcagcgccatgaggatgaccacgtacgcgggcacgcgggggatcaagatgatgcaggtggcgatgatggagcagatgatggggaggaaggggaacgtgatgttctcgagcatctgcgagtaggcgttcatgaacttggtggtctggctcacgagcgtgccgccaaagcggttggagtggaaggtcatggactggttcgagagcgcgtcgaacgcctcggtcgcgaggtcgtagctcgcggcgatctcgagcttgaacgacgtgtagtcctgcaccttgctgcatgcctggccgatgaggttgatgccgccgagcgcgatgatgtaggggccgaacacctcgaagacctggtcgggtgcgacgggctcggcgctcacgcgatcgacgatcatgctcatgagcagcgggttgccgtagctgagcaggacgataaatccgatggaggagagcatgaggcctatgaacagccccaggtgcttggatgtggcagcccagtaatagtggagcgtgcgccgtgccgtggatttcttgttctgctgtgccatggtgtcctctctgaagcgtatctccgagacgatactggtacgcggcgcctgcgccaagaggacgtcatcgacacgtcatgaaagcgtgaacggcctcgctgcgcttggggccgccctcatgctctctcgcatgctcgtgcggtttgccatgacctcgagaaacttgcccgtgacagccgagttgaagccggtcgggcgtaacagcgtgtcgacaacctcgtcgccgtccatgatggcgacctttgtcatggtcgatccgatgtcgatgcctatgtgggagcgagacatgtctttcacgcctttcgtcagtacatgtcgaggacgaacacgccctcgtggtcgagtccgtaggcttcgagggcgccttcgatttccgcgtgcttctccacgtcggcggcccatgcaaagccgcatcccgcgtcgagctcgctcgggacggggatgatgcgccctgcgaacccgtgctccttcgcgctgtcctccacagcgagcgcatcggaaagcgacgagaacgtgacgatcaccttgggggtcttcgtgcgctgcatctgctatgccctcgcaatctcgcgcagggcgcggatgccggcgtcgacctcttcgggcgtgttgaagctcgagaagctgaagcgcaccgcaccctgggtgtcggtgccgagtgccctgtgcatgagcggggcgcagtgggcgcctgcccgcacgcagatgccgtagtcatggccgagtgcgtcggctacggtgcccgagtcgagctcgcccacgttgagcgcgacgatgcccgtgcggccgatgtcggcgtgcccgccgtacaccttgatcccctcgattccaagggctccttcctcgaaccgctcggtcagctcgcggacctgcgcggcaagtgagtcgatgcccttgtcctggaggtagctcacgcctgccagcagcccggctatgccatgggcgttgagcgtgcccgcctccagatgctcggggtagaagtcgggctggcgccggtcatagctgtgcgtgcccgtgccgccttccttgaaggaggggatatccacgccctcggcgagcgcgagaccgccggttccctgcgggccgtagaggctcttgtggccggtgaaggcgacgatgtcgagaccgtcgcgcgccatgtcgagggggacggcgcctgcggtctgggcggtgtcgatgcagatgagcgccccatgctcgtgggcgatgcgcgccatccgggcgacgtcgtacacatcgccggtgaggttggacgcgtgcgtcacgaccacgagcctagtagtcggcttgaagagccgttcgtattcgtcgtagtcgatgctcgcatcgcgggagaccgacaggatggacacgtcgacctgctcctcgtctgccttgcgaaagagcgggcgcagcaccgagttgtgcgaggcggctgtcgtgatggcatggtcgccccggtgcagtagcccgctgatgaccacgttcagggcctcggtcacgttcgcggcaaagacgacccgcttcgcatccggggcgttgaagagcgtggcgagcgccctgcggcatctgaacacggtgagcccggcgtcgagcgacgcctcgtgcacgccgcgccccacgccgccaaagtcgttgatggccgcggcaactgcctcggccacctgcggcggcttcatgcgcgtcgtcgctgcgttatcgaaatagatcatgggctggcctttcacctgtcgtttgttcatatgcgcaccctagcagtacttgtcccgtctggggtcgatctggcaggggagcggcacgatatcttccatgtcgatgcgctcccttcgggccagctcctccaggtgggcgacgtccccgcattcgacgagcagcgcgaccccgcacgacgcctgtatggcccgcggggtcgtggagatgcgcgtggagtacccgtgcgcacgtgcgcactcgtgcagcgcgaacgcgtcggcgtggctgccgaagggcaggcagcagccgatcttctcgccggggtgggcgggcacatggcagaaagggcagtcgaagatgggatggccttcgcgaaccggcagaaaaaacgcgtgcccaagcagaaaaaggagacgcgcgagctggaagcagccgagggtgagattgcccgacatgttgttcgtcgggagcgattctagcatgtggggcagcctggggtgctccgttgcgcgtagatgcgtagccgcgcacgatgagcgtgctcctggtgcatggcgagcggcgatgaggcgggcggatcggggggtgcggcctgccgatggagcctgtgcaaagcggctgggaccgtcgcgtttacttcagggtctgcttatctcattattttggactccgaattatattgactggactataaaatcattcataatggcttgcgagagaaggaatgcctcggcaggtaactgagaggccttgagcgattttcagcaaaggagctggggctttatggcagataagcagccgcgcgttacgtccgtcaacatttctcccaaaaagggcacgcagaagatgcccgtcgaccatcctgaagaggtcatcgagcagtacggcttcaagaatgatgcgcatgcaggacattggcaccgccaggtctcgttcttggcatccgaatccatcgacaaggcagaggagatgggcctcgacgtggaggagggctcgttcggcgagaacttcaccacggaaaacctcgacctgaacgccctgcccatcggcactaagctcaagatcggcgacgacatcctggtcgagatcagccagctgggcaaggtgtgccacacgcgttgcgccatctactacgcggcgggcgattgcatcttcccgcgcgagggaatcttcggcgtcgtcctgcacggcggcatggccaaggaaaacgaccccatcgagattatcgagatgggcgatggcacctgcgagttcactccgcaagaggcgctcgacgaggtcgaggccgctcgcgccgcaggtacgctgtagcctccgggcacatatctccaggtgctcgttgcacctgtcagaaaacgaaccaagggagaaggagaaggccgcatttccttctcccttacgtttgggggggagaacatctcgcgtgtcacacgtctccctcgctgcgttccacggtagaatccgtctcccttgggtggtttcatgccatgagcctcgaggaggcgtctcccttgggggtgcttcatggcatgcgccacgcgggaaagtcgcccttgggtggattcgtggcatacgcctcgagtaggcgtctcccttgggctgtttcatggcacgcctcacacggaagcgtctcctttggttggattcgtggctctcgggcggaggtcctgccgcgaaagccgccgagggggacggattttgccgcggaatgccccaagggtgacggatttcacccggtttgcatctcccttgcgcgctctcatgccacctgcacagacacctgcacagacacctgttcagacacctgcacagacatgcaggagcctttgagtgcgcccagcaaacgcatcggtactgcttgaccatgcgagtatcgtaggaacagaacagatagttcgagctttgaggaaaggaatgccaagtggattcacgcgagtatgaaagcgccgccaactattggatcgaaaaggacgcggcatcgaagcacatgccccgcgaacagctcggggaggcaatagacgcgtttctcgcggcgcataacacgtgcgcgctcgcgacgggggcgggatcgttcgtgcgcaacacgcctctcgagtacaactacttcgacggcgagatctggatcttcagcgaaggcgggctcaagttcaaggcgctcgcgcagaacaagaacgtctgcctggcgatcttcgacgcgtacggcgccgcaccgcttgcgggtatgcagatcatgggcaccgccgagctcgtcgaggattggtcggaagagtatgtgaggctgctcgagcgcaagggcatcaacgccgaggcgttcaagaagtcggggcatgcgcttcacttgctgcacatcgtcccctcgagcatcgacttcctcaacagctcgttcaaggagcagggctacagctcgcgtcagcatctctccttctaggaagagagaacctgcaaatcaagaggggctgcaatccgaagaacgccttcggtttgcagcccttccacgttacgtgtcggcacgtgctgagtgcctgcctgcccctctacagccccaagaacctcttgatggcaggcagttcctcttctgcctgcgcatatccggtgtcgtagctttcctgcagcttggccttggaggtctcgccgctcgtcaccttcatgccctcggcgtagaacacgtatgccgcgccctcatcgccaagacggtcgatttcgtcggcaatgaggttgtagcgcgcccagcggtcgttgagcgcgcgcaccacgtgatgcctgcgccacagcgccgtgttcatcagcgcatctcccgcgccttccggcttgctcttgcggtacgcgcgcgggcgcgtgcggatgatgaggaacttcttgaacccgtcgcgctgtgcacgcggcagcagaaagccgccaccttctcccagcccgccgtcatagtagtagcggccgttgatgcagggcggcggcatgaacatgggcagcgacgaggacgcgcgcacgcggatcatcatgtcctcgagcgtgggcatgtcgtctttcgtccagtacacggtctcgccggaatcgcggtcgaaggactcgatggtcgccttggcggggttggccacgaaggtgtcccagtcgaagggcaggtagccgccgggaagcccggccttctggtagatgtactctgccgagaagaagcccttgcccttgatgagggtgtccacaccgccaaactcggggtcgtcgacgaggtcgacgaaggagcgcttcgtgcggtcgatgtcgcgcgagatgtagttgacggtgttgctcgaaccggcagaaaggccgtacacgttgtcgaagtagatctcgttttcgagcaggatgttggcgacggcagcggtgtagctcgcgcgcatgccaccgccctcgaagatcaacgccgtgtcgaagacgttgtttttcagctgttccatggaactccgtttctcgtctgtcgcattggagcattgtacgccccgacttccgctggcggatatacaatgcggtatcttgctcatactgtccgggaggaggaaaggcaccgtgtcgacgcggcttacggcgggaggcatcgcgttcaccgtcacgcgaagaaagagcatgcgcaccatcaggctgcacgtcaaacccggcggcgcggtggaggtctcttgcccgtatggcgtgccaaacgccgagctcgtggagctggtcgagcgccgcgctggctggattgccgcaaagcgcgcggaactggcagacacgccgcgtgcccacgcggaggaggcgagcgaggaagagaagcgtgcgtggaggacgctcgtcgaggcggccgtgcccctgctgctcgagaagtgggagccggtgatgagcgtgcgcgcgagaaagctcgcgtatcgcaacatgaagagccgctggggctcgtgccagccggcgacggggcgcatctgcatcaacacgcgccttgcgctctacccgatggagtgcctcgagtacgtggtcgtccacgagctgtgctatctgctcgagccgagccacaacgcgcgcttccatgcgctcatgacgcagttcttgccctcgtggaagcacagcgagcaactgctgcggaagtgacgtggcggttggacagttctcccggtgccagtctagccgagacgggccatcttgcgcttcgtccccgtgatcttgattccgcgcacgctgttcgcgaacttgtagaactgcgtgtagccggtgtccttgatgttgaaatcggggaacttgtcgtagaccagcgcggcgagcgacgacacgctcatcgacttcttctcgcgcttgcccagctccaagatcatgtactgcgcgacgcggtcgctcgcggcgctcgtgtccgcgatgcgcacgttgtacccgtcggaggcgggaacaagctcgaatcggtcgaagtcgttgacgagcttgctcagctgcgtgtagccatagttgcggacgtcgaagtccgggtacttcgcgctgagcgaaagcccgatctgggcgagcgacgtggtcttgccgcggttctcgttggtgtgcagcacgccgccgatcacgtcggagacgtcttgcagggtgaccgtcgtctcgatctcctcggtgtcgacgtcgcttgcgcccgtcgtatcggcatcctcgatgtcttcggtcttcttgagctcgatattgtggagatactcgatgttgacgaagttcgtgcaggcatggcggaacgagattgccgtctggttgcgccccatgccgacgacgagcatgccgctctcgcgcagacgcgaggcgaggcgcgtgaaatcgctgtcggacgagacgatggcgtcgaccttgccgccgtagaggatgtccatcgcatcgatgatcagggtcgagtcggtggcgttcttgccggccttctcgcccttcttgtggcttttcacgttggagaactgctggatgggcgtgatggagttatcgagcagcttggggcgccagctggccatttggggatccgtgaagtcgccgtagatgcggcggtacgtagcgatgccgtacttggggatctcgttgaggatggtgggaaggtattttgcagagacgttatcggcgtctatgagcagggccagttttggctgctcattttcggttatggacatgaaatgctccattgggttgtttgaatcggtgtgtacatagtacctccaaactattcacgcttgagataacacacacgacccccagaaaaatgcgccctgcgctcccggaaatgaccaaggagaaccgaccccgtctgggcatgcctatgaccagcgggaaccgactcccgcgagggagccgaacatgaccaaggagaaccgaccccgtgacggagacgcggtggggagcctatttgtcgacgaggaacatctggcgcgcgtcgaagtgcaggcgcatcgtgtcgccgtctttgggcaggttgtggacgccgtaggccttcttggagacgcgccagtagatgcgcgactgcgggttgccggcgggggcgtcgaggatgaccgtgcgctcgaagcgcgtgtcggacacgcggtgcacgtgcagcgcgtacaggttcttgcccgaaagctcatcggggtctgcctcgcggataaagccggcgcggatccccaggtacttcacgtcgtcgggcacgggacggtcgggcccgacgtcgaaggtcatgccccagtcgacggcctcgacctcgtgctcgccgatctttttcgcgcagctgatgttcttgcatcccgaaagcttcatgcccgcgagcgtgctggggcggtgcatgagcttgcgtgtgcgcccgatttccatgatgtgcccgttgtcgacgacggcgatgcggtgacagaacctaaacgcctcgtctatgtcgtggctgacgtagaggatcgtgccgtcgaacaggtcgagcaggtcgagcagcgactgctgcagcgattccttgaggtgcgcgtcgagtgccgagaacggctcgtcgaacatgaggatcttggggcgtgcggcgagcatgcgggcgagtgccacgcgctgctgctggccgccggacaagcgcatggggtagcgcttctcgaagcccgccaggccaaagagcgcgaggtacttgtgcacgagctcggcgcgttcttccttgtccatcttgggatccatgcccgcggcgacgttttctgcgacggacaggttgggaaagagctggtagttctggaacagcagcgcagtcttgcgctcctgaggggagaggttgatctttttctcagaatcgaagaacaccctgtcgttgacgacgatacgcccctcgtcgggcgtctcgacaccggcgatgcagcgcagcgtgagcgatttgccgcagcccgatgcccccagaaagcccagagtctcgttacccgccgtcagcgagatgtccaaatcgaacgaggagaggtgcttcttgatatcgacttcgaggctcatcgttcggctccttcctcaaggtccttgtcatctgcgatgctggtcccgtgtttcgcgttaaagccgagctctgcggccatatgctcgtcgatcgcgaaggctacctcgcctgctgcgctcgggtctgccgtgtagatcgcgtcttctttcgtgcccttgccgcctaccttgcggtagcgctgcgcatgcgcggagtagatgttgatgatcaagatgatgacaaacgagatgatgatgaccacgaccacccagaacacggcgacgggggagttgccgcccatccacgcgaagtagatcgcgatgggcatggtctgcgtcacgcccgcgtagttgcctgcaacgaacagcgtcgcgccgaactcgcccatggcgcgggcgaaggcgagaacgatgcccgccgcgatggacggccaggcaagcggcagcatgagcttgcggaagatgcgcccttcggaccagccgagcgtgcgcgccgcgtcgagcatgttcgtgtcgagtgcctcgaaggcgccgagaaccgtgcggtacatgagcggaaagcccacgacggtcgcggcgaggacggcagcgggccacgagaagacgagctggatgccgtggtccatgagccagcggccgaacggggtcgagctgccaaagatcacgagcaagatgaagccgcacacggtagggggcaggaccatcgggatggtgaacagcgagtcgaacaaccccttccagcggctcttgacgttcatggccttgcgggcggccaagatgccgaggatgaagatgaagatcatcgcgacgccggcggtcttgagcgagacccacagcggccggtagtccatgttgtcggggctcagaaacttcatgagctgcccgaaccagccgccgtcgtctgccacggtcacctggtctttgggaagcaccgagcccgacaggcagaacttcgctgccccacgcgagctctccttatcggcgcccttgcacacgacgtacgtgtagccgtcgatgtcggtgtcgaaggtgtaggtgtagccttcgcctgcgtattcggtgctggaggtgaacacccactccgtgttgagactggagagcgcgatgccgccgtcggaaaggtcggtgtcgagcgacgagagcatcgactcgaaggccgagcactgagcggggtcggagatgtcgaaaccggcatcttgggccatctgcgcgggaatgtaggcgatgatcttgtcgtttgtcacgacgacggagaagtacgacgcgttcttgccaagcgggaagacgtagccgtagtaggtgccgtcaacggtcttgttcatgcccacctggctgcgctcgacatcttgcagcccaaaggcggcgctgtcgatcacgatagaagtcgccgcgttcttgttggaattgactgtggaagagccgtcgtctgcaaaggcgagggcgccaaagacgccgagtgccgcgatcaggaagacgcaaactgccaaaacgcatttcttcatcggaggaacgctgcccctttcacaatctattctcaatgcgaaatattcgcgctagacattctagctgatagggaacggtggtattcaaaggaaaaggcggatgctgggcttgcgcctcgcacccgccttctcggagtagccggctcgataagggaggatttagccggcgagctcgaagccgtagttgctgaagatcttctgagcatctgcatcggtcatgcagaagttgaggaagtcggctgcaacgtcggcgttggagctggtcttgacgactgcgcccgggtacttgatctccttgtgcgaatcagacggggtgacgtacgcagactggatgccgtcgtagcggtagatgtcggaggagtacacgaggccggcggcaaagtcgcccgtcgcgatgtggttggcaacggtgccgaccttgtcggagccgtagtcgagcgtgatgccctgcggctggatgttggtgatcttgccgtccgcgtcctcgtcgtaggtgacaaggccagcgctcttgagcgcctggatggcgtactttccggcggggacggtgttgggctcgccgatggcgatggtgcccttgacgttcttcaggtcctcgagcgaggtgatcttgatgtcgctgtccttcttagtggtgacgacgaggtcgttcgtgaacatgtctttgcgggtgtcagacgagatgaggtcggcagccttgtccatggtcttggtcgaggcggtgatcagcacgtcggctgcggaattgtccgccgtgagctgctggaccaggtcgcccgatgccttgaactgcgtgtccttgaacgtgacgttggagtgagacttggtgtagagctcctggacctcgggcagcgccttttccagagagttcgcggcgaagatctgcagttcgacctgctggccaccgttgctggaattactcgacccgttggagctcgaagtctggctgccgccacatcccgagagcgccagcatcgcggccattgcgccggcgacgacgccgcagacgatgagccgcatcacgttcttgcgtttcattgaaacccctttcaaaactgattggttcgtgcctcgcctccccgaggcggaatgcaagtattcttgcatcaaactatgtacttcgcaacagataatattgaaatggaaataatctcaataaaggataatacgggaaccgaaacaatatatgacctgcggaaatgctacggtcaccgaagcaaaaaattacataatgcccgttaattggaggatgaggcgcaccgcaaagacgatgatcaccacgaggatgatggggcgaacgatggccgatcccttgttggaaaaaagttttgcgcccaggtagtttccggcgatgttggcgatgccgccggtgatgccaagaccaatgagcgtggttcccgagacgaggaacacgatgagcgccgtgacgttggtggtgaggttgatggctttggtcacgccggccgccttgaagacatcgaggcgtgcgacgcctgtgagcagcagaagcagaaacgtgccggtgcccgggccgtagaagccgtcgtagatgcccaccacgaaggcgactgccatgcaaaggattgccgttttcgacgcgccaaaggcgggcttgtcgttgttcaggtccttcttgtagattacgtagaacccgacgatgggcagcgcgacgagcatgaatatcatgagcaggcggtcgctcgcgacgagcgcgagccgcgcccccagaaacgagccgagcagcgccgtgatgacgctcaggccagcggtcttccaggggatgtagccgtttttggcgtagcgccaggtcgcgatggacgtgcccatcgaagacgacagcttgttcgtgccgatggcgagatgcggtggcagcccgcaaaacaggtaggcggggatggagatgagcccgccgccgcctccgatggcatcgacgaagcctgcgatgaagagcaacggcaagacgatggcgagtccccagagggggagcccgcccgtgataaagcccacgaggtccacgaatacgtcctttgttcctgcggcgtgctggctatttcttgctggagacgatcttgggctcttcgatgtcctcgaacttgtcgaggtcgccctcgttgccgatctcggatgtgccatcgtgttcggtgaactcgtcgtagtcagtgggctcgtcgggctcgcccaaagagtcggcgtcgacggcgccaaagtcggagttcttgaagactcccgtatcgagcataccggtgagcttggccatgatggtggtcacgacggcatcgcccgtgatgttgatggtcgtgcggcccatgtcgagaatgcggtcgatgcccatgatcatggcgacgccctcggcgggcaggccgacgctctcgaagaccatggcgagcatgatcgtgccgacgcccgggacgcctgccgtgccgatagaggccgtgaccgcggtgacgacagtggtgacgagcatggcgggggggagggcgatgccaaacgcctgcgcgatgaagacgacggccgcgccctgcatgatggcggtgccgtccatgttgatggtggcacccagcgggatggtgaacgacgagaccttggggttgacgccgaccttctcctcgagcgtctccatgttgagcgggatggtggcgttagaagagctcgtcgagaacgcgaacaccatgaccggccagaacttgtgcaggaagtggaacgggttgaggcgcgtgaagaccacgagcagaagcatgtacacgacgagcagctgcacggcgagacccaggtagacggtgccgatgaacttgagcatcggcagcatgccgttgatgccgaggttggcgaacgtacgcgcgatcaggcagaagatgccgatgggggcgaccttcagcacgagaccgatcatcttcatcatgatggcgttgaactggaagaagaagcggttgacggtgccgaccttcttgccgaggcggcccaagatgaagccgagcacgagcgcgaagaagatgacttggagcatgctgccttttgccatcgcgtcgaccacgttggtggggatgatgttgacgagtacgtcgaccatcgtctggtcggtcgaggtcgccttgggctcctgggtgaccaccgacgccatgtcaagacctacgcccggctgcacgattccggcgagaccgagcgcgatgattaccgcgacggccgtcgtgacgaggtacatgaggatggttccgacgcccaccttgccgagcatcttcgggtcgctcatcgaggcggcgccgcagacaatcgagcagaacacgagcgggatgacgagcatctgcatcaagcggatgaaccactggcccaacacgtagaagatgccctcgataagaatcgagtctgcggcagacccgctgggaatgacaaagctgcagatgatgccgacgacgatgcccgcgatgagcgacaggaggatccacgtcgtcaggccgagccccttcttctcggatttgccggcagaggttttagtggtggtactcaaggcttctccccatctagatgcgtgaatagtcgattcactatatgaggaaaacctgtggtgctcgaatgtgcatttgacctgcggctcgattttttcggggaacgcggtgccggcggatacgtctggaggctacttgccctggagtttcgctcgctgcttggcgcgcacgtttcgcatgttcatcacgccgcgctccatgccgtaggggatgtagcccatgtgctcgaggtcttcgggcaggtagtcgaacagcgacagcgctgcggtttgctcgcgtgtgtagggccggtctgccttgacggcgcgcagcgcatggatcttcgcgcccttctccgtcagacggtcctcgtactcggtcgtggccagctcgggccggtctgccttgaggtcggtcgagctccacacgacgtcgtaacccgccagatcgaactgcacgagcgagaactcgaagaacggcgcgctgtccgtcttcatgtggatggtgccgccgtctttgagaagcggacggtacatgatgaggttgtccacgtaggtgaggcgctctgtggcgtgctttttgcgcgggtgcggcgtggagaagttgaggtggatggcgtcgagctcgcccgggccaaagaggtctcccaggtcctcggcgtctgcgagggtgaagatcacgttgtccagcccgccttcgacgaccttctctgcggcgagcgcgatgcagatcttctcgtagtcgagcccgatgaagagctggtcggggtgctcttttgcctgggcgagcgagaactggcccttgccacacccgaggtcgaggtgcacttcgcgcgcagaggggcagtgacgcgctacccatgcgcccttgcattcggcgggctcgagctcgacgccatcggcgtaccactcgaagcgctcgtcgaggttcttcagcggccgggcgtgcgatctatggcgcttgcgcagttcttggggcatggagagatgcttccgttcgtaggtggttgcggtttgcaagaaggatagccgaaatagggcggtgggattgctccgatttgtatgggatgtcacgggggacttcaagggtgacggattttgccgcggaaagccccaagggtgacgttttcggccccgaaaccttcgccctcgggctacttcgcggcaggctggtgcgcggggtgccgtgaagggccgcaagggggacggattctgcaagcagtccttctgcattccaaaagtgactggctcttttctgcaaatgagcaaggggcatcttcaagcggcgctacgcttctcagtagagttgtgcgaggggagaggtgcctttgaaaagcggcaacaaaaacagtgacggcgggcgccgaggggttcatttcgggtacctggtcgtcttcacacttgtgctcacgagcttcctgccactctcactcggcctgtcgtgtgcgggaatcttctacactgcggttgccgacagcctctacgtgggggtcggcatgctcagctactacatctcgattttgtgggcatccaccttggttttcctgcccctgtgcggccacctgctcgcacgggtcgatgcacgcgtctgcatttccggcgcagtggcggtcatggcgctcgactttgtctttctttcgcaggtgaatacggtcctgcagttctatatcggggcgtttctcatgggcatcggcgtcacgatgctgctctttctcgccccctcgacactcgtgaatcgctggttccagacgcgcgcgggtttcttcatcggaatcatcatggcctttaccggtgtgggcggtgttgtttggagtgcggttggcgatgcgcttatcaacacgatcggctggcagcagacctatctcgtctttgccgtgctctgcgctgcgacgcttccgttcaccgttctctgcatatcgtcgagtccttcttcgaggggtcttttgcctgttggggttcacgagcatgcgcaggacaaggtcagcccggcgccaagtgttggatcgacggtgcatgaggcgtatcgcagtgcttccttttacgtgatattggcactggcgttctgcttgaacctgggtatggggctctacttcttgctcccctcgtacgttgcgacgcttcccgccggcatggcgaacccgattcttggggcgacgacggcatcggttgcgatggcaggccagaccctctccaaaattgcgcttggagtggtgggtgacaggaagatgacgctcggcttcatgatagggctcggctttggccttgcaggtgccgcagtgtttctcatggggatcgcgtccacggcggctgcgctctacgccgccgccttcctctatggctttttctatggtgtgaccaacgtgatgcttcccatcgcgacgaggcgtgtctttggcatccgcgagtactcgaccatctacgcgcggatctccatggcagcctccctcggttcgattgtctctgggtttctctggggcacgtgcgtgcagattgccggtacgtacctgcccgtattcgccggggtgagcatcgtcatcgctctggcgatcgtgctggtgatggcgctgtcgggcagcgtcaggagaagtgagaggtgaacaagatggacactgaggttccagacagggatgccatggcgtttctgaatgcagtgattgggtctgccaaaagcgggccggtcgtcgtttccgagattgacggagcaccggaaacatgggttccggaccacgttcccgcgatagggggaacgccgccctctccaccctcgtcgaactcgaccatcgaagctccggacatctcggggctgggcaattatttcgccaagagctcgtatggcaaggactgagattgaaagcgagggtgagaagcatgaatacaaggggcaagaccgtgcacaagggccttgggttctgcgcgacgggcctcggttcgaacgtctgcgatatcgatgttgatacagaaaaggacagaatcatccgcatacgcccgtaccattttgacgaggcggggccaatggacaggctccatccctggaagatcgaggtcggtggccatgtgctcgaccctggaacgtggacgacctattcgcctattcaagctgcatacaaaaagcgcgtgaactcgaagaaccgtattctctacccgatgaagcgcgttgactgggacccgaatggggagcggcatccggagacaaggggcaagagcccgtacgtgcgcatcagctgggacgaggcgctcgatatcatcgcgagcgagatgaagcgcatcatcgagaagtacgggatgacggcaatctacgtacaggcagatggtcacggcgaggcgaagatggtccacggcacacatggctgccagacgcgcctgctctcgaagatctccgatggcaactacacgttccagtgccgacagccggacagctgggaaggctggtactggggtgcgaagcacatctggggaatggacccgtttggcgagcagtctcagcagaccaatctcatcaaggatatcgccgaaaacggcgatgcggtgctcttctggggctgcgaccccgagactacgacgttcggatggggcagccagatgcccgcacgtgcggagcagttcttcaccgaggtgggcgtcaaacaaatccatatctccccggatgtgaactacgcgaacgcggcgcacgcggacaagtggataccggtgctgcccaataccgacgccgcactgcagctcgccatcgcgtacgtctggctgaccgagggtaccttcgatgcggattacctcgacacgcattcggtcggcttcgccaactgggcgtactacgtgctcggcggggaggacggcgtgcccaagaccccggagtgggcggcggagaaatgcggggtccccgcctatacgatcaaggcgctggcgcgttactgggcgcgacaccgcgtgtccacggctcattgcaacgggggcagctacatcagggcagctttctcgcatgagccggcccgcatggaggtcgcgctgctcggaatgcaggggcttggcaagccgggcgcaaaccagctcaagctcatcgagttcggcctgttcggctccacgcaggtaaatcccttccctggcggcgaggagattccatcggttccgagtgcctaccgtggtcgcgaggacattttccgcgacagccagattccaaagaccatgttgccgaaggcgcttatgctcgaggatggcgagcacatcgagtggtacagccacctcgcctgcgggcttccgcgcgcggaccagttcaccggtccgtttcggtacccgttgccgggcaaggagcgcgttcacatgatatggtccgacgcaccttgctggacgacgtgctggaatggcggcaatccgatgcaagacgcgcttcgtcaccccagcatcgagttctatatggtgcagcacatctggatggagaacgattgcaactttgccgatctgctgcttcccgtcaccaccaagttcgaggacacggacatctgcaccgatcccgacaacggcgcctataacgtcgtgttctacgaggaacaggcgatttctccgcgtggcgaggccgtctcggatatggaggtcgtgaagcgggtggcaaagcgcctcgacgaggagggcggaattttcgagggcatttacgatgcatataccgaaggcctcgaggtcgatgactggattgagcgtggtttccacgacacttctgcatgcgagcatatgacctacgaggagttcaagggcggaaagagctacgtcgtgccaacgcgcgagaagtgggaagaggagccggccggtctcatcgggttttacgaggaccccgagaaataccccttgaaaacgccgacgggcaagttggaatactattccgaggaccttgcgctggtctttccggatgatgccgtgcgaacccccataccgcgctggatcgaggaaagcgacgagcacaaagaccgtctgagctccgagcgcgcgaagaagttcccgttcttgctcgtctcgaaccacccacactggcgtattcacgcggaaggcgacgacattacgtggttccgcgagctcgagggggtcgtgaaggtcactggccccgatggttacaaatacgagccgatttgggtcaaccccaacgatgcggcgaagatggacctgaagacaggcgatatcgtgggacttttcaatgagcgcggcaccgtacttgggggcgttgtcgtcaccgagcggatcatgccgggcgttctctaccaggaccatggcgcacgtaccgacacgattgtcgcgggcgtgggcgggcttgaccgaggtggggcaaacaacctcatctgtccgaccgcgacatcttcgaagaatgccttcggcgaggtcacaagcggatttcttgtcggtatcaaaaaagttgacgtgtttgagcttgcgcgaaagtaccccgagcagtttggacgcccctacgattcggaagtgggactggtcgccgcgacgcgttttgaaggggtggagtagtcatgaaggtgttcctgtttgattctgagaagtgcaacgggtgcatgaactgcatgttcgcatgcaaggacgagcactgcgacaacgattggagcccgattgccaagccccagcccgatacggggcagttctggaacaaggtcgagcagaaggtgcgcggtcaggtgccgaaggtgcgcgtttcctacgtgctgcacatgtgccagcactgtgacgactgcgagctgatcaagcgcgccccagaggcggtgtacaagagggaagacgggctggtcatcatcgaccctgagaaggcggtggggcacaaggagctcgttgacgcctgtccgtacggcgccgtctactacaacgcggcgctcgatatcccacagaagtgcaccggctgcgcacaccttctcgacgatggctgggaaatgccccgttgcgtcgaggcgtgcggcctgcacgccctgcgtttcggcgaggaggctgatttcgcggtcgagctcgccgcatcggaagagcttgtgccaaaggcggaaacccggccgcgtatgcactacctcaacctgcccaagcgctttatcgcggggacggttgtcgacctgtcgataaacgaggtgctcatcggcgcgacagtcacgctcgagaacaaggagacgggcgcgttactcgccacgaaaaccgacgaatttggagatttctggttcaagcagattgcccccggttcctacaatgtctatttcgaggcggcaggctatctgacgcgcaagatcgagacagacaccctcgagacggacatgaacgtcgggacggtcgagctgttcaaggaccctttggcatagcgccttttgcgggttggtcatggggaagcggctggtgcagcgtcactggccgcttctttgcgtgttgtctagattcatcatggaacagactgcatgctcggcctatcatttcgagagacaatcgcgaagatgagagtgccgagaggagggattatgcgcatcgagcatctcagggagtttcgtatcttggcttcgactttgagtttcaccgaagccgcgcgcaaatcgttcgtctcgcaatctgtgctgagcaagcacatcagcgcgatggaaaaggagcttggccacaagctggtcacgcgctcgcgcgcgggcgtgagcctcacgcccgaaggcgaggtgttcagagcgggca

SEQ ID NO: 4250 - DNA, 7351 bp, Unknown
  16S sequences of unknown bacteria
tttaccagcgattttggggctacttcccctaaaaaatacaaaaaaagtggtccaaagtggattttggtggttgaaagtggatgggaggggatttataatactaacataaggaaaggaggggttccgtatggccatgagtcagctgacaggcgaattttcacataccatggatgccaagggcagggtaaaaatgcccgcagcctggaatgaagacctgggcagcaaatttatggttacgcgcggaacgggcaatatgctctttatcttctccatgcctcagtgggaggtgttttcccaaaagctgatggcgcttcctttgatggacccgaaagcgcaggcgctacgccgcatctttggcgcgggcgccagcccttgcgagctggatgcgcagggccgctttgtgatcccaaagcagctgcgcacctatgccaagctgaaaaaagacgtggtcatcgccggtgcgtttacctggggcgaaatttgggacgcagaggcgtggaacgagtatgaacagcagtttgcagacggcgccggcgatagctttatggagctgatgcagtctgccacagaggccttctcgatatgacaagctacacccacaaatccgtattgcttatgcaaagcgtagacgcgctggccctttcgcccggctgcatcgccgtcgacggcaccgtggggctgggcgggcacagcgaagagatcctaaagcgtgtacgccccaacggcattttgatcgggatagacagagacaaaaacgcgctcttgatggcaaagcgccgcctgccggatgggtttatgcccgtccacgaaaattttttccacatgccgcaggtactccattccaacggcattcggcaggtagacggcattttgctggatctgggcgtttcctcttatcagctggacgagcccatgcgcgggttttcctaccagcatgatgcgccgctggatatgcggatggacgatacgcagctatattctgcgaaaaacgccgtcaacgagctttcccgcgacgaactgacccgcatcctccgcgaatacggagaggaaaaatgggcggcgcgcattgctcagtttattgtggagcgtagggccgagcagcccattgaaaccacaggggaactggtggatgtcatcaaggccgctgtgccgaaaaacgccaggcgtgacggcccgcatccggcaaagcgcaccttccaggctctccgcatctttgtcaacgatgagctggatggcttgggacaggccctggaaagcgcggtacagtgcttaaagccgggcgggcgcattgccgtcatcaccttccattcgctggaagatagaatcgtaaaacagaccttcgccaggttggccaatccctgcacctgtccgccgggcacgccggtgtgcatctgtgggaaacagccgcaggtaaaggtcatcaccaaaaagccgattttgcctacggaaaaggaattagaggacaatccgcgggcccgcagcgccaaattgcgcgtggcggaaaggctgaaacaagcataaagtcctaaaggatgtgaatacaatggcagcagttcccacaatggggtccaacgctttgaaatacggctccgcagcacccaaacgcatgcccacccaatgggaggaatgggagcgccggcagcaagagctggaacgccgcgaatatcttagacgcaaaaaagaggcgcagagaaagcgcgccctgcgcgaagcgaggatccaggaacaaatacgaaaaaggaaccgcaaacttgcgcttcaaaagctatcgctgaccctattggtctgcgctgtgtttgcaatgctgtccgttgtggtcgtccggtatgcgcagatcagcaatctgcaaatgagcaataataagctggagcaaacggtttcggatcagcaggccgaagtggaagccctgaacttcaaggtaaaacaggcgacggatctgcaaaatatcgcgacacaggccaaagagcgcctgaatatgggctatcccaaggcctatcagctgctgaatgtcagcgccgcctcagcaggcggcagccagacagacggagggaaataaagtcaaggggattcgcttgcggttgcccaaggtgaggagtagggaaatgcaggctaacataccaaaaaaattgaaggaacctgccaaccgaaaaaagagattcctgattgtgctgtgttcgtttaccgcggtgttcacgttgttgttctgccgcgtgttttacttacagatcatccaaggtccgtcgctggtgcaacgggccttgtcgcaatggacgcgcgttacctctgtagagccgaaacgcggcgatattgtagaccgcaacggcgaggtgctggcacagtccggcacggcggataccgttttgctgtatcccaaaaagattgcggaggcgggcaacgcgcaaaccatcgcggatacgctggcaccgttgctgggaatggatgcggccgccatcttggaaaaggcgcaggataccagcaagagcgaagtctggctcaagcgccaaatcgatcgggacgtggcagaccagatccgtgcgctcaatctaacgggcgtcggctttatggtggataccaagcgttattatcccaaaggcgattttctaacccaggtgttgggctttacctcggtagacggcgagggcctggagggcgtagaagcctactacaataaatacctggcgggcacgccgggcgaattgcgcgcgcagaccgatgtaaaaggcaacgagattgcctttggcgaggaatactatgtgccggccaccgacggctacaccgtcagccttaccattgattacgtcatccagtcctttgtggaaaaggcgtgtgcagatgcgtatgcacaatacaatcccaagggcgtgatgtgcatcgccatggaccccaacaccggagagatcctggcgctgtgcaacaagcagagctatgatctgaacagcccgccgcgcgacgataccgaaacgctcaatgaactgagccgcaaccgcattttggcggacgccaacgaccccggctccatcttcaaggtatttaccatggcggcggcgctggataccgggcagaccaaggacagcgaaacctttacctgcaacggcagcatcaaggtgcagaataccaccatccgctgtacctctacccacggtaccgtagatcttaagaccgggcttgccaaatcctgcaacccggtgtttgttacgctggcgcttaggatgggcacggataccatgtacgattatttgaagaatttcggctttggctccaaaaccggcgtggatatgtcggcggaggccagcggcattgtcattccgcgcgaaaatgtgacggacaacgacctggcacgcatcggctttgggcaatccatttccacaacccccatccagacgctcaacgcgttctgctctgtcatcaacggcggagagctgttggaaccgcatatcatgaaaagcgtcaccgatgccgatggcaacgtggtggaggaaagcagtaaggtggtcaaggccaacccgatcagcaaggaaaccagcgaccatatgcgcgaaatgctggaggacgttgtcaacgaaggcagcggcaaaaacagctatgtaaagggcttccgcgtcggcggcaagacagggactgcgcaaaagtacgatgaaaccggcaaggtgaaagagggcgcgcacttgtcctcctttatcgcgtttgcgccggccaacgatcctaagatcgccattttgtttatggtagacgaggcggatacctacaacgactacggcagcacagtagccgcgccttatgttggacagattttagaggataccttaaaatacatgaaggtagagccccagctgaccgaggaagagcaaaaggaacagcaggaagaggaaaagaaggtagcgcaggtggaaagcgtgatgggcatgagccaggaggacgcagtcgccacgctggaaaagcaggggtataaggtaacggtgaacggcgaaggggtggtctcttcgcagatgccggcccccggtaccaatttgcaacagggcgaaacggtggtcattaccctaacgccggctacgccgacgcccatcgtgatgacagaggtgcccgccctggtgggtaagacaaaacaggaatgtgagcagctcttggaggaagccgggctgacggcctatttccacgggacagggaaaaaagtgacctggcaaaacaaaaaggcgggcacagaggtgcagcagggcacagagatccgcttggagctgggcgactagtacataggaggaatgacggcatgcaactgaatgaattgctttccggcgtggtggtgctgatgcgcccgcaggaggagattgaaattacatccatcgcgtttgattcgcgcaaggtggaaaagggatcgctgttctgctgtatcccgggcactaagacggacggccacgattatgccaagatggccatggagcgcggcgcggcggcgctggtggtgcaacgcccgatggatctggagatcccgcaggccatggtggcggatacgcgggcagcgctgccgatcctggcggccaatttttacgggcgcccggcggaaaaaatgcacatgtttggcgtaacgggcaccaatggcaagaccaccaccacctatatgctgaaaaccgttttggactatgccggggaaaaaaccgggctgctgggcacggtggcgctgatggcgggcgacgaagtgatgggctcatcgatgacaacgccggagcccgtcacgctgcaaagcacgctggcgctgtttttgcaaaagcaatgcacttcggtggcaatggaggtatcctcccatgcgctggctcagcacagggtagacggcatttcgtatgaggtagcggtgtttaccaaccttacccaagatcatctggattaccacggcaccatggaggcgtacgctgcggaaaagaaaaagctgtttcatatgacaaagctggccgtattcaatgcagacgacgcgcatacgccgtatatgcaggaagggctgggctgtaaccagctgacctatggcatagaaaacaaagcggatattatggccaaggatatcgagctgggcgcggcgggtgtgaaatacacgctgtcaacgcccattggcgacggccgcatcgagctgggcattccgggcctgttttccgtgtacaattcgctggcctgcgctacggcatgctatggctttggccttacgctggagcagatcgtaaacggcctgcaccaggtgcataccgtacccggccgtatcgaagtcatccctacgccctctgtgccgtataccgtaattttggattatgcgcatacgccggatgggttggataatatcctggccgctgtgaggggctttgccaaggggcgcatcattacggtatttggctgcggcggagacagagaccccagcaagcgcccgctgatggggctggctgccggcaagggatcggatctttgcgtggtgacaactgacaacccgcgcaccgaaaaccccgctgccatcatagagcagatcctgcccggattaaaacaatcgggctgtgaatactatgtagtggaaaataggaaagaagccatccaaaaggcattggagctggcgcaaaaggatgacgtggtgcttttggccggcaaggggcacgagccgtaccaggaaatcaacggcgtgcgccatccctttgatgagaaagccattgtccacgaaatactgcacgaaacgatacgctaggagtttatcatgcaacaactgatttggcccttggtcgtagggtttttgctgtcgctggcggcagggcctatcatactgccaatcctgcggcgcctaaaaatgggacaaagcgtccgtgacgatgggccgcagacccatctgatcaaacagggtacccccaccatcggcgggctgatttttctcatcggcggcctgggttcggccctgctgtttacccgccagtcctatggctttgccatcttcgccgtgctcattaccctgggctttggcgctgttggctttttggatgattttatcaaggtcgtaaagcaccgctctttgggactcaaggcataccagaaaatcatcggccagctgggcctggccattctcgtggcagtatttgccgcccattccccggaaatcggcaccgaattgtatgtgccgtttgtaggcctggtggattttggcagctggtatatcccgtttgtcgtgtttatcgtggtgggcatggtcaattccgtaaacctcacggacggcttagacggcctggcgggcggcatgggcgtcatcgtctgcgccggctttgccatcacggcgtataccctggcaggcgacgctacggcctccggccaggtgctaaagggcatagagatgaacaatatggcggtatttggcgcagccatggcaggggcctgcctggcattcttgcgctttaatgcgcacccggccaaggtattcatgggggataccggctctttggcgctgggcgcagcgatttccgtgctggccgttaccacccgcatgatctatctgctgccggtgatgggctttatgtatattttaagcaccatttccgtcatcctgcaggtgggcagctttaagctaaggcacaagcgcgtatttcgtatggcgccgctgcaccatcattttgagctgaaaggcatgcatgagacgcgcattgtcgtgatgtattatgcatggacgctggcctttaccattttgggcatcgtctcgctggccagcctgtaaaaggcagtataaagaaggggaagcgtacaatgaaagagatgaaggacaagcaagtattgatcgtaggcatggccagaagtggcgtggcagcggcccgcatgctcagccgcctaggagcaaagcttaccctgacggataccagaaatagcgaacaaatggcctctgccatcgagcaactgcgcgatatagacgcaaattggcagcttggcgtggagccggatgcgctgatagaaggcaaggactatatcatcctttcgcccagcgtatactactgggccccttgggtggagaaggccaagcaaaacggcacggaggtggtcagcgaattgcagctgggcgcctggttcacgcagggcgattttgttgccgttacgggtacaaacggcaaaaccaccaccaccacgctgattggcgaaattttcaaggcaaacggaaaccgcacgcatgtgctgggcaatatcggcgtaccggtctgcaccgaggcgctggatacgcaaaagggagacgtcatcgtctgtgaaacagcgccgtttatgacggtggggatcacggatttccggccgaaaatttccatgatcctaaacttgacagaggaccaccttaactattttggcacgatggaaaactaca

SEQ ID NO: 4251 - DNA, 32759 bp, Unknown
  16S sequences of unknown bacteria
gcgttttccgcgggcatgaagtttgcagagagttcgccgaggttcatatccgctatgaacgcgtccatgtcaacggtaagcgaaagactttcgtcggagatcgtaaactgttttatgaattttgtatagtccgcagtaatgaccgcgcccagaatctccgtcacgtccacgccgccaacgctcggcaaactgacgttgaaatatttcagtgcgctttcgatggcatatgcggcgtattccgcggtcgtctgtatttttacgttgtaaacttgcagataaatatttttatttatgtaagtaaagtttacgggtatcgtcagtcccgcgtaacttacggtcagttcgcccgacactgctgcattttttacgttcgcgtagatcatgccgttgacggacagcccgaggccgttattcttatacgccgcagtgatctcgaaactctgctcttccgcgagtttataaatgctgtcgagatacggttttaaatctacggaatttgcaaaatcgtaggcgtattcattttccgccgcgcagaccgacgcttccagtttgccaagcgagatcccgaacagatctacgggttggatcgcggaaacgaacagtttatgtccgtccgtcgtgattttcgcaccgatgtcggaaagattttcgttgaggattcccaagtccacgaacagattcaggatagccgcgccgttttcttccactcccgtaagacggatactttccagcagcgcctgcaaatccagaccttccgcggagaagaacgcgagaagatctttttcaccttccgtgtttcggaacaatccgctcagtttttcggcgagcaccgtcagttcgctttccgcgagttttactttttgccccgcaaacccgagatacacgttattatttcggtacaacacttcgacggtcttgccgttgagcgtgatctgaagatatatttcaagagcgttttcgaacttgatttcgccgacgatctcgccggtcaacgcgatattttccaccgtcgtttccacggcgaaacggaacgcgatatcctttgcgttcgcaagttccaggacaggctgcacgaaattttcgaacagactcagttccataaaactttccgcgtctgcgggcgcgcccacttcgcggatagccacgccctgcattttcgccgttacgccgtatacggacaaaccgaacgcgttttccgcgggcatgaagtttgcagagagttcgccgaggttcatatccgctatgaacgcgtccagatcgacgacgagcgaaagtttctcgtctgtcagtcggagtttttgaatgatcgagtcgtaatccgcggtgataacggcggaaatcgccgctttcagatccagcgcgccgagatcgggtaaagttacgtccgcagcgcgcagcgccgcttcgagcgcctcaacgagatattcctgcgaagttttcagtttgatttcaaagacctgcagatagacggtttcgtctataaacgtaaatcgtacgggaatatccaatcccgcataggcgatgaaaatctcgccgcgaagcgcgggacgcaaggcgtcgatatacaattcgcccgaaaccgaaagtccgaggtcggcgttatcatagccgagcgcgagcgtgaaactcttggaatttacgatctcgaaaatactatcgacgtaaggtttgagatcgaccgctttcgaggcatcgatctttgcgacggcgtcggcgcctttagcgggcgcgaaggacgctccgatatcgatcggctcgaaccgcaaggcagccgaaacgtcgacgaacgaaacgccgctttccgtttcgagaaaacggaaggtcaacggcagatgcagtcccgccaaatcaagagcgcattcgatggtgacgttttccccatccttggaaatgctgcccgaagcgagttgttccatcagtttatcgggatcgacgcctgcaaaaccgcctcccgccagtgaaatcaggtcggaaagcgccaatttgcccgtcaactctttatattgtacgtagagcgaatcgctttcgacattgaggagaagatcgcccaaagacgcgcggatctccagaccgttggcgagatcgagcgtcacgcgccccgcaacggtatcgccgttgaccgcgatcttcagatcgaacgtggaaggctcggcgagataccccgcaaaaccctgttggagataatctacgacggtaagcggcgtttcgccgccgcccgtaacgggagcatcggcatagtttttgaaatacgattcgtacgcggaaacgtccacggcgctctcttcgtatgtgtacacgatagatgaagtcgccttgcaggatacgttgagcaccgaaacggaaactttgtattcttcctcgatatccgcacgcaaaaccgaccatgtgtcgtcgaacgtaaacgtgatctgcaccgacgagaaagagggataatccccgagattccccatagtgcgcatctgacgcttataataataggtcgagcccgagggatcgagcgtgaaagtctgcacgaaatttccgttctcgtcgcgggcaaggtcggaaacgtcgctcacggtttcggcattgagcacgtaatcggaaaactcgtccgcccaaagcccgtacgcttccagatattgcgcctcgtcgagcacggaaacgggcttatcgttcgaccactcggtatgtattccgttccacttgcccttgtcatatctgggtccgcggacgaccactttgccgtcgccgtaaaatttctgctgcgcgacgctcgcaaaggcgctggtgctcaccgattgcgtgatgagaatgccgttataataatccttggtccccactacgttctgttttgcgatggtgtccaccagtcccgtattctcgctgtgaaaatacgtacgcgcggaaagcctgcccgccatataagcgagattttccagcccatcgtaatcttcgggagaagttccgtcctcgggcggcgccatgctgaccgtatgcccgtttttgggcggcggcgtggcggccggtttgggctgacaagcgaaaaagaccacggtagccgtggcgatgatcgcgatgacgacgattatgatcagcacttttttcgataaatgtttcattctcttaactttccgtaataaatgtcatgattaactattacattttctattatattatttctatgccgatttgtcaaatatatcacaaaaattcatgacaaaaattacaaaagcagtcgaaattcgactgctttctttctgagttaacgggcgatctcacgatcttcgaagggagaatgatgttttcgttttggcgttttggcggtgggaatggattttttggcgagcaccgcgtatacgatgacgagaatgacgtccgccccgaaccatgcggcgggattggcggaacacacgccgatatatccccaataacgcgcgaatatgagcgcggcgacgatacgcatgacgagttccgcgccgcccgcaagcatggtgacggcggaaaagcccatgccctggatcccgttccgatagagaaagataagccccagaagcagatacgtgcccgcgttgatatacaggtacatggcggcattgtcgtagatcctctcgtaatcctcccccgcaaataggagaatgagcggttttttcaagagcagaatgagtaaaaaccccgcggcgctgaaaataacggtgagcagcagtccgatattcatgccctttttgatgcgcccgtactgctttgcgccgtaattctgcgcgcagtaggtggcaatggccgcgccgatagcgacgaagggctgctgcgcgatgctgtctattttggaggccgcggtataggcggcgacggtgtccgtacccatggtgttgagcaccgactgcacgaccatgaccccgatggccgtaatggagaattgcagcgccatcggaagccccactttcaaatgtttccagccaaagagcgcgttcgtccagaaatggcggcgccgcgtgcgcaggatcttatattttttcagtgcgtacaaaaggcataatacgcccgatacgagttgggacaagacggtggcgacgcccgcgcccgccacgcccatgcgaaatacgagaatgcacagataatccagcccgatattgagaacggaggcgaagatgagaaaatacagcggcgcgcggctgtccccgatggcgcggagcatacacgacgccatattatataaggtagtcgcgccgatgccccagaaaatgacgattatgtaatcataagcgtcgccgataatggcggaatcggtgcgcatcagttttaaaaggggcatggcggtcgcgaccgcaacggcagtgacgacggcggtgacggcaatgcagagcacataggaagtgccgaccgaacgcctgacgttttcttcgtcccccgcgccgtaaaactgcgcgatgagaacgccgaatccgctgcatacgcccgatatgaagccgagtatgagaaaattgaccgaacccgtacagccgaccgcggcgagcgcgtcgagcgagatggtctgccccacgatgatggtgtcgaccatgctgtaaagttgctgaaaaatattcccgataaaaatgggaatacaaaaaaacaaaatatttttaaacggacttcccgtcgtcaggtctttatagcctttcatatggcgcgctccttatttcgcgcaacaatgatacagcaattgcgggcaaatgtctattgatttgaggcaacttttttcataaaaaaacggcggggatttcccgccgtttttttgtttataaaatcttttcggaaagcagtttgatgcctctttcaccgagcaatttcacagcgcgttcggtatcctccacgcgcatcaggatctttgcggaattgtgattggtgagcacgaaggagtatagatattcgatatttatattctcttcttcgagcagcgcgatgacttccgccaaggcgttgggcttatcttccacttccacgccgatcaactccgtctgccccacggtaaagcccgcctgtttcagaatttcgtatgcgcggtcgttgtcgcgcgcgatgaaacgcacgatgccgtaatccttggtgtccgcgatggacagggtgacgaaatcgatgccctcctgccccagcgcgtgcgtcagtttgtacaatcttccgggcctgttttccataaatacggagagttgttttaccaacatcttattttcctcctttcaatgttattttctgcggtcgacgacgcgctgcgctttgccttcgctccgctgaatggagcccgattcgcaaagtttgatgcgcgcgcccacgccgatataggaattgacttccgtttccactttctttttgatggattccagatcgctcaccatgtcgggcgcgatattgcccgcaagttcgatatggatctccatggtatcgagattgttcacgcggtccacgtagatcatataatgcggcgacacgcccgcaacgttcatgattgccgcctcgatctgcgaagggaacacgttgacgccgcgcacgatgagcatatcgtccgaacgccccttgacgcgccccatcttgaccgtggtgcggccgcaggcgcacttctcgtttgagagggtgcaaagatcgcgcgtgcggtagcgtatgagcggctgtcccgtcttggtgatcgtggtgaacacgagttccccttcgctgccgaacggcagcggttccagcgtttcgggatcgatgatctcgggaatgaaatggtcttcctgcacgtgcgaaccgctcttttgcaggcactccatcgcaacgccaggcccgcagatctccgaaaggccgtagatatccagagcgtcgatatgcagggtgcgttcgatctcgcggcgcatattgtccgtccagggttcggcgccgaacgcgccgcccaccagggagaaatcttctattttcatgcccgccttttcgatctccgttcccagaaagatggcgtaggaaggcgtacagcaaaggtgcgtcgcgccgaaatcccttaaaagcgtcaactggcggatggtgttgcccgcggacgcgggaacggtggaagcgccgatcttctgcgcgccgtagtgcgcgcccagcccgcccgtaaacaggccgtagccgtaagcgacgtgcaccatggaatccttggtcacgcccgccatggaaagcccgcgcgcgacgatctcgctccatacttccagatcgttgcggctatatcccaccaccgtgagtttgcccgtggtgccgctggacgcgtgcacttccacgatatcctctgcgggcgaagaataaaagccgaacgggtacgcctctcttaaatcgtgcttgacggtgaacggcagtttataaaggtcggaaaccgacttgacgtcggaaggtttcagtttgagttcgtccatctttttgcggtaaggcgcgcagttgttgtagacgcgttccaccgtctttctcagccgttcgctctgcagattctgcatttccgaacgggacaaacactcgtatgcgggattgaagatatgatcttgtatctttgttttctgcatcttttcgcctctgtaaagaatttttatacggcggcaaagcccagtccgaacgccttttcgttcatttccgccagtttctgcggaatggaggatatgagcgcccgtaaaaacgcctctttatcgaatccgagttttttgcagagcgcgccgagcatgaccgagtttgcggctttggagttgcccgcctccaaggcgagatccaaagcgttcacggcgcagccgttcaagacgctttcgatgccctgcggatattccgccgcgcccgtaacgacgggcatgggcatgatctcctgcgtcgaatacagcacgacgcccccctctttcagataatgaagatagcgcagcgcttccagtttttcgaacgcgaggatcacgtctgcgccgccctcgtcgatgatgggcgaacgcacggcgtcgcccatgcggacgtacgtcatgacgctgccgccgcgctgcgccatgccgtgcacctcgctcagtttgacgtcctgtccctgtttcagcgcgtatttgcccaaaacgcggctcgcgagcagcgttccctgcccgcctacgcctacgatcaaaatatccattatttgttcctcccctgaatagcgccgaatttgcagacgttctggcaaagaccgcattccgtgcacagcgaaacgtcgatggtcacgccgtttttgccgttcacgatggcgggacatccgagtttcagacacattttgcagttcttgcatttgtccgtaatgacgaaactttcatacaattttttggtgagaagaacgcacggacgctttgcgatgatgacggaaacttcctctttcaaaagttcctctttcaaaactttttcaaacgttccgatatcgttgggatcgacggtgttcacgctcttcacgccgaccgcgcggcagacctgttccaggtcgagttcgtacgtcggctcgtttttgatggtcttgcccgtggcggggtggttctgatgccccgtcatgcccgtggtgcggttatccagaatgatgaccgtcacgttggaacggttatacaccgcgtccattagccccgtcacgccgctgtggcagaaggtggaatcgccgatgaccgcgaccgaatgtttatgcgcttcggggtcggctttgtcgaacccgatcgccatgccgatactcgcgcccatgcacacgaccgcgtccatggcggaaagcggcgccaccgcgccgagcgtatagcagccgatatcgccgagcacgttgagtttgagtttggacaaaacgtagaacacgccgcggtgcgggcagcccgaacagagcacgggcgggcgcgcgggcacttccgccgccttgtgtccgatcttttccccgagcacgcgctcgcggatgagcgacgcggaaaattcgccgttgagcgggaaaaggttcttgccctccactttgatcccgtgcgccttgacgagcgtttcgatgtgcggcgcaagttcttccgcaacgatacagcgtttgacgctcttagcgaatttttcgatcagtttatacgggagcggataactcatgccgagttttaaaacgctcgcgttcggcagcgcctctttgacgaactggtagacgccgcccgcgcagatgatgccgatctcgccgtcgccctcttcgatttgattgaatgaaaatccgttcgcatcctcggaaagtttttcgaggcgctcctccaccaccacgtgcttgcgcttggcgttggcgggcatcatcacgtatttggcaatgtcttttttgtattctttgacggggcgctcttcccgttcgcacaactccacctggctctgggagtgggcgacgcgcgtggtgatgcgcaaaatgacgggcgtatcgtatttttccgaaatttcaaacgccgccttggtaaagtccttcgcctcacggctgtcggaaggctcaatcacggggatcctcgcgctgaccgcagtcaggcgggtatcctgttcgttctgcgaactgaacacggacggatcgtccgccacggcgatgaccagccccgcgttgacgcccgtatatacagacgtaaacagcggatcgcacgccacgttgagccccacgtgcttcatggaaacgagcgtgcgcgcgccgcggatcgcggcgcctatgcccacttccagcgccaccttttcgttgggggaccattcgctgtacacttcgtcgtagcgcgagatctcctcggtgatctccgtggaaggcgttcccggataggcggtcgccactttcacgcccgcctcgtacgcgccgcgcgcgacggcgaaatcgcctaacaataatttcttcatctatacatacctcacaaagtttttcgctgttatttgctgcgcagatcgatcacgcgcttgacttttccttcgccgcggcggatggacatgggctcaaccagtttgactttcacgtccaactgcacgaccacacgcaaattgtggcggatacgcgcgaccaactcttccagctttccgtaatcggtcaaaaggttggcgtcgtccacctccacgcgcacttccagagaatccatgtaatttgccctgtccacgatgatctcgtaattcttgcccagttcgcgcatgcccatgagcacgctttcgatctgcgaaggaaacacgttgacgccgcggatgatgagcatatcgtccgttcttcccaccacgcgggacatacgcgccgtcgtgcggccgcacttacacggcgcataggtgagtgaagtgatgtccttggtgcggtaacggagaacaggcattccctctttcgcgagcgtcgtgatcagaagttcgccgctctcgccctctttaagcacctcgttcttttcgatatcgacgatctcgggataaaaataatcttcgttgatgtgcatgccagccttttcgcggcattcacccgaaacgccggggccgcccacttccgtcagtccgtagttttccgtggggaacacgcccgaaatttcccgcaaagacgcgtgcatttccgcggtcgaagcctcggcgccgagaatggcgaggcgcagtttgagatctttgagcatgccgttccgccttgccgtttccatcagatacatggcgtaactgggcgttgcgaccagccccgtcgcgccgaaatcttttaaaagcatcagttggcgctcggtatttcccgaggacatgggaacaacggtggcgcccagtttttcgatgccgtaatgcaaaccgaacccgcccgtgaacagtccgtagccgaaagacacctgtatgatgtcctcgtcggtcgcgcccgccatcgccagaacgcgggcgatgcaagtcgcccagtcgtccagatctttgcgggtatagccgcccacgacgggtttgcccgtggtgccgctggacgcgtgcaggcggatgatctttttcatggggacggcgaacagcccgaacggataattttcgcgcaggtcgtccttcgtggtatagggaatgagcgaaacgtctttaaacgtcttgatatgcgagggtttgagcccgatcgcgtcgaatttacgccgatacatgggcacgttatcatatgcgtagccgacgatatattttaagcgttcgagttgcagcgcctcgatcgcttttctgtcggctgtttcgaattcgggactgaacatgaccatggatcttcaccttccgtgcaaattattataaaatctattttatcacgctttcccgaattttgcaatatatttgccctattcattttgtataagcattgcattttgtatatgtttatgctatacttcatctatcggcctttacggcaacaggagaaaaaatgttagaaattcgcaatcttaccaaaatttataccgccaaaggcggggttagcgtgcgcgcgctcgacggggtgtccctcaccttcgaagatacgggcatggtttttcttctcggaaaatcgggaagcggcaaatccaccctattaaacttatgcggcggcctggacaggcccgattcgggagagatcatcgtaaaagggcggggcagcgaaactttcacggcgggcgacttcgacagttaccgcaatacctacataggttttatctttcaggaatacaacattttagacgaatttacggtggaagcgaacgtcgcgctcgccctcgaattgcagggcaaggcgaaagacagggaaaaaatccaggaaattctgcgcgcggtggagttggaaaactttgcaaagcgcaagccgaataccctttcgggcggacaaaaacagcgcgtcgcgatcgcccgcgcgctcgtcaaggaacccgagatcatcatggcggacgaaccgacgggcgcgctcgattcggcaacggggcggcaggttttcgatacgctgaaaaaactttccgaagataaactcgtcctcgtcgtttcgcacgatcgggaattcgctgaattgtacgccgaccgcatcatcgaactcaaagacgggaaagtgatctccgacgtgaaaaagaacaagatcgcggcgaaaaaggcgagcgaaaacgtgtcctttatcggcacggacctgatcagcgtcaagagcggcgcggctcttacggacacggatctgcaaaatatccgcgcgttcatcgcatcgtccgaaaaacaggttctgatcgccaacggaaacgccgatatcgaaaaattttatcggcaggcgcacgtggacgaaaacggctcgcgcgaagaattttgtgaaacgaaacccgaagatatccgtatcaggcactatcggcaggacgagagcgaatttatcaagtccagacttcccatgcgccacgcggcaaagatcggcgcgagcagcatgaaagtaaaacctttgcgcttgttctttaccatctttctgacctttatttctttcgtcatgttcggacttttttccacgctgatgctgttcaacgaaaaacaggtcctgggcgagagtttgaaagtttcgaacgacgaatatctgcaaatcgtcaagaaatatcaagtcaccataaaagaatttaacgcgaacggcttgacaggcacgtacgagaaccccaccttgacccaattcaaggaaagcgacgtggacgagatccgcactgcttacggcaacgaggcagtcattgcctttacatactcagattacagcatagtcttttccatcgagaacatatcctcccaagacgcgcccccgctctacgaaaatcaaatattcggtttcggcataactggccagggcagttcctaccgctccgacaagatactttggggaaaatatcccgcagggacggacgaagtcatgatctccgactataccttcgagtgcctcaaagcggcgggttcgatcatatcccccgacggaacggaaacagaaataaatagtttcggggatttgaaaaacgtaaaaatcagtttatggaataatcgttattatacggtttgcggcgtctataaggcgcagaccgttcccgataaattcgacgatttaaaaacgggaggaatcggtcagtcgcggctcaaagagcaatgggaaaccgaaatccgcacgggtttttataattacctgctcgtttccgatgatttctacgcggcgaacgaaaaatattttacgcattcttatcaaccggaagagatcataggcgtatcgacgtatttcaaagactatacatatgattacgacctgacagacgaaaacaacaatacaataagcctgaattatttttccaaacatacggaaaacggacttcccctatacggatttgaaggaacgcccctcgcttccctgcggcccgacgagatcgcggtatcacgggaagtctgggcggaatggctttataatgcgattcaaaattccgacgggtattggcatctctctgacgaggacgaacacggaatatcctattacgacaaattgcaagcattgcagtacggctattatgatgacgacgataacaacagagtctacttagacgaagaaaaaagcgtagaattttatcgggatatcaaaaagggtatcatcgacgcgtacaacgtacctttgcccaaaaccgaatatgaatttgcaaacggatacacgcaactctcgacgacggcaagcgtcgcaggattttatatagaaccatgcggggtcaacgatagctggtacgaagcggcgtatctcggcgattcgctgtacgatttcgttttgcacgatccctccaacacctggaccgaatacgaaaccaagtacgatgcggcgggcggcaaatatgcggctgttttcgtagaaaaatcggacgcagcgatcgacaagacgctcgataaactgtatcacgtgaaagaggacgattctttcttcgacgtgaacagcgaaaccaaagaaacgatcggcggcatcgtcgaaacggtgagtatattttccaaagtttttttatacatagggcttgccctggcgctgtttgccatgctgatgctgttcaattttatttccgtttccatcacctacaagaagaaggagatcggcattctgcgcgcggtcggcgcgcgcgggacggacgtctttaagatcttttacgcggaatccgccatcattacggcgatcagtttggttctgtcaatcatcgcgagcatcgttctttgttcgatcatcaacaatatcatactgcaaaaactcgctctccctctgacgctattcgtgttcagtccgctgtgcgccgcgctcttggcgggaattgccgttttcacttccgtcgtttccacgttcctgcccgtttattccattgcaaaaaaacgccccgtggaaagcatacgcgccttataattaccagaaaagagcgttcggcaaatgccgaacgctcttttacaaataaatttattggttttcgattcttttacggagttccatcatctttaagtcggtggcggcgatggtctcagcgcacgttttgagttcgtcggagatctttttggcggcggcgttgtcgtttttatagcgcatctggtgttccagactcgcccagaaatccattgccacggttcggatctgtatttccacgcgcatattctccttgcggtcggaaaaaaacacgggcacttccacgatcatgtgataactccgatatccgttaggcttgggatctttgatgtaatccttgacgcacacgacttcgatatcgtcctgctttgcgagcatttccgcgaccgagtagatgtcgtccacgaacgagcagatgacccgcacgcccgccacgtcgttcagattgtcgcggatggatcccaccgtgacggggtatcctattcttttgagttttttggcgatgctgatgggcttttttacgcgggaggaaatgctctcgatgggattgcggctgtttctgagcgacagatcgtcgttgagcacctcgaattttgtgcggatctcgcggatcgcggaattgtagcgcatgagcatttcgctgaaattttccagcgtttcgaacagtttatactcgtcgtcgcccatcagttcgcgtatgatggcctgtttatcgtaattcgtcttttcttgcgtatccatagtgttcctcaaacgaaatattcggcataactgtgctcggcaacgaacgcgcccgaccccgccaaacggtatccgcgcgaacgcagaatatcggcgcactcgaggagcgcgtcgtcataatcgcggtccgagatctgaacgggcaccctacccccgtatacgggaaaagaaaaaacgagtatgccctcgccatcgaaactttgcccgcgcgccttgacgggcgtgatatcggtatgtacgacttcgaaaccgagttccttccgcaagcgagcgcagaaggagtcggctatctttttgcttccccccgtaggactgaaaaaaacgtttcgtatccgcatggtttatccctctcagggcgtattatatcattttttcatactacggtcaagaaagttcgctcagttgaattctttgttgcggtagatgcgaagggacacgaaataagaaatcgcgaggatcgcaacggagagcacggcgagcagcacgagcatccagggcgcctgcgcggcaaaattcagccgttcgaataaagaaatgccgccgaccatcaacgcaacggtgaaaacaatgacgatcatgtaaatgacgcgcgccttttccacgccgaaacggaaaaaacagggcaggacgatgccgacgcttaacacgcccgcaaaggaataggcgacgacaggcagaaaatccaccgcctgccgatacccgagcgccaacgccaaaatcaagccgagcgccagcgaacagagtatggttacgactgtaaaaacatacttcgacaagaccgccgtgcgtcgggaaacgcccgaagagagggcatagcggtcccatttatcctgcgcgtcgtaggaaatggtcgaagaaaccaatcccacggaaataaaaatcataaagccgcagaaaaaataaatattggaactgacgacggacacgacggcaaagacggccgcgaccaatgcgtaatatgagatcaggtttttcacgttgtaaaaatcttttaaaagcaaacctttcatgattcccctccttacgggcgctcgccccgaataaagtagagcataatatcctcgatttccgcgcgctcgacgagatatcccgcgggaattttatcgcggtaaacgagcgcccatacgccgtattccgaacgcgtatagccgaccaccgcgcctttatcgagatttgaaaaatccgaaacgccgcatttgagcacgccgaatttttcccgcagcgcgtccttttcctcgaaaaataccacttcgccatgatggataaagcagatataatcgcagattttttccagatcgctgacgatatgggaggaaatgagaatggaatgctcctcgttctgcataaattcgtataaaatatccaggatctcgttgcgcgctacggggtcgagtcccacggtcgcctcgtcgagcacgagtacgcgcgcgtcgtgcgacagcgcagccgcgacggcggctttctgtttcatgcccttggagagatccttatattttttatcgagagggagagaaaaatctttcagatatttttcgtacgcgctctcctgccagtttgcaaacagattgcgcatgatattgccgatctgctttaagttgagatttttcggcaggcactcttctccgagcaccacgccgatctcgctccgctcggcagcggtaagccgcgacgcgtccttgccgaaaatgcggatactgccgccgtcgggattcgcggaacccagtatacagttgacggtcgtgcttttacccgcgccgttctcgccgataaatccgacgacggcgcctttgggaatatcgaaagatacgtttttgagggcaaaatccttgtaacgtttcgccagtttgcgaatttctatgttgttctccatattctaaacctcttccgcaacgacgcggagcatctccgcgagttcggctttcgaaacgccgcacgcgcgggaaagttcatacgctttcgaaagcgccgcttcgatctcgcgcaaaatctcttctttgagcatctgcggattggaaggcgccacaaaactgcccttcccctgcacggaatgaataaatccgtcccgttcgagatcgtcgaacgcgcgcttggtcgtgatcacgctgatctttaaatcccttgcgagcgcgcggatggaaggaagggcgtccccttccttcaacacgcctttcataatagccgacttgacctgactgtagatctgatcgtaaatgggcttttcgctcgcattgctgatgatgatatccatggttctccgtctttttcagttaactgtatatatagtatatatacactataatcatttgtcaagcattcggcacaaaaaaagagaggcattagcctctcttttttttaaaatttaatacgctctcgcgaaatagacgactttttccgcttttttgccgcagcaggcgcaggtttcggcggtttcgccctcggcgatgacgcgcgaactcgcggcggtcttttctttgattttatcctcgcattcgcggcagccgcaccagcccgcctttacgaagttgccgttttccacgcccgcaaggatctcgtccatgttcgttgcggtgacgacgcggcgctccttgttctgtttcgcaagttcgtaaagatttttctgaatctttgccaaaagttctttgaccacggtttcggcgttgcagaggtccgcctcgatcttttcgtgcgtgtcgcggcggacgagcaccattttgcccgcctcgatgtcgcgcggtccgagttcgatgcgaaggggcacgcccttcatttcccactcgttgaacttccagccggggctgttgtcggaaacgtcgctgtccacacggatatccgcagccgcgagccgctctttgagcgctgccaccgcttccagaacgccctcttttttggcggcgatgggaatgaggatcgcctgcacgggcgcgacgacgggcggcaatacaagacctctctggtcgccgtgcgccatgatgagcgcgccgatgagccgcgtggatacgccccacgacgtggtatatccgtatttatgcgtgccgtccttatccagaaactgaatgtcgaacgccttggcgaaattctgtccgagatagtgcgaagtgcccgcctgcaggctcttgccgtcgtgcatcatcgcttccataccgaaggtcgcgaccgcgcccgcgaatttttctttttccgtcttgcggcccgtgaatacgggtatggcgaggcaggattcggcaaattctttatagacgcccagcattttcatggtctcttccatcgcctcttcctcggtagcgtggacggtgtgcccttcctgccacaaaaactcgctggtacggaggaacgggcgggtggtcttttcccagcgcacgacgttcgcccactggttgacgagaatgggcagatcgcggtaggattgcagccacttggaatacatttcgccgatgatggtctcgctggtcggacggatcacgagcggctccgcgagtttttcgccgcccgcgtgcgtgacgacggcgacttcgggcgcaaagccctccacgtgctccgcctctttctttaaataactttcggggatcagcatggggaaatacgcgttttggtgccccgtcgcgcggaaacgcttgtcgagttctctctgaatattttcccagatcgcgtaaccgtacgggcgaatgaccatggtgcccttgacgggaccgtaatccaccagtttggtctttaacaccacgtcggtataccactgcggaaagtcggtttcgatatccgcgatgtcctttacgaattgattgtccttagccataagatcctccgaaaaaaactgtactttttttattttaccacaaaattccgcgtccgtaaatccattttaacggagaaattatttttcacggagaaattatttttcgttgcgaagttctttgctcgtccagatcacggaaaccgaaccggggcccacgtgcgaaccgatgacgggccccatgatggtgacgggcggcgtgtaaccgtatctctcttccaccatttttttgagttcttccgcgtcctgttcggcgtcggtatgtacgatgctgatcatgcggtcgcgctctacgggcggcatggcgctcattttatccaatgcgtaggcaaacgcctttttcatgcccttgcacttttcgacgacggaaagtttcccttcgcggtcgaacgtgagtacgggtttgacttttaaaagcgtgcccgcgacggccgccgccgcggagaccctgccgccgcgtttcagataatacagatcgttcgcgatgatcacgtgctggatatggtgtttcatttcgttgacgtaatcggccgcctctttcgcgcttttcccctcgtcgcgcaggcgcaccgccgctttgacgagttcgccctgtccgatcgtcgccgtcaaggggtcgataacggtgatattcaattcgggataatcttttttgaccatctggaacgccttttccgccacggtataggtggtggcaagtccgctggaaatggtaaagtgcagcacgtcgcggcatccctcttttgcgagtttcagaaaatgctcgtagtggctttccagattgagcatcgacgttttcgaaaagccgcccgcgcgcagtttggcgtaaaagtcgacgtattgctgataagaagtaaaggcgtccagtccgtctgtcagcgtccccttttcttcgaccgtaaaagtcagactgacgaatttgacgtcgttctcgtcgacgtattgcctataaaggtcgcaggtagaatcggtggaaaccgtaaatttaaccatgataatcctcactttgaaagcataagcgatgagccgccccctttcgaatgtattatatcataccttgcgcaagaatgtaaacgattttaaacagttttctgtttccgcaaaatgcagacaaatgtaacgaaatcacttgtataaatccgcctttttatgtataatgatagggaaacgtgaacgggaggcaatcatgcgcgaagaagattttctgaaattgaagagcggcacggacgtgcgcggcaccgcgctcggcgaaaagaccgatctgacggacgaagcggtagacgcaatcgtgcgcgcgtttttgtactggatagaagaaaagacgggaaaccgcgcgaagatcatcgccgtcgggcacgactcgcgtctttccgcggagcgcatttgcaaaacggcagtttccgcggcgcaggcaagcggcgcgaacgtgctcttttgcgggctgtcctccacgccctcgatgttcatgctgctgcaggaaaaagaattttgcgccgatgcctcgatcatgatcacggcgagccatatgcccagcgataaaaacggactgaaattctttttgccggacggcgggctggaaagccgcgacgtgacggaaattttaaaactcgcggcgaagggcacgacgctttcgggcgcggggcgcgtacaaacgctcgactatatgccccgctacgcggcggcgctcgttgaaaaagtgcgcgcggcgacgggtaaagacaagccgctcgcgggcaagaagatcatcgtggacgcgggaaacggcgcgggcggtttttatgtggacaaagtgctcgttcctctgggagcggacaccgaaggcagccgttttttagagcctgacggcaatttccctaatcacatacccaatcccgaaaacgaacgggcgatgaacgcgatctgcgaacaggtgaaaaaaacgggcgcggatctcggcatcatcttcgataccgacgtggaccgcgcgggtgcggtagacgatacgggtgcggagatcaaccgaaaccggctcatcgcgctcgtttccgccatattgttatccgaacaggcgggcggcaccatcgtcaccgattcggtgacgagcgaacatctgaccgaattcatcgaaaagtatggcgggcggcaccaccgcttcaaacgcggatataaaaacgtcatcgacgaggcgaaacggctgaacgacgagggcgtttattcccctctcgccatcgaaacgagcgggcacgccgcgctcaaagaaaactacttcctcgacgacggcgcgtatctcgtgacgcgcatcctcatatccgtcgccaagggcgaaaacgtgcgggatctgatctcgggcttaaaaacgcccgccgaggaaggagaagtccgcctgccgttctcggacggcgcggatttcaaaacgctgggtgaaaccgttttacaggatttaaagtccgccgcggcaggcgaagggctttcgctcgccgaaaagaattacgagggcgtgcgcctcctcttcggcaaggggcgcggcgacggctgggcgctggtgcgcatgagcctgcacgagccgatcatgcccgtcaatttcgaaagcaacgtaaaaggcggcatggcggtcatcgcaaaaacgctgtattccctgctcgggaagtatgattttctgaaagcagatccactgaaaaaatttttttaaggagaaacacatataatgaacgttcgtgagcaaacggtaaacgccatccgcgtcctttccgcggaggcgatccagaaggccaattcgggacaccccggactccccttgggcagcgcgcccatcggctataccctgttcgccgattttctcaaattcaacccgaaagacccgaaatgggacgaccgcgaccgtttcgtcctgtccgcgggacacggttccatgctcaactactcccttttgtacctgttcggctacgatatctccaaggaagatttaaagaacttccgccaactcggttacaagacgccgggccatcccgaatacggccatacccccggcgtggaaacgacgacgggcccgctcggtcagggcatcgcgaacgcggtgggcatggcgcttgccgaagcgcaccttgcggcaatcttcaaccgcgaaaatttccccgtcgtggaccactacacctacgcgctgtgcggcgacggctgtctggaagagggcatttcctatgaggcttgctcgttcgcgggttcccataaactgggaaaactcattctcttttacgacgacaacgatatcaccatcgagggaaataccgactgcacctttaccgaggacgtgcccgcgcgattcaaggcgcagggctggcaggtgctcaaagtggacgacgccaacgatatggacgcgctcaaacgcgccgtaaaaaaggcgaaagccgaaaaagataaaccttcgctcatcgtctgcaagacggtcatcgggttcggttcccctctcgcaggctccgaaagttgccacggctccccgctcggtgcagaaaatctgcaaaaaatgaaggaaaatctgggatggtcggaagagcctttcgaaattccagcagaagtcgccgagcactgcgcgcagatcgcccgccgcggcgcctcccgccagggaaaatggaagagaatgttcaaagaatacgccaaagcgtatcccgaacttgcggcaacgtacaaaaagttccagagcggcgaactccccgatctcaaaaacaacgaagacctgttcaaattcgaaaagcccgacgcgacgagaaataccagttttgcggttctcaacaaactggcggatcttctgcccaacctcatcggcggttcggccgacctcgcgccctccaataaatccaatatgaaaaaacgcgccgatttcacggcggcggataaagcggggtccaatattcatttcggtatccgcgagcacgcgatggcagcgatcacaaacggaatgcagttgcacggcggactgaaagcctactgcgcgactttcttcgtgttcaccgactacatgaaaaacgccatgcgcctttccgcactgatgcacctgcccgtcacctatatcctcacgcacgattccatcggcgtgggcgaggacggcccgacgcatcagcccgtggaacaactcatcgggctgcgctccattcccaacatgaaagtgtaccgtcccgcggacggcaaagaaacggcggcggcgtggatctccgcgctgtcgggcaacgcgcccacctgcctcgttctcacaaggcagaatctgccgcagtacgaaaaatcggggcttgatgcgctcaaaggcggctatatcctcgccgacagcgacaaaaagacgcctgacgttctgctcatcgcctcgggttcggaagtcgaacagtgcatgcaggcgaaagttctgttgaaagaaaaaggcgtggacgcccgcgtcgtatccatgccctgcatcgaagaattcgaaaaacagtccagatcctatcaggacgtggtgctgccgccgcacgtccgcgcgcgcgtctgcgtggaggcgggttccccctattcctggtataaatacgcgggggatctcggcgagatcatcgcaatgaatacattcggcgcctcggcgcctgcgggcaaactgttcgaaatgtacggctttaccgccgaaaacgttgtggaaaaggctttccgcaccatcaataagcagtagatccgtatatggacatgaggtatttttatggatatccggtcttttcaaaaacttgtcgttgaaaccgtggaggcacccctgtatgcttatctgcaagaggaacccgaatgtgggttttccaaacgcgatataaaaaaatgcaaaaacctcatgttctcgtatctcggcaagttgaaaaaaatcaccgcagttacagatgaaaaaatcttaaagcaagtcaagaaaacggtgcttgccctgaacaaactgaacgagcgcaccgattattgtcttttggaaacggatgaaagagaagccctgtgggaaatctttcaaaacagcgccgtcgcctgcggtcttcgggatacggacggagacgtgaccgaagaatggcgcgaatggtaatttaaggagaacttctttatggatatcgaacaactgcttttgacgcggcagagttgccgcaactatcaggaaaagcccgttgacgaggaaacgctgcgaaaaatcgcggaactcgcgcatctcgcgccctcggcgtgcaacgcgcagccctggaaaatttatgcggcgacgggcgccaaagcgaaagaagtggcgcacgccctgcaaggtatgggcatgaacaagtttacggaaaagtgccccgctttctttgccattgccgagggcaagacgagttttatcggcaaggtcggcggcgcgtcgcatctcgtgccttacgacgtgggcatattcgcggctcatatcgtcctcgcggcgcagtcgctgggcgtcggctcgtgcatcatcggctggcgcaacgaaaagacgctgcaacgcgttttagggctcaaagataagcagtgtattcccctcgtcatcgcgctcggctatcccgccgaggacgatccgctccgccagaaacggcgaaaaccgcttgaagaagttttcgaaattttatagtaaaaatctccgcaggatttgcggagatttttactatacaaaagttcggcttacgtttttaccgaaaattttaaaacaagttcccgcccgccgagcgaggtcgagacggcaaagacgccgccgtccgcggggaaagtcttttcgtatttctttttgccgcgcgtcgccgtcattgtgatggtcttcgctttttcgtcgaaagagtagttgccctcctgccgcacggtaaagccgaatttcggttttgcgatcacgaggaacgtaccgccctctttgagttccagcgtgacgatcttgaatcgggacaaaatgtcttttccttcgagcgttgcgctctcgcattcgtaaacgccgatgtaaggcttcgtcagagaatacagcgaagaaagttcgctcgttttacagcccgtaaacgccgtcgtgccaaaaaagcacagcaaaattaaaatgaggcatcctatctttttgattttccgtttcaccctgttccttcctttaaaataacttgctttttcctggaattccagttataattagtatcgtacaaatcacgaaaaaatactcttgaaaaggcaaaattatgaaatacgacgtggaattggtgggaaagatcggttcgatggcgctcatcgacaaggccgacaatatgatagattatacgcgcgtggcgcgtatttcgcgggaactgaaacccggatatatctggatctccagcggcgcgacggagatcgggaggctggattaccgcatgcgcaacggctgcgatctgcccgacacagaagaatccaaagcggactattcctcgcagggacagaccattctcatgcagacctaccgccagttcgtggacagcaaatattccgtgcgtcagatcctcgtggagcaccatcacttcaacgacgaggtgaagaaagaatatctcaaacggttgctattgcgctgcaaagaacaaaacgccgtgcccatcatcaactataacgacgcggtgtcgcagtcggaaaaccgccgtctggaactttccgcactatccaaatcgcacgccaaagtgtacgaatgcgtggacaacgacgaaaccgcgtcgctcgtggcgtgtctcgtgcacgcggaaacgctgctcatcttaacgagcgtcgacggcatctacaccgacccgcacgacccttccacgattatcgaagagatcggcggcaaaaacgcctacgaattggtggaaaacatcgaaaactataaaaagtactgcgacggcgcctcccgcaagggcgcgaacggcgcgaaagccaaactcgaatacgtgaaagaggccgcggcgcagggcacgaaagtgcttatcgccaatgcaaaatacacgctcaaagagatcctctcgggcaaagcgcgctgtacgagaatccagatacgctaaaaaagaggcttgcgccgtacggcgcaagcctcttttacattgttaaaatgaacaaatcatttccatcctctacccttaacacctcgaacgaaccgtgttcttttttatatttttttaaaatgcgcacgatcttacgccacgaaataaatctgaaacctgacaatttttttaatatgaaaactcctaaaaaacaaggtatataaattttcttaacgtccgaaatcgttttttccgaaattgtaagatacatcattccacccaaatttcgacagaatcttcgccatcttcaaattccaacaatttgcctgccacaccgatatcgaccatctgtaaaagttttgaaaagtctatcttttctaaaatgtcattctgtattcccttccaaatgcctccgtcggagataagcagtttcactgcctccacgggaatattcaaattcgtcgtcgacgaatcgtcccgcgcttttattttcagcaatttcatttttcgtccggaatcgtttagatagacggtcgattctctgccgagaagttcgtcacaactgatttgaaaaaggtcggcaagagttttaagcaacaagatatcgggatacgtactgccgttttcccatttagaaaccgcctgtgcggaaaccccgcaccgttctgagacctgttcttgcgtaagtttcgcatcctttctcagccgcgccaatctttctccgaaatgatccataaaaccctccttgaatctatatctgcattgtactatactttattcagtttaacaagagagcatcggttgaacaggtatctgaacggttgtatttttatcaaccaacgattgagttttataaatttttctgttttttgatgaggaacatacgggtatacatacagcccgaattttcgcgcgcggacgcatcgtcgtaaaagtcggggaaaaagagttcgccgcacatcaaaacgtcgccgcccgccgtaaaggaaagattattttcgtaattttcttgtctgcgcgcggtcacttcgtaaacgtaagcgggattgagccccttgaacgcgacgcggggcggcggaacgttggtgcgcttttccgcggcaattacggcaatcgccgcgccgcggtcgggggacacggaaataaacccgccgtaatcccctccgaaactgtcgccgaggcgataaaaatttccgaattgtaaaagttttctgtgttctttgtaaaaggaaatttgcgcagcgaccgtctttttatccttttcggaaagttttctcacgtccagttcgtatcccaaaagccccccgcaggcgacgttgaaccgcgtttccaacgggtgcgaatcgccgctctgatggtttggcgaggcggacacgtgcgcacccatgacgctctgcggatagccgtaagaactgccgtcctgtatttgcagacggtcgcgcgcgtcggtattgtcgctcgtccatatctgcgggaaataactcatcatccccagatcgaaccgcgcgccgccgcccgcgcagccctcgaacagcacgaacggaaagcgctttacgactttggagatcactttatatacgcccagcatatagcggtgaaaatattcgcccgccgccacgcctttgccgaaacaatcggtgagcatacggttatagtcccatttgacgtaggaagcgccgcagcgcgagatcacgtcgctgacggtgcggacgacgaaattctgcactttttcgtccgccatgttgagcgcgagttgattgcgaagccgcacgggcgtcctcccgggaacgcgcatggcgtaggcggggcgggatcggaaaagttcgctctcttcgctgatcatttccggctcgatccagataccgaatttcagaccgcagccgcgcacgcgttcggcaagttccgcgagcgtgcagccgagtttttcgacgttgtccgaccagtcgccgagcgaagacgtatcgtcgttccgcctgccaaaccagccgtcgtccaaaacgaacagttccgcccccaggtctttggaaactttcgccatttccacgacggaatcggcgttaaaatcaaaatacgcgccctcccaactgttgacgagcacggggcgctctcttttcttccatttaccgcgcacgacgtgctccgccgcaaacgcgtgcatctgccgcgacagcgcgtcttccgtttcggcatagcacatcgccgcttcgggcgcgcagaattcttcgcccgcgccgagcgtccagtcgaacataaagtcgttaatccccgcgatcacgcgggtgacgccgtcgtattcggtcatgctctctttgtggtttcccgaatacaggagatgaaacccgaacacgcctttttcccctttcgccatgacgaaaggattgtgcgcgtgcgaggacgcccccgcgcggctctcgttgacgaaggtgccgccgcatacggcgcgcgcgttcttacggcgttcgcgcgcccatgcgccgttgaacgtgataaactcgaaacgccccgtcaattccgcctggacgctcgcaagttttttgatatgtatttcctttttcgcgccgttcacgatctttgcggacacggcgatcgcgtcggtgtcctcaaacacggtataatacagatagagcgcgactttcgtcgcatcgacgtatttcagttcgagcgtcttgctctcgccgtaagaagaaggcagattttcaagaacgggtttttcggcaaggatcttacttttggaatagacgaaattcgtggaaaagccgccgtccgcattgacgagcaaaacgctctgctcgttaaaatccccctgcccgtattcggaaaaaagacggcagggcgaagatcgcagcgcctcgcaccagtcggcggaaaccagttttttcccgtaatagaggatctgcgccgtatccgctttgagtacgagcgtcgtggcgggcgtttccagacgatatacagtgccctttttcttgatcataattgcctccgttttacttagaatcggttaaaaatcagggggattatatcatatttttctttatttgtacagcaaaaagccgataaagcgcaaaatcgattgcgttttatcggctttttgaaactttttgttcagccctgagcgatttctttggaaattttcgaaaaatcctgcgttttctgatcgagcatcagtttctgcgcgggctgcaattcataatagcccttttcctgcatctgcttgaaaacggtgtactgatcgtccgccgccttgttgaaattctgcatgaacatggtgcgcaggctcttggtgctgccttccttgatcgcaagaagatagttgtccatgagcattttttccgtattgagcatatcctgcaaagaatcttgctcgttcagttcgctttcctttttactcaatttagccatgataattcctccttatttacccgtcagcatctgcaaaagcgtattaaagcgcttttcgtgacattccgcaatgccgcacatacattccgccagcgactggtcggtcagcgttttggaatacattctcgcctttttgcacgccatgccttcgctcgcgagcagagaagagagcacttccagatcttttgaactgaaatttgacatatttacctccgtcaaaaaagatgtacgctaagtatgctcgttctaaagaggaattatacggaagaattataacgtataaggcaaaaatttcgatgtttttgcataaagaggatggcgtggatttccctgtttcgtcctgccgatcatgagataattgccttgaaatccgtcatgtaaaaggtcgacgatacgttgcagacacgttttcaggtactttcttttagaaatcagattgccgtaagcgaacaaaacgtcgcaagcgggatatgtttggagcaggtttcggatatgtaataagttcgtctgcattaaaccgaaatcttctgatacggacagatcgttcggatccgttgccctctgcggataaatatttaacataacccagtttttataaccgttgaaatgcgccaaccgtatggtacttttcagcgtctgatcgaatttttgcaatgttgccgtgctcgggttgatcccgaaacataatagcgtgcgcgaacgaggatccgcgacctcacccaacacaaaacgcgacctgtcctcttcgtcggtttcgtacagccaagccatatttactcctttgtgtataaaaattttcagtttttggggaatatttcgcgggcttctgccgccatgatcttctgataattttcgtcggaagagaaatcgcgctctttgttgtattcgccgccgagagcctcgatggcgaatttgagttcctgaaagagcacgtaatcgatatcctcgcgctcgatggtccccatgaaaacgggcagcgcgcgctcgtcgccgtaggaggcgagataggcgcataaaaggggcagttcgcgatcgtccgcggcaagaaatgcgttcatcagcgcggcgtatgccctgtcgtccttgtttttcagtttggagaggatctccagagcgtacggttcggtctctttgtccttgcaaagcgcgagcacctcttcgagcaacagatcggcgttgggtttgagcatatccgcaaggctgtctttcacgtgctcgtcgtacgcgtcctctttcagcatttccgcatagcgcacggcggctttcggattcgtgttcagaagattgatcgcgtattgcacgagttgttcgtccgtttcgtagagaagtttcaatagcggctcggtacagtcgcgcccttcgagcgcctcgcacagaaaatcgggcacggaaatatcctgcaaaagatattctttgagcgtttcgacgagcgccgactcgctcatcgctccgaaatacgcgcggggcgtggcgccaagttctttcaaaggcgtgtccccaaactttttgtatagatccgcgatcagatcttcccactcgctttcggtatgctccgcggcgtgtttttcgatcatcttcgccatcttgttgttaaaaataccgtcgaaatcaatgagtttcatttttatctccttgcctgaccgcttccaataaggtgcggacgttcgtttcgtcggcgcggaacgattccagcgcgcccttgaaatcgccctttcccttccgcgtgaagaggaaaatcgcgcatgccaggctttccttgtccgtcaccagcgtcaacagatttttttcttccagaatattatacattttaactgccgcgcggttgaatttatgcgtatgttcgttgccgagcagacagaatttcgccgcgcacatcgaataggcggaaacgaagatcttgtgtttgacgcgccccacttccaaacgcacgaattccagttgtttgaacacgtcgcagagcaccaccgcgatgctcgcgtctttgtttcgctcgaagatcttccgcgccgtttcgatcttgatgacgtcgttcacggtgctgtccagaaacatttcctgcaaaaaaccgtactcgcccgcacgcaccgccacattcacggccaatagctgcaattcgggctcctgcccgtcaaactcgtcgaaacaccagcgaaacagcggcacgaggtcgtattccctgccgtaacgtctgagttcgtcgcttttgacgtccgagagcgccgccaacaactgcacgcgcttatcgcgctcagctttgggaagtttataaaaatagtcgaccgcgggcggctgtccgccctcttccagatacaggcgcatcgcgttataataatagcgcgcgacttccgcatgggggaacacgtctatgatcttgccgaacccttccaggctttcgcggtatttgccgcatttgcaggcggctaccgatttaaagtagataagagtcagatcgtaacggacgatctcctccaaaacgcagaatttttcgtatgcctctgcgtccagtccgctttcgcagcagaccgtggcgattttgtacagttcgtcgggattttcggtggagatagaagccagtctgcgcgcgatctcgcggctctttgccgtctgtttcttttcgatgagcacggcgcagtaagtggaaagcgcctgcacgtcgtcgggatctttttccagaagttccagacaatccttttccgccgcatcggaatcccccgtgacgagatggcagacggcgagataatttttcgccgcgcccgcaaggcgagaggcgggatgcaccttggaaaacgccgtcgcggcgtcctcgtactttcccgatttcaaaagtttgacgccctcgtccaccgtttcgccgtaatccgctttttcaggcggatagaccaccttgaaaaggctcttgggcgaacgggtgaacatacgcgcgatctccattttgctttcggcgggcacgtcgtcgtcttcggagagcattttattgtaataataggcggactgcgcttcgtttcccacattgtaataacaggcggcaagcccttcgtatgcgtccgcgagcgcctctatctcgcagacggcaagatagcggaaccagcagttgatcgccatttcgtacgtttccatgtcgtcgtaaatttccgccagaaacatccagtcgtcgggctccgcaccgtaaaggttgatctttttatggatcatgcgcagcgccgcgcaaaaattcttttcgtcgcagtaacgctcggcgagttcgacaagacgatcttcgcccgcatcgaacgcgattactttttcatccattcgggtacctcttatgtacgggcgccggcaagaagtttttcgacgtcctccgccgaaaaaacatagtccgtgttgcagtaatggcagtgcacgcagatcttcccctcctcttcgagcgcgtccataagttctttttcgcccatggagagaagaactccctctatataatttctgctgcaattacacttgtattcgggttttaatgtgtaatatttgacattcccgaaatatttttccgcgatctcttctgcggaaccctgttccacgagcgagctgacgctgcggaaattttccatgatctcttcggttttgcggatattttcttcgctcgcgccgggaagcggctgcaagatcacgccgcccgcacccagacaggtcccgtcttttcccaccttgacgcccactgcgatggctgtggggatctgttcactgtacgcgaaataggcggcgaaatcttctccgatctctccgcttatcagttccgtcgtccccacgaaaggcgctccctcgccgtcgctgcggacgacgctcaggtatcccttgcgcccgacgcagccgcccacgtccagtttccccgcctcgttggggggaagaaaagccgcgggatcttcgatcgtgccgcgcatatgcaggtctttgtccccgctcacgcagatggggccgccgacgccgtcccctcggatattgacggaaagcgccgcgttttcgctcttcagggaagaacacatatatgccgccacggtaagcgtgcgccccagcgccgccgccgccagaggcgaaaggttatgtatgcggatcgcttcgttgacgagttcggtggtgtcgagcaccgccaaagaaacttcgtcgtcgaacaccagccctcttaaaattttattttcggtcttacccattttcagttcctcacacagataaagttcacgcgcgttttgtcgccgtcgtccccgaacgcgcccgtctttttcacgagcgtaaaatcagcctcgcgcaggcagcgttccacgttctcttctgtgtggatatactgcacgtgccgctcgtcgccgcgctcgaacgcgccgtcttcgcgcttggcgaaaatggtaaaatccatttccacactgtcgcctttcagtcggttgaaccacagatacgcgacttcttccctgtcctcgcaaaaggtattgtttccgacgatctctctgagtttgtattcggaagagatatcgaaaagatatgccccgccctttttcagcgcgcccgccgcgcgacggaaagcggccgcaagtttgctttgcggcacatagttgaggcagtcgttcacgcacagggcgaaatc

SEQ ID NO: 4252 - DNA, 1669 bp, Unknown
  16S sequences of unknown bacteria
ccgccttcggcagcgatgaacttcttggaggcgatgaagtgcttgccatggcccatgaagcccggcgtctgcacgccgccgcccgtcatggaggccatctcggagaacgtcatgccgagcggggtcatgccggcgtactcacgcatcgtgatgacaacgcccatgctgaccggctcgacgccgcagatgcattcgaagcagccgcaggacgtcatcggatcctggaacagggagtacagcgtgacgtgctcaagcgcgccgtgcgagtatttctggacggcctcgtccacgtcctcgtagcggccgagacgctcgtcgatgcagtgctccttcggcacgacctggcagggaccctgcgggtcgagctcgttcgttgccttggcgtccagccaggaaacggcgccgcagaggccgaggcgctccggggtgacgatgcagacatggctcggggagaaggcctggcacatgatgcaggtgtagaacacgggcacggactcgtccgtcatgctgcgcagacggtcgtcgcggcggttgaagacctcattggccatcgcgcgcagctccttgttcttcgcctcgtccacgacgatcttgacctggcacttgtcgacgacggtgtcgaactcgctcttgatcttggcgtagaggacctcgccgatgtggcggaagcggaagccggcctcaaagtcggccttcgaaacgcggatacggatcatatcgcgctggccggtgtgcataacgccctcgatgcagttgaggaaggagtggatcttgcgctccataacggactcgaagtcggactgcatgttcttgcccgcgacctcgacgatgtaggacagggaaattttggagccgacggggatctcgtcgagctcggggccgtcgaccgtgatcttgtggtcctcgatctcggcggcgtctctcgtggtgaccagctcgaagcagtccttgcgggagccgtcgacctcgacctgcatgtcgcccttgcggatgatctcgccttcgaacgcggaagcgaaggagacaggaatgtcgatcgtggtgatcttgatcttgatgtcgcgcgcctcgagggaggtggcgttgaacttgctgacgtcctcctgcacgatgaggctcttcgggacgcggtagatgttctcggtctcgttcgtaacgaccgggaagccgagggcaatggcgccagcgccgcaggcgacgatgacgtcgtccaggggcttgaaggcgttgacgaacgcgggaacgcgctccatcgtgtacttcatcaggctgcctgcgtcgcccggagtgatgttgccgaagatcagggccgcgcgcagcgcgacggagacgacatggatgacggcggtgacgtccttgccgagcgggatgacgcggacattgtcgccggtcttgtagcccttctcctcgagctggtcgatgacgccgcccacgagggtgatgaggatgccctggctctggtagctcttcacgagcgcgacggcctcatcggcagagggagcggagccgaggataacggcaacgccggggatgtcgcccgtgaccagcggcacgccgaggttacgaatgacggcgtcggacaggtggccgtagcacggcagcttatagggcgctgcgccgttgaggtacttcaggacctcgatgaactcggcgcacagtgcggtggcta

SEQ ID NO: 4253 - DNA, 13860 bp, Unknown
  16S sequences of unknown bacteria
gaccacaccgacaagtacattcaggcttacttccagtacgactcaaagaagaccggcggtatcacaatttcccacctccgcttcggcgacaagcccatcaagagcccttactacatcactaaggctgacttcgtagcttgccacaaccagtcctacatcaagaagtatgatatcgtagaagatgttaagccgggcggcgtattcatgctcgactgctcatgggataaggctgaactcgaagagcacctccccgcagcagttaagtcctacatcgctaacaacaacatcaaattctatacaatcgacgctacaactatcgctacaaagaagataggcaacgctaaggttaagaacacagttctccagtccgcgttcttcgcactcgctaacatccttcccaaggacgaagctatcgaatacatgaagaagatggcttacaagtcctacatcaagaagggtcaggctatggttgacctcaactatgccgctatcgacgctggtgctgacgcattcacacaggtagaagttcccgaagcatggaagacagtagctcccgacgctcccaaggctgaattcacaggcaagagagctgacctcgttaagttcgttaacaagatcgttgagcccgttgactccatgcgcggcgacaagctcccagtttccgcatttgaagactatgttgacggtacattcccgcagggtgctgctgcctccgaaaagcgcggtgttgcagtttacgttcccgaatggattcccgaaaactgcatccagtgcaacaactgttccttcgtttgcccgcacgctgctatccgtcccttcgctatgaccgaagaagaagccgcagctgctccggaagctacaaagttcacagctaagccggtagttaagacaaactacaagttcacaatcgctgtatctcctcttgactgtatgggttgtaccctctgcgtcaaggcttgccctgtaactgctaaggctgaaaaggacggcactgacaagaaggctatccgcatggttctccaggaaacacaggaagctcagcaggctccgttcgattacgctgtagctaacgttacagaaaagcccgagcttatcagcgctaccgttaagggaagccagttcaagcagcctctcctcgagttctccggctcttgcgcaggttgtgcagaaacatcttacgctcgtctgatcactcagctcttcggcgaaagaatgtacatctccaacgcaacaggatgctcctccatttggggtggttccgctccggcaactccttacaccgtaaacaacgaatccggtcacggtcctgcatgggctaactccctgttcgaggataacgctgagcacggtctcggtatctacctcggtcagaagactatccgcaacagacttatcggcaaggttgaagagatgatgcagtccgaaaaggcttccgacgagttcaaggctgctgctcaggcataccttgacaccaaggacgacggcaaggctaacactcccgcaaccaaggctctcatcgctgagcttgaaaaggctgctgctgccggctgcactatcgctcccgaaattctcgctgaaaaggattacctcgctaagaagtccatctggatcttcggtggtgacggttgggcatacgatatcggcttcggcggtctcgaccacgttatcgcttccggcgaagatgtaaacatcatggtattcgataccgaagtttactccaacaccggcggacaggcttccaagtcctccaacatcggtcaggttgctcagttcgcagcagcaggtaaggctatcggcaagaagaacctcgctgaaatcgctatgtcctacggctacgtatatgttgcacaggttgcaatgggcgctgacatgaaccagctcctcaaggctctcacagaagctgaagcttacaagggaccctccatcgttatcggttacgctccttgcgaaatgcacggcatcaagggcacaatggctaactgccagatcgaaatgaagaaggctgttgacgcaggctactgggaaatgttcagatacaatcctgttctcaaggctgaaggcaagaaccccttcactctcgacagcaaggaacccacagcaagctatcaggacttcctcaagaacgaaaaccgttacacaagacttgctcagtccaatcccgaacgtgctgctaagctcttcgctgaagcagaaacattcgctaaggctaagtacgaaagacttaccaagtacagcaagctcttcgactaatgtagcttaaaataaaagaaggcatcgggtaaaaccggtgtctttttttgctgttttggtcaaataaaaaagcgcagcagattaaagccgcgctcattttattctgtttggttaattaatcgtcgcagttttcccagttgtggtagatttcctgaacgtcgtcgctgtcttcaagatgctcgataaggagattcatgttcttgatatcgtcctcgttttcgagtgtaacgtagttctggggaatcttgtcttcttctgcggactcaaccttgtaaccgagcttttcgagagcttcgcgaactgcgtaaaggtcgtcgggttcggttgtgatttcgtatgtttcgtcgtcggaggaaaagtcttccgcacctgcttcaagagcggcttccatgagagcgtcttcgtcaacaccttcgttgtcttctttgagaaggattataacacccttatcgtcgaacatatatgatacgcatccggacgcaccgaggtttccgccgtatttatcgaagaagtggcgcacgtcggaagctgtacggtttctggagtcggtagcagtctcaacgataacagcaacgccggacggaccgtagccttcgtaaataatctcttcgtactgtacgctgtctgcgccgagagccttctttatagcacgttcgatattatcgttcggcacgttgttagcctttgcctttgcgatgaggtcacggagcttgccgttggtattcgggtcgccgcctccgtcacgaacgcatatctgaatttccttaccgattttggtaaagactttacccttttgagcgtcggtcttttcctttttattcttaatattattccatttgctgtgtcctgacatatttaaacctcttatctaattcaaattatattttttcgggtgttctcaggcaaataagatgaagcgcagtgccaagtacgctctttgtgacctttgtaagtctgactctgaactcgcgtgtgtcgatgttttctgctgttactatcgggcagtcgcggtagaagtggttgaaagctgtgcaaacttcaatgatatagcgcgtgatatcggacggttcgtagtcctttatcgcagtctgaaccttttccgggaacatagagagagttttgagcagttcttcctcgctcttgtgagttatgctgccgccgacgcccttaattccggcttcgtttgcctttgagatgatgctgcacgttctcgcgtaggtgtactgtgcgtaaggtccggtgtttccttcaaagctgagcgcctgatcgagagtgaagttgatatccttgattctgctgttgtagagatagttgaacacgatagctcccacaccgacagcttccgcgacatcttctttattttcaaggtcgggattcttctcgttcatgatctcgctgactttttcaacggactgtctaaacaaatccttgagaagcacaacgttgcccgttcttgtagcgagctttgcgccgtcgatggaaaccgtaccgtagggaacgtgaacaagctcgttgtaccagtcgtaacccataagctctactaccttgaaccactgtgcaaagtgaaggctctgcgcggatgaggtgacgtagatgcatttgttgaaatcataagtctgcttacggtatacggcggcggcaatgtcacgtgcgggatatatggttgagccgtcctttttcagaataaggcaaggcggcatattgtactcggaaaggtcgacaatggacgcgccttcgtcgattttgagaagtcccttttcgcggagaatttctacctgagcctgaaccttatccatgtagaaggattcgcccttgtatgaatcgaatgtgattccgagctgcttgtaggtgttctcgtattccttgagagacacgctgacaaaccacttccaaagctcgagattttcagggtcgccttcttcaagcttatggaattccgctcttgcttcgtcgttgagagacggatctttttcggcttcttcgtggaactttacataaatcttgacaagctcgtcgattccgcctttttcgatggtctcacggtctccccacttgcggaaagccacaatctgcttgccgaactgagttccccagtctccgagatggtttacgccgatgcagttatatccggcaaactcgtggagcagctttaaagaatgaccgatgacagtagtgccgagatgaccgatatggaaaggcttgcagatgttgggggaggaatagtcaagaacgactgtctttccctctccttcgtttgacgagccgtatttttcgcccttttcttcgatttcggtgaggacatggttagcgagataatccggcgatattttaaaattcaagtaaccgccgactgccacagcctgtcctataccgaagtctccgattttctcggcaagagaagccgctattttaggaggagcgtttctcagcgtctttgaaagtctgaagcaagggaaagcgaggtctcccattgaagagtctggagggtattcaagcattgtgagtatatcttcgggtgtaagacatacgtcggctgacaattcgtgtgcggcttcggcaattttaccggcggcactgattttaaaatactgcatattttctccgattttctccgaaatatattataattctattttctgctgaagctgatttttagcgttctgttcttcgaggattgtatgaatcttctttgcggggttgaggagtgtgcttatcgaacggtcgcggttgagtgtgtctatcatgagagcgacgtacttgcacatattgacctcggagtaccattcctttgtgagaagtccgtccggatggtagatgaggtttgtggtgaagcattttgtgaagagtccttcttcgtacgccttatcgaatacttcaaatccgtttgtgaaaagaccgaatgttacgaagaagaagattctcttagctcccttttccttaagctgctttgcaacgtcaatgatggagtcgccggaagctatcatatcgtcaacgataatagcgtccttgcctttgaggtcggagccgaggtattcgtgagcttctatcgggttcttgccgtctaccaccacagaatagttgcgtctcttatagaacataccaagctcgattcccatgacggaagcatagtacattgtacgcttgattgcgccttcatcgggggagataatcatgatgtcgtcatgcgcgaacgagatatccggcacgtctctgacaatagccttaagcatctggtatgtaggcttgatattgtcaaaacctgtgagcggaattgcgtttgaaactcttgtgtcgtgcgcgtcgaaggtgatgatgttggatacgcccatgttagcgagttcctggagagcgatagcgcagtcgagggattcacgggatgaacgcttgtcctgtctgccttcgtaaagcatgggcatgataacagtgatacgtcttgccttacccgcgatagccgctattacacgcttgagatcctggaaatgatcgtcggggctcatgggtacttccttgccgtacatacgatatgtcacgccgtagttgaagcagtcacagataatgtatacatcgtgacctctcatcgagttgtggagcataccctttgcctcacccgaaccgaatctcgggcagtcagcggtgttgatgaacgtgctgtcgtcatcatggctgcgccactcacgaagatagtaatcgacctggttgatgaacttatcacaacctttcattccgataaccgaaagttctccgaataagctgtcactcatataatacccctttgtatcatcataatattttattttaataaaccgagcagattaaactgcattcttctttagtattataccatattttcgcccgattttgaacagctggcgtcaatttttgatttgtgaattcatatagaattagcaccgacgaatcatgcactttccgccatttttgacaagcgcacttatttttcgcgtaaccgaggcaatttgcctgtaattccggcgaaaaacgtgtgtaaaacggtttacattactttgcggaggacctctctgctatcgacaccagcttgtcaagcgcgcctttcatgtcctccgctctgaacgacgccgtgcctatgacgaacacgtttgctcccgctcttgcgctgtcggctatgctgaactcccctattccgccgtctacctcgatatcgcattcgggcttgtttttgtcgaggtattcgcgaatctccctgattttcggaagcatggagtccatgaatttctgtccgccgaatcctggttctacagtcataacaagtatcatgtcgcagtacggaacaaagtcaaacgcgtcggcggcaggatacgcaggcttcagcgacactgcggctttcattccgagggagcggatatatttaagtgtttcaataagctcctccttcggcataacgtcgtggtggatggtcacagaagcggctcctgcatcgtgaagcacgtcaatatatttctgcggtgcggcggtcatcatgtgtacgtcaagcgggagtgtggttatcgaatgaatcttctttattatatcaaaaccaaagctgatgttcggcacatacattccgtccattacgtcgcagtgaagcatatcgcagtctgattcttcggcacgctttacttcatcggcaaggtgcagaaaatcgcaggcaagaagcgacggtgaggtttttatcttcataattttttctcctgaaagtttttttgtattatcgttaggatttcggctttatatgggcagctctatcccgttcgtagaattttttcgggcttttttcgcctcacaagaatagtccgctctttggcaaattcgggtcaggcggtataaactgatatcgacggtgcaatgccgtcttaaacagtattccccgctccgctaaagtaggctgtgtcgaaataacaggacgtttactcatggacttaagcggttcgggataacatagcgccggaggcttgtgcttttatgtatgagtttccggcgtacttttttctctgagaaggcataccgcatgggctgatattccctctccgcgtccggtaaatcccattttctcttccgtcgtagccttcacgttaagccgctgtacaggtattccgagaaccgcagccattttctcacgcatcgcggtaaggtacgggttcagcttcggcttctgcgcgattatcgtcatgtcggcgtattctatctcaaatccgtcgtttttcagtatctcggcggttttctcaagcaggatgcagctgtcgatgtttttgtattcgcccacgctgtcgggaaaattgtaccctatgtcgcgctcgcctgccgcaccgagaagggagtctatcagcgcgtgtacgagaacgtctccgtcggaatgagccaaaagtccaagctcgctctcgattttgaccccgcctatcacaagctccttgttttcgcagaaacggtgcgcgtcgtatccgtgtcctatcctcatatttcaccctccgttttgtttgccgcacggtagtcgagtatcgccttcgctacggctatgtcttccggatatgttatcttcatgttcgtcttgccgcagtctacgagccttatcttgaaaccgaacctttcgcacagcatacagtcgtctgtcgcggaaacgaagtccttcttcgcagtatacgccgccgcacggtacatttccgccatgaatatctgcggagtctggacgttccacacgttgtctctgtcaatagtctctgtaatgtttccggcgtagtcgctttttttcatggtatccgtagctcgagccgcacacgcagccgcacctacaatgtacgcctcggtaaaggtcttgtcaatcatctcgggcgtcacaaggcatcgcgcggcgtcatgtatcgctacaaaatcgcattcaggattcacggcttcaaaaccaagccttgcggagtcttgacgtgtatctcctcccgcaacaacgcgagtgacttttgtgataccgtactcgcttgcaaggttgcggcatcctacgatatcggcttcccttgtcacaagaataatctcgtcggtttctttgcttttctcaaacgccataaggcttcgtatgaacacaggtattccgtcaaggagaacaaactgcttcgccgtgtcgtcgccgaatcttttcccgcttccggaagctaagaccacggctgagttgaaccgcttttccccacccgtcgcaataccttttatcaaatcagaaatctttcccatagacataagtctccataataaactttcattataattatatcacaaatgcatcagtaaataaatacagccggacaaaaatttacttgtgacgttctatcctcttgatttgtcggcatttcggtgatataattcatactggatatgatttttggaggtaaaaatatatgacatacgcagaacttgaaccaaaaaaggtttttgaatatttcagaaaaatctcggacattccgcgcggttccggaaatgaagctgccgccgccgaatatgtacgctccaccgccgtttctctcggacacgaagcttcaattgatggcgcaggtaacgttctcgtaagagctaaagccactcccggatacgaaaaccacgctccgctcatgcttcagggacatcttgacatggtttgtgaagccaaccgcggcgttaagcatgattttctcaccgaccctatcgagtttgttttgaacggcgaccttctcacggcgaacggaactactctcggcgcggacgacggtacggcagtggcgataatgcttgcgatacttgactccgacctgccgcatccggagcttgaatgccttttcactacagaagaggaaacgggactttcaggcatgagaggctttgacgcgtccgtgctgaagtcctcgcgccttgtgaaccttgactccgagggcgaatacgaagccactgtatcatgcgcgggcggtgtgagatcacatattttctttgacgctgataaagaagatttacccgagggatattcttccgtcatgatagaggtaggcggactgttcggcggtcactccggagctgacgttaacctcggcagaaaaggcgcggttgccgttatcgcgagacttctctacgccgcagcaaaggacagtgacatccgtgtgtccgaaatcgtaggcggaaaccgtgacaacgctattccccgtgaatgccatgccgctgttgcagtaaaggacaacgaagccttcatgaacgcgctcacctccgaagctgaaaaaatccgcggagagcttgtgtcagacgacaacggattcaaggtgacagccattcccgtaaaatgcgaatcgtttatgtcaaaccgccgttcgctcgagcttatcgccttgttaaagactctccccacaggagttcgcacgatgagcagaagcgtccccggacttgttgagacttcatcaaacctcgccgttatcagaaaagcggaaaacggatttgagattgtcgtttcatcccgttcctccgttgaatcgagactggacgacatgcagaacataatcgaatgcgcggctctgctcacaaactccgaggtcaagcacaccgacagataccccggatgggactacaccgaaggctcggaaatgcagaagctgtaccttgactcggtaaagaatctcttcggaatcgacgcgaagataatcggaatccacgccggacttgaatgcggacttctcaaggctaagaaagacgacatggacatgatttcaatcggacccgacgtgaagaatctccattcccccgacgaagttctctcggtttcatctctcgcgagactttgggacattgtagttgaaattctgaaaaacgcgtaagcaaaaataaaatcctccgttttgcgtctaaatgagcattcggaggattttttatgtttattgagctgttacctcagtggttgtgcttcctattgttacagtatacgtctcgccgcttgtgagcatatccgaggcgatgtagagagtgctgcacttttccgcgctcgctatctctataacggtctgcccgctgctgtcttttaccgtaacgcttaccccgctttcggtaactgacgaagtgatataaggtacggtgaacgcctgtgaagccgaagttgctccgcgggagtatgcgatgaatgtaccgccacttaccgttgcagttccgtttacgtcgattatgcaatcgggttcgccgtagactaccatattcgggttgttgaccgttatagtgccgccggtgatttcaagagttccgtttgagtcaaggacgtcgtttccgccgctgagtgtaatgttgccgccgaatatcttgatgtacactccatcctcagcatgttcgttaaatccgccgtttccgcctccgccgaagcctccgaatccgccaaaaccgcctttaccaaagcctgagcttgtggaatcatcaccggtgctgtctccgtcaggcttatcgggaggagtctgtccgtcgctcggtgtaaaatctccgctcggcatctcgggtcttgttccgtccgtgttttcaccgtcaggctttgtgggtggcgtttgtccgtctcccgagttaaatttgctgaaattgaaatctctgtcgggaatcgtgaagtctgtatctccagaagagccggaagctgcgttaatcgagtcgtcggaggacacaatgtttatatctcccccgtatatctcgacctttttgccttcaagtccttcgcagcattccgtaatgtttatctcgccgccgtacacgataagcgatgattcagcgtgaaccgcgtcgtctcctaccgatatgttaatctttccgccttcgattatcacatatcccttttcttcgtttgagtcgttgttagatttaagtccgtcaacgcctgtggttattgttatctctccgtccttgatgagcaggcagtccttaccttttatcgcgtctcctaccgaattcactgtaattttgccggagatgattttgaggtcgtcttttgagtgaattcccttgtcgtagtttgcgtttacaataagctcgccgtcgccgtttatcgtcaagtcagctttggaatatacagccgccgcgggttcgttctctccgtcctcatacgtgtactcggagttgtcgcttatcgtattcaccgttcctgtcgcgagggtgatgcacacgtttttcgcggattttacgtatatcggagccatggcgttataaatcgtaactcccgagaggatgagatgtacgttttcctctgattcaactataatctgtccgctgtagtccccgctcagaacgtaatccccaccgttttctattttaatgtatccgtctccgacttcaagctctcccgttgtctccgcctgacttccgctgagagtaacgtaaaccgcgctgtcggaaacagatgtattcaaatcaaagtcggaatattttgcttcgggataatactcgccgtcggtggtttccgtttcgggattgattgtcgatgtgctttccgcggtattattctgctccgctgcgatatcgctttctgtattcgtagcgtttgtcgcacaggacgtaagcattagcagtgcaataaccacgctgagcagcttcttatatctcgtatttttcattattccgtctcctctgttgttttgtgacgttattataatttatcaattttataacagattaacggcaatgtgttttttttctgaaaaaccgatgatattatttgtattgcgctcttttttcaagaagagaatagtattcgagcgtctttggatcagtcactcctctgccggagataaaatactcgaccttttctttttctccatttgaatcgggggatattccctctttttccatcatatatttaaggcggttcacagttccctcggttccgtctatcatatcaatatctccgagaagagcgcggaagctgtcgcggaaataggcaaagtgggtacagccgagcacaaccgccgcgtatttttcgcttgtgtcaatgacggttttcagataagccgtgactgtcggcatatcgaacacggcgttttccgcgagagttacaagctcaggcaatgccgcaagtgtaggataagcacatcccgcgtagttttcgtcaatgaggtggtgcagcttctctccggctatcgtgagtggagtagcgcacacaagaatcttctctccgtggtgcttgaccgacgcgggttttactgccggctccataccgattatcggaacggaaaaggtctttctcagcgtatctatcgccatgctcgtcgctgtattgcacgccacaaccacaatgtccgctccgtgctccacgagacatccgactgccgcctcactgtaccgcacaacctcttccggcttcttttttccgtacggaacatggtcggtatcggcatagtatatgtaatcggcgtttttgatttcttctctggcgtatgacattaccgagataccgccgactccggaatcaaaaaagcctatcttgaagttttctctcatgagagtcctcttttcaaacgttggtatacgacattattatatcccagtcaagaggatttttcaagtaccgcacattatataaagccgataagccagtatatcactccgtaaaccactcccgccgatattccgtagaggatgacaggaccggctatcgtgaatattttcgctcccacgccgaggatgtacccctcagaacggttgtcgacagcgcatgaggaaacagcgttcgcgaatcctgttatcggcacaagagttccaccgcccgcgtgctttgatatgttgtcgaacactccgagacctgtgagaagtgcggttatgaaaatcagcgtaacggatgtcagcgtgcctgcgttgtcctcagttattccgaggtatttatagagattcagaagtgcctgtcccgccgtgcagatgagtccgccgatgagaaatgcacagacgcagtttttaatgagcggggattttttcgcccttgctttagcgtatcttttataaaccttgctttccataaacatatatccttattcggtttaatctcgcattaatattgtgcctctttttgattaaaatatactaaaaccgaatttcgcaatatctaatactgtcgttcggaaatttactgtcttttaattgactttatcttcggatgggtgtataataggagcatgaaagcaaaccaacatttatatatacgaaaggaatttaatcatgtcattttttgaagaattcaagcgtaacgctaccgacgttgcaaacaaagccgtaaaaaagaccggagaactcacaaacatcgctaggctcggcatcaacgttaagacaaacgaagctaagctctcaagcgtatttgaagaaatcggttatatgttctacgaagctcagagcaccggcgcagaccacacctccgatatcgcttccctcattatgaaggctgacaagataaaagccgatatcgaaaacacaaagaaggaaatcgcaaagctcaagaaggtagttatctgcgcaggctgcggcaatgaagtatccgaggaagcttccttctgccctcactgcggcgcgaagattgaaaagccgaaacccgagacctgcgaagacgactgctgctgcgacgaaaacgaatgctcctgcggctgcggatgt

SEQ ID NO: 4254 - DNA, 19038 bp, Unknown
  16S sequences of unknown bacteria
taccgcataataataccccctctactgggtgtccagtaaagggggtacatatcaagcagaagcctccgcttttttcggtgcttttcagtgctattttattttgcataggagaagcgaagagggccaaactaaaaaaagaaatgttggaaatagaaatccggcattggacaaaagcagatatgctgctggaaatcatcgggaggaaaagccatgaaaatcctattgatcgattacgatgcgggaacagtgtctctgggaggagatacccacgcatatgatttggccaaagagtggaaaaaaagcggtggaaaagtgctgattgcggcggcggactattcctatttgcggcaaaagaatcctgaaaagccgcaaataggcaaaatagaggaacaggacggcgtaccgtttctgtggataaagtcgccggcggcggctgacagagagaaaaaaattttacgtggcacgctgccctttgaaaagggccttcagcgcagcatgggacttatttccgactggaagccagatgtggttttgctctcctcccgccatcttttgggcagccacggagcagcgaaaatcgccaaaaaactggatatcccttttctgtttgatgtcagacggatttatccggagcatctgcaggaggtattagagtatacccccggccattacttgatccggctgttttcccatatgcaaaaaatggcataccgaaaaagccagttggttctgtcagtctattcgaagctggatgaacatatgacagagatgggtgttgattcgcaaaagtttacatcggttccgcaggcgttgacaccttcttttttcaaagagcataagccgccgcagcgtcatattgactttgtccggcgatatcagggaaaaggaaattttatttgcttggctgggggaaaaatggaaaaagatcaggaattggacctgttgattgaagcggcggcacttgcgccgcgggatatactgtttatcttggcgggaaatggtatgtataaaccaaatttaaaaagagaagtaaaacaaaaggcgctatcaaacgttttgtttctggatggcgtacatccccagcagttgatcgacctgtatcagaccgcggactgtctttatgtaggaattccgccattccgatggcaccaatacggtgcggatacgactcgtatcctgttggcaatgtccagcggtgtgccggtaatctgcgccgcagaaatccctgaaaatccagtggaaagagcaggctgcggaaaaattacgcctccgcaggatccccagtcactgatgcagtcgctggaacagctgcgcgcgttgccgctcgaagagagaaagtccatgggaaaacgaggaaatgaatacgtgaaccaaaatgcaaccatatcccatcaggcttcttcttattgggaagcgttgcaagcggcggtcaatcagtcaaagggtgagaaaacacgttcctgacgattaaaaaactccagccttttcgcaaagaaagctggagtttttgtttaataggtttcgtaatgaattttttctgcagaaaaccggtcaacaaaccggttctcttgcaggccgtaaccgactgaaatcattgcaaagggaagaataccatccggtagattcagcgtattatgcagcgcttgcgtacgatcctcatccggataaatgcccatccagcatccgccgaggccctcttcggtaacttgcagcaggatattctgtacgctggctgacagatcctgtacccaaaaacgatttttctccccggcggtttgaagattgaccagagggaccaataccaccggcgctcgggcggcaggttttccgtaaggagtcaatgcggcgattttttggatcatctccggatttttgactactaaaaattcccaaggctgccggttcatggcagaaggcgcctgcattccggcacgtaggatacgttccagtttttcctgctccacagggcaggaatcgtattcccggattgaacggcgggtaaagatactattcataaaaaactcctttctaaaatcgtggtactcttaacggagacaacaaaacccgaataggatgacaaaatgatagtatggtcgaaagactgtgcggttattgttttgcaaagtaatagcggtagggggattcaattttcgctgccgacttattcttatttgttttcttttttaagtcttgcttttgcttcttcaatagtttcaccgtctttggtaaggtaggtgtctacaaacttatcttcgatttttgtatagccaccaacaacaccttgctcgatttttttgtaaccgttaacgacacccttttcaattttcttgtagccgccggctactgtctcggcgattttttcgtttacttttacaattttagacttttagacttagccatatctattctttttcctcctataagattcattccaagaaacagtataattatccataccgttgttcccgtcagaatattaaataattgaatttctgccgctttcataccgggaaaagtcacaagcatggaacgttgcattgtatagattaaaacacacgcatctgccaatgatatatttctaagtgtctttagaactggtgaagtggattgttttgtttttaccgtacctacaatcgctatcgttattttggtaaaagtataggttgcgattgtgatcataacgatttcgtggaaagctgtacctcgttcttttagtgcggataaaatagttactccaactatgcagaaagataacacaaccaataaaactcctgtaatccgctttgcaaaaagttctgtaccatttatacctttaatcatggggatcaaagcaatcagcataatgatgccgagtaagccgataagcgtaccccatacgatctgctcccacacaagacacatacacataccgagagcaaacagcaccccactcacagttcccattatcaatgcaaccaaactactcttttgcatttgacccccctttttcattaaaccaacaatcatatttttattacaattatactataatgtttttgttcaagcaagacaatcaacagttttgcaacgagtgttggaataatggagaaaagtatgaatgtaaagaataacaaacgccgcagggaatcacaagataaaattgaaaaggcatttgtagaacttctacaaccccgtgagatcaaagaaataactgtttcggatattataaaactcacgggattaaaccgaagcaccttctatgcgaattatattgatatatttgaccttgccgataagacaagagaaaaacttgaagcagattttagtaacttatttgccgattacgattacgttaacgaacatagtggcgtattaaagatgtttacacatataaaagaaaaccagcttttctataagacttattttaagttgtgttatgacgataagcaccttgtttcaatatacgatacgaagcgagttgagaaggaacatatagacagcaacctcaaataccatattgagtttttcagaaacgggcttaacgccattatcaaaatgtggcttgcaggcggttgccaagaatcagcgaaagaaatggcagaggtcttaaagcaggagtacagggggcgctaatttgtaccctatgccttaacgcaagattataaccctctctcccatagagcgactgtgtgacatcaaaagcagaacagcgagcaagcacgcaacagaaaagaaaatcgcccttttcgagcgatttgaggacaggcttgcgaaggtgaaagtgatagtttgtgacaactttttcaggctttccggtgagtcgaaaatcaagcaggagaagggtcgaggttgtaaattccccccgattctgttcacagcggatggcaacgccgaccgcacagggaattcgggatttgatactcgaaaaaataggtgctgaaataaaaaaagcaaccaggagattttttatcccttccggttgcttactccccaccaattctccgttatgaacatcatggaaaatacggcggttttttgataaggaccgattccttgcgagacattccagcccgcttttgttttattatagcatgatagcagtatgaaacaccgcaaaatagcaaatcgattcagtttgttcaaatcgcgtattttgtttggaaaatatcaaatttgaaaccgtcttttctcgttgatattgattttgctttttatattctgcgaaggttatatgctgatcctgttattttgcggcaaagaaaatcccgccccaatactggtgcgggaaaaattttattgatgatcccgatgacgaatttctgcccgtttgattttgccgcccaacgtcttaggaagttcgtctacatattcgatgatacggggatatttgtaaggcgcagtgactttttttacataattctgcaattctttggtcaattcgggagaggggacataacctttggccaatactacagttgccttgactacttgcccgcggattggatccggcgcagcggtgactgcgcattccactaccgatggatgttcagtgagggcgctttccacttcgaatgggccgatacggtaaccagagcacttgatgacatcgtcattgcggcccacaaaccagaaataaccgttgctgtccctccaggccacatctttggtattgtaccattcgccgcccagattggctttggtcatctcgtcgtccagataatatccagtgaaaagccccgtaggccaatcatgacctttgagacggacgacaatttctccttcttccccgtcctcacaaggcttgccctcactgttaatcaggtcgatatcgtataggggagagggtttgccggtagaaccgggtttgggagtgatccagggagagaaattggcgatgagcaccgacgattcgctctgtccaaagccttcatacagctttaaaccagtcaactgttcccattgcttgaatacttccggatttaaaggttctccggcaatgcagcagtgctgaatagaagacaggtcgaatttggttacatcctcctgcagcataaagcggaacatagtcggcggcgcacaaaaggttgtcactttatagtgctccagcttttccagcagtttgagcgggataaatttatccatatcgtagcagaaaatagtggcgccgcagatccactggccatagattttaccccagccaaattttgcccaaccggagtcggatacactcatatggagtttgttttcctgcacctgctgccagtatttggcggtgacgatatgccccagcggatgagcaaaattatgccgcaccattttgggcataccggtggtgccagaagtgaaatagaccagcatgatatcgttgatggtatgagcctcgtttccggtaggccgttcgaacatcggcgagtatttagccagttcttcggaaaagtccagccagccgtctttttttccggcgaccagggcacgaacggtaaggctcggcgcttccggcatagcttcttccacttgacgaataacgaaatcgtcgttcacgcatacgatcatatggattttagcggcatttgcccggtaaaccaagtccttttttgtcaactgaagggaaccggggatgagggtggccccaattttatgcagtgcggtggcgcaaatccagtattcccaacggcggcgcagaatcagcataacgacggtcccttttttgacgccgtgcgcccgaaagaagttggccgcctggttggacataaggctgatatcagtaaaagtaaagcgtttttcctcttcatggtcattgcaccagaccagtgccattttttccggctcctggcgggcccattcatctacaatatcaaaaccaaagttgaaatcggcaggcacatgacagcggtaattttctttaaagtcttcgtaggagtcaaattccatccggggcagatatcggttcaaaagcattgattgcatcctcctttttatgcgctatgacggctattcggcgattaccgttacgaatacggcgggcttatcgtcggcgcatacctgcccatgaggatacagggggttaaagtagatggaatcgccctcttccaaaatcagctctttatcctcgaagagtacctttactttcccttccagtaccagattgaattcctggccgctgtgagtaatcagagcgggctttttatcatctggcatcagccgaacccgaaggggctgcatgattttatgagtaaaacggaaagccaaatcctcgaaatcgtagcccgggactcgctcaacggaaaggcctttgccctttttcacaatctgataggtatccaagcggggatcgtttccggtgaggatttcggtgaaatccacgccgcacaggttggcgatctgatagatcacgctgatagggatattgtatccattctcctcatacgcgcgcagtacggctacgtcaatccccagctcctttgccagttcttcctgcgtgtagccgcaggcctcgcgcagttcccggattcgggcggcgatttccgcgatttgttccattacgtacatcctttctcacttttttcttttaaactattaaaagttctttctattatagtttttttcgttctgaattacaagagaagcaaagcggatttagaagagcgtaacagaaaagaggaaaagaacactgcttttttgtgcagaaataaccctgtgtttgccatagtgactgccacctgtgccgaagagaacaggcatataaaatttggcctatgtttccataaaaaagggctgccaaatcataaaaaccatcctatccgacaaacaggacaggatggttttgtctagtacagattctatgacaattaaaaattgttagatcatcgacagttttagcggttcagtctcaattttttgacgagattcctttgtgctatctattttaatttatcccccatgattttacaccgttcttcaaagtttacttcgcggtgaatctgatgaagcatcccaatatacccaaaaggatctgaaaacatggcattagtaagacccatttcttccataacagtaggcggctgtatctctgtgcatccaacactcattgctttttgataactttttttgatatctggtacgataacgttaaaccatataggatttggatcaccgagtttcggtgcgatcagcataaactgtggattttcatccagcatatgaaatcgggttccgtatatggtaaataccgcttcattatttccacgcggatactcagtaacctctacccgccgcacttcgaaaatactctcatataatgcaagtgctttgatagagtcctgcacaacaaaattaacttccacgccaatattcattttcaaaggcaccttcttttactaatgagattgaaacgatttttgggcaagtaaaatattcggaaaggtttttgatgtcaaagctgtaagactctattcttccagcgctcatcccagacttgcgtttttcatccattttccttgtttaaagcgaagaatgctcaacgcgcctttggtcatattgtcgataaccatggcgatccaatagccgtgcaggccccaatgaaatacaaaaacaaagagcaaggccaacgggatgcgaagaccccacataccgaaaataccgatgaaaaatggacttttgacatctgctgcacctcgcaacgcaccggaaaggatgctgcaagaagcattgagtggctgcgcaatggcaacgatacgcagcatagccgcagccaggggaattaccgattcatcgcgagtaaaaagacgaatcagcggctcggcaagcacaaacaaaagaatgccgacgaagatcatggcacagaagcccagacgattggcaagtttaccgaaattcttggcatcgtcctttttctttgcgccgatggattggctgaccaatgttgtggtagctacgctgacaccataagccggcatataagacagggattctgccgaaacagccagtgtgttggccgctactgccacggttcccaaagttgagacaatgcgggtagaaattacttggccagaggtggtgatgaactgttccattgcagtgggaacccccaaaaagaccatattttttaagatatccttatccggtttgagatattctttcttcagcgaaagatgaatttcccggcgtttgttacaaagagaaaggaacaacagtgtggccgagacggccaaagaaagcgcagttccccaagcagcacctgcaacgccgagaccagcaccaaacatggggaaggtaaagccgaataccgttaagtcccgggagggaaagatcaataaaaagttgaaaattacgtttagtataatagcagtgaaattgtactttaatggggtgtgagtgtctcccatacagcgaagcagggaagaaaatacagaagaaagcatattgaacaaaagggaaagcgcgattacctgcagataagcctgcgcatggggaacaaccgcttcttctgcccccagccaagcagggaggttccagtgcaaagagaaaaagacaagcgttaatgcggcgccaacgaccaagctggtcaataaagactggcccacaacctctcgggcacgcttataatttcctgcgcctacggactgagccagctggatcgatagaccgacgctgacagcagaaattacgctgccgctgagccagattgaagtagaggtgatccctactgcagctgtggctactgcacccagcgcaccgaccatcgccgtatcactgaagtttaaaactgtgaacatcatctgttcaatgatagtgggccaggcaagttttaagatggtggtaaggggtgttttgcctaaagttaaaacgttgatagattgttttgccatagtctcctccattttttgtaaatttttttgaaagcaaagaaataagcggtatgtccgcttatttgcgttatgatgatttgatctgattttttattggtaatcttcgtccttagtaggaatcaactgtcccactgtttgcaaatcaccagtcaaaagggcgagtactcctttataagtcagaagaggatcagacaaaaagtgttgacggacttgttccgcttcctgctcggtgggcataaacagagaaagagaaagcagatcggatccgatatcgcagatcgtcatatccacaatgtaaccatcttctgccttacgaatagaagcatgattcgaagattcgatttttctgcgcagcagctggtgccttgcggatttgacagccttttcccggacagaaaccggcaacgtaccggaaaaggtgcaagctgtttgacgccccagatcagtcagatggtaactggtatcttcctgacggcctgcacaatcctcacaggtgagatggccggactcggtcagatcgctcagtgcattcgccagctcgaaatagtttaccagaccgcggtgcagcagtgcgtcactgatctgggtaaaggtcatgccggtaccaatctgccctaaaagatagcaaaccaaaattttgatttcatagccatgggtgaggccaccaggctccacaccggccgtaaaggcattcaaatccaaaaccggcacatccttccgcacaaaactatttttattatacatgattgtaaataaaaaaggaagcaggaaaatttaacctgcttcctttttgtgcattttttcaaatatattctcgcaaagagagcaccatcatagggatgtcgggggaggaaaaggaatttttacctcataggaatcgtcaatcaaaatgtaatcacagctatattttttgcacattttccaattttcccggttttccgctgctgccgattctgccgtgtagtaagaatcgtccagcctgttctcaatgacactggcaaacttttggatatcagcaaaatggttggcaatatatttttctgacatcaccagacagataaatcggatgtttttacggtaaaaatcattaaaatctgcggtccagtcaaaagggatataacatccttctatcaccaggttttgctggttttcaatcgccgttttgacgatttcacggataataggccacagatactctgtcagtttatcatcatcctccggggtcaaattggtatacccgctgcggatgagccccatcttaagatggtcgatagaaaggtaaggatagccgtattcctctaatattttttgggccagtgcggttttacccgtgtgcgaggcgcccgtgattaaaaaaaccatacttgtcagtccacttcattttctttttgctgcagctgttcctgttggatagaaaaaacggattcatttcctacagtagataccgtcagttcaccggaggagaaagtcacactactaccacccaaaacggcgaaagaagcgtatcccgtgtcagacgagagagaaactgcggtaacaacggcaaaagaagcggaggaacaggtatccgacaaaaggatctgatctgccgccaaaagctttttttggtcgctgctgctgtcataaatgccgggaataaaatccacggcgtcttttacttggtagacagaactgaccagtaaggagccatctgctttccaggcccccagatagcaaccctcctgcaccaaggtacgatgcaaaatcgggttggttggatcggaaatgtcaaaaaattgcagttgtgtcccctgcgcgcattccccggccagcaccagcatttgtccttctgtaaataatgtgccgtggatacagttaacgtccgttcgcgaaagcagggcaccgtcggatgcgctgcggatatccagacgagaggccccttccggcgtacaggtaagggtatactgataggtgtggtccaccatggaaacggagcagtctgcccccggcagaaaatcagaatcgctgttttgggaaagagcgggcagactgctgtcagatgaaggaatcgtactcaaagccaattgaatttgaccatagctctccgctggatagtaggctgcttttttttcgttcaaaccatcggtgctgccgtccagcgttccgcgcagggcagaagaaacaacgaaattttgggaaaatgctccgctttcgggcgcttcagccagttcatatggtacagcctcgtcagtatcgcagaatttttgtgctgcctcgggctgagcttcaccgccggttccagcagcagcgttgtcggttgcaacaaacggagaaagcggcatccacagcccatatccgatggccaataacaggaaaaaagcagcagaccaaacccatttatgagataggtggggtttagcagcggcgggcaacgacaaacggtctttcatcccctttgctgtggcagcaaacggaaccgggatctgttggtccagctgctgcaactgttttttgatttgagaaaaatcttccgcagggtttgaacgactcatttgtatcacctctcttccatttgtttttttaatttttgcaggctgcggtgcagtttagaactgacagtaccatgcggacagcgcagcatctgcgaaatctgtttggtggtgtatccataaagtaccgataaagaaagaatcatcctttcctgaggagaaaggatcgtcaaagcctgcaaaagatccgttcgggcgatgacagcagaatccattccgtcggtgcgcaaagcggaatcagcggcaaaatcctcgatttgaagctgatttttctccttgacatatcgggaaatacgccgcttgatgcggatagacaggattttaaaaatccatcctttgaaagcgtcggcctcccgcagtttggaaataccgcggaatgcctccaaaaaggtttccgccaccacgtcctcggcgtcatgagcgttacctaaggcatacaaggcatatttatacaagtcgtcctgaaccagttcatataattgagaaaaacattcgctgtcgccttttttggccccctccaccagttggaaatcgatattcatgttgtcaccacccttatgggttcataatatcagtgcggcaaaaccgctgattttttgcatgcagtggaatttttcacaaaaatttatcatccttggtccttgatgtcaaaatgggaaaacagtaccttttcaaactttttctcgggccagagtcccgtttgctgaagaccttgctgtatccaagcggcgcaagtcagacacagcgctgcccgtgccgcggtaagataaggctgtggggaccagactcgtcggctgtcataaaaaaaacaaaaagcccgtgctgtttccagcagaataggcaaaagactttggcttttggcatctgccagccgtgcgagggaaaaaataagagccagctcctgcggtttgtctaacaatgccaatgcgcagtccggacagggaagggacagcatcccttcggcttggcaatttcgtaaaatgctgcacaaccggacaaaagatttttgcagttcagccacggcgggagaagaagtacagaaaaaaccaaaatcctcctcggtaaaatgccaagctgaaaaagaagcgctccgcaaaagaaaagaggcgctttcggtataccaccgcggggatgggtgaaaattcagataaccgctgtttttctctatcttggaaaaaagaagatcttctcccggcaaaaagaccgacaacctgtccgccgcttcagcaggagaaatcccttttgatgcggcgcaaacaaaggcaaggccggaagaaaacactccctgcccgttcagaaagcttgtcctaatcgggatctgtttgattttacaattgggaaagacctgttccaatgccttttgcaaaagctgctgcagctgccgcgatgtatacgcaatactgccgtatcctggttccataccgcttaccgtcctcgtcaggaaggatagtactcttccacatccacctgcagttcattttcactggccatgctggcgttgacatccaatgtgtagcgcacctgcaggtgtccgccgctatcatttagacaagaggtaatgtcatcgccggaaatgcccagcatcatcgtgccgtatccggtatcgtaaaagcactggtggcgctggcctttttcgataatcagttgggaacgcatattgtctccggtgcggcgcatggtaactcttcgatccccctccactttcagggtggtttttgcgccgtcaaaaccggtagcctccgattcgttgtagcaaatatagtaggcgtttccccgccgatacagcagacctacggtggtcagttccaccgaatcctgttcatcatcagcgaattgggtgccctttatggtaattataacgtcctttttcaatggaaatcctttctaccggcacagatcgtctacgtccacatgttccaccgggcgttccaggggatgaccaagaaaacgagcggcaatagcgtcgaaatcctcggtatcggcggagacgaaataacgggtttggccttccccttcatcagcctgcaggccatgagcggaaagatattcttttaccagccgggcggtttcccgcccggggtcaattaaaacagtgccgctgcccatgatctgaccgatcagtggagcgatcagcggataatgggtacagcctaaaaccagggtgtccggtttttgattggcaaaagcggacagataatcccgcgccaccaattcggtcacaggattgttttcttcgatataaccattttccaccagaggaacaaacagagggcaggcacaggcggtgaccctagcatgaggcaacgtttctcggatgatacgcaaataggaaccgctgcggatggtggcagaggtaccgatcacaccaatgcactcagagcgggtagcgcggcaggccgccaacgccgccgctttgacaacgccggtgaagggaatctgcaaatcggcaatcatctcgtcggtcataatagaggagatggtaccgcaagcggcaacgatcatttttacgtcgtggctttgcagaaaacggatgttttccattgcaaaccggcgcagggtctgagggctgcgcgcgccgtacggtacgcggccggtgtcgccaaaataaatcagatcttcctgcggtaaaagctggcgcagttcttttagcgccgtcaatccacccaggcctgaatcgaaaataccgatagggcggttatccattgcgcctctcccctttatttttgaaatgccagctcaatcaagccgccgaccagatcataggggcttataccgccctccatcatcagcttgggatacatgctgatgccggtaaagccaggcagcgtattgacctcgttgagaataattccatcatcctgtacaaagaaatctactcgggccagtccttcacagccaagagactcgaaagcggccaaggctagttcccgcaccaaatcggcggtttctgccggaatccgggcgggaatgtacaggtcagtgctgtcatcttcatatttggcttcataatcgtaaaactcttttttgggtgcaatttcgccgaggacagatgctttggcagcatgattgccaaaaacggcgcactctacctctcgtcctttgataaattcctctacaatggctttcccatcgtgctggaaagccagcttgagaccctctaacaaggcggttttgtcgacagctttgcttactcctacggaagatccagcgttggcaggcttgataaacatgggataccccagcgcgtcagacagttctgcttccagctcgtcaaacgactccaaatcccatggatatacatctgcccacatggcgttgggaatacctgcctgatccagaattgtatgggtgatggctttatccatgcaaacagcactggacagcacaccgcagcccacaaaaggaatctgcgccatctgaaatactccctgaatggtgccgtcctctccgtttttgccgtgaagtaccgggaaaacggcatccagctggatggtgcgaacaccgtctggcgaaaaaaccagtagcccgtgataagaaggatccggcggcaggacagcaggcgtcacatattcgggacggttccagctgtcgtctgcgatagcattttcaggaccggtataaaggaaccactggccttttttggtaataccgaccatagtaaggtcatatttttcccgatccacgccggaaataacaaatgaagcggatcgcagcgatacctcatactcgctggaggcgccgccaaagattaccgcaacagaacgctttgacataatcggatcactcctatataatgataagcggccgccaaaagggccgcgctgggcaaacaggctgagtggtgcgcccgcatacaagggctattttaccacagtataagaggcaaaatcaactgttggccgggcttcactccagaaatgaaaacaatctgtaataaaccttatcgtgtacgaaagccttttatgcgaatttgcgcctttttaggccgctgcgaaaaaattttctgtttttttcattttctcgtcaaaaaacagttgacggcggtgagattccatgatagacttgtactacctctaaaaagggtttatttttttgtgttcatttttaaaagcgtttccttgcccaagagggaggcaaacaattccgttaatcaggaggtgccgaaatgagagtaaaaatcaccttggcttgcacggagtgcaaacagcgcaactacaacaccatgaaaaacaagaaaaatgatccggacagacttgagatgaacaagtactgcagattctgccggaaacacacgctccacagagaggcgaagtaaggacgagaaaggcaggggttttctgtaatggctgaaaaagcaaaaaacgagaaaaaagaaggctttctgaaacgcgtcgcccatcggttcgtcaaaggctgtaaggacatgaaaggcgagattaagaaggtcgtttggccttctaaaaagcagattataaacaatactgctgtggtattggcctgctgcgtcatcgtcggcgtgttcatttggattctggacggagctttgtccggtttggtgaatctgcttctcagcagcgcaggttaacagcgccagccgcttacaaccggtgcgcgtaaccttgcgtggagggatgaagaatgtctgaagaggcaaaatggtatgtggtccacacctattccggttatgagaataaagtagcgaccaacatcgaaaaagctgttgagaatcgtgggatgcatgagctgattcaggaagtgaaggtccccactgagacagttaccgaaatcaaagacaacaaaaagcgcgaagtagaacgcaaaatattccccggctatgtattgatcaaaatgatcatgaccgacgaatcttggtatatcgtccgcaatacccgcggctgtaccggttttgtaggaccttcgtccaagccgatcccgctgacagaaaaggaagtggcggcactgggcgtggaaaaacgtcagatcgaggtcaactatggcgttggtgataccatccggatcactgacgggccgatggaaggctttgccggcatcgtgaaggaactggatgtggaaaaagacaaggtcaaagttgtcgtttccatgttcgggcgcgaaaccccggtagagctggagctggatcaggtccagctggatgattaatctttttgagggaatcggtagcaataccggttttgcggcggaatttcgccgcgcttgggtgtgttccgggcatttgtccggctcatgcctgtgggagggatgggaatccaccgttccgccatgaaccacagaaactatggaggtgcaaattatggctcaaaaggttgtcggcttcattaagctgcagatacctgccggaaaagcaacgccggcgccgcctgttggtccggctctcggtcagcatggcgtcaacatcatgtcctttacgaaggagttcaacgagcgtaccaaaaatgatatcggtatggtaatccctgtggttatcaccgtgtacgcggaccgctctttctcgttcgtaaccaagactccgcctgctgcgatcctgattaaaaaggcctgcggtatcgaaagcggttctggtgtaccgaacaagacaaaggtagccaaaattaccaaagagcaggtaagaaaaatcgcggaacagaaaatgcccgacctgaacgccgctaacgtggaatcggctatgagcatgatcgccggtactgcgcgcagcatgggtgtcgaggttgtagactaaactcccgggtgggaggaaaattccgtttattaccactcataagggaggagaacgagtatgaaacacggtaaaaaatataacgacagctccaaacttgttgacagaaccaaactgtacgacgtggaggaagcgatggacctgtgtgtcaaaaccgctactgccaagtttgatgagactgtagaagtacacgtaagattgggcgtagattcccggcatgctgaccagcaggttcgcggcgcggtagtactgcccaacggaaccggtaaatcggttcgtgtgttggtattttgcaaaggcgataatgttcagttggcgaaagatgctggtgctgaatacgttggcgcagaggatatgatgcaaaaaatccagggcgaaggctggatggattttgatgttgtcattgcaaccccggatatgatgggcgttgtaggccgtctaggtaaaatcctgggaccgagaggcttgatgccgaaccccaaagccggtactgttactcctgatgttgccaaagcggtaaccgaggcgaaagctggtaaaattgagtaccgtctggataaaaccaatatcatccattgccccatcggcaaagcttccttcggcgcacagaagctgcaggaaaactttgatactttgatggatgcaattgtaaaggcaaaaccggctgcggcgaaaggtcagtatgtgaaatcttgcgtgatcacccccactatgggtcctggtatcaagattaatcctggcaaatttgttcctgcagtataaaggcttattcagctccgctttagcggagctgttgcttttgttgaacttttttgaacagaatgcttgacaagccttattaaatagcatataataaaaaagctgtcatattccaaagacagcaggtgctttgcataaaagggtttcccttgcctgccgaggaaatatagccagaatgaattaagatttcatttgggttctttcctaggttattggaaagaaccctttttgcatcaagtagatactttcaggaggtgaatagacttgcctagcgagaaagctttacaagcaaaacaggaggttgtcgctcagctgaaaagcaaactggatggtgccgtagccggcgttttggtcgattacagaggcattaccgttacggacgataccaaattgcgccgtgagctcagagaagctggaattgattacgctgttgtgaaaaataccctgttgcgccgtgcgttggaaggtacggaatacagcgaaatggcttctgttctcgaaaacacaactgcgttcgcggtgagccatgaggatccggtggctgctgctaagatcctgtccaaatttgcagaagattccaaaggaacttttgcaatcaaagcgggctttgtagaaggaaaggttttagatgttcccggtgtaaccgcactggcgaagctgccttccaaagaacagctactcgttcagctgctcagcgtgctcaatggcaacatcagaggtttggctgttgcgcttaatgccatcgttgagaaagagaacgaaaaagagagcgcttaatcgcgttttcacaactgtatgaaaaaacaaattataggaggtagctacaatggcttctgagaaaattgtaaaatttgtagaagagatcaaaacccttaccgtcctggaactggcggatctggtaaaagcgattgaagaagaattcggcgtttccgccgctgctcccgttatggttgctggcccggctgccggtgctgctcccgctgctgaggagaaaactgagtttgatgttgttctggctgaggctggcgcttccaagatgggtgtaatcaaactggtgaaagagattaccggtctgggtctgaaagaagcgaaagaggttgttgacaacgctcccaaaaccatcaaagaggctgtttccaaagcagaggctgaggaaatcaagaccaaattg
